United States Patent Application Publication US 2015/0240253 A1 - sequence listing, part 21

SEQ ID NO: 96617 - DNA, 573 bp, Zea Mays
gaaactagaaaggtaagaatagtcgtaaggatacacatgtatctccacaattttatactgatgaacttattttttggggtgtagaaactagattttgctgttgatgggataagcttagctagaacaaacaacgcaaaggcaaagggcagaacaatcaaacggagtgaacaaaaagatcttaagttgggtgcgaatggtacaaagaagaagaaccgaaagtgcaaaatatatggcaatgctgatggccacaacagtcatacttgtctatctatataggataatagggttcaattggctaaccttgttgtgcgcaagatagggcgacctcttggatctaagaacaaaattggaagtgcacctgctcattggaatgagatggcaacttcaaaaaaatagagtggatgacgttgacagtgattcatccagtggagagtagataacacgagtgtgatatcatgagatatgcataacataaattatatatgtctgtgttgtcaacgttatatatgcaataatagttatgattaacctagatgactagtatcggatattttcatacaaggaaaagataaa

SEQ ID NO: 96618 - DNA, 462 bp, Zea Mays
ttgccactgaatgaggacctggcgcatgcctgtgtccaaccatgcctgagtgccgctgctggaactggaatagctacgccatgatgcgtaggcggcaggggttgtgtagactccggtggctgacctcgaaagaggttgaggaggccaacatggaagacatcgtgtatgtgggctctcggtggaagacgaaggcggacaactactttgttgatgacttccatcacctgatcggttcgtagaagcgcatactcagcttgtcggtggttgcctgtggcagggataggggggtacggtgccgaacccgcaaccagacccaatcgcctaccttgtaggacaactttcgatcgtagtgtgccttgtaggatgcttgggcctgctccagtctgtaccacgcgtccttaagcatctcatcgtgttcagtcattgtcttggccaccgcttctacacgcgtttctccctgct

SEQ ID NO: 96619 - DNA, 365 bp, Zea Mays
gaaaactctgccaaagaaagacacttgtcccaatcctttccgtagtgtagtacacatgctcgcaacatgtcttcgaggatttgatttactctctctgtctggccatctgtttgaggatggtatgctgagcttcgtattacctgggtcccaagtgattcttgtagctgctcccaaaagcgtgccacaaacagtgttcctctgtcatatacaatggtctttggaataccatgcaaccgcactatttgatcaacataaatttctgcatatttctctgtcttgtgggtggtatgcactggtaagaaatgagcggtcttggtcaatctgtctacaataacccaaatggaatcatgatgcctggaggtatt

SEQ ID NO: 96620 - DNA, 461 bp, Zea Mays
ctggtatcggagcgtagcccttctttgcagatattatgaggcatcttcaaaaggattttcaaaggtcttacctaaaaactcttttctcttcttatctaagtattctgaagagtctatcttaaagaccagataggaagagtgcaatgtatagaaggttgaatcgactaaggttgattctgtacttacacatgcatcatgctaagaattatactaataacattttcccccgtagaaagatgccaccacgcacaaggctaacggccacgcaagtccactggaccaattggagtgccccggcatcaactggcccctcgacatgaaagcagtagcagtgggagtaatgaccccataggagatcttgaagcccgagtgagtcgacttcaagcagcgctgcaacaccggaccaatgcttgggtcgccgacggagatagaataaatgaactgagaagggacatccgtca

SEQ ID NO: 96621 - DNA, 483 bp, Zea Mays
gaggagcaaagaggagtcaaaagtcgccgcttcgtgttcggcgattgtcgtttcaattctacagggacagggacagttgaaaagacacaactgttcaactccacatgcggctgagttaaggctacagggacagttgaaaagacacaactgttcaacatgaaacggtttccacaagcggctgagttaaggtgccgccagtggaaagatggtttccactggcggttcgtaagactaccgccagtgctatgtttttcactgacggtttcttaagcaagccgccagtggaaagaaggttttcactgacggattcttaagcaagccgcctatgaaatttgtattataaatacccccacccccgacaggaatagctagctcgcagccaacttccattggaggcgattttggaggtccagattatataaaatacaagggtcgaggttttgatcttcattttttggaggaaggttgctaagaaaggttggt

SEQ ID NO: 96622 - DNA, 690 bp, Zea Mays
ctacgacagtagcgataaaatgaatggtttcgtgagattcaccactatcaaagatgtacaaaacatgtgatcaaaactaagaaatacaatcgagctcgactggccacgataggatgaaacaacggcgacatgctcaccggacagaacagcaaggagttgccaaggtgatttcagcctgaaagacttggcgtgaccggatgagtacggacgagaacgtagtgacagtaagaccttgagcagtcctagataaagagcagaaacaaggagatatggtgtacttcccgagtggtcacggttatagtaaaaaacggacactcggcaagacatgtccttatctgagcgacgagaaagttcggctaaggttggcatggactgggcacgcggcttcgacccccatgtccacgcaaactcgaactacagtgaggcaaaggccagcgcttgctagtgttttgacagaggagcgtaccccagctgagtcactagcttctaccaatttcttttgattgtaccaggcttcaaatgtttacaaggtgaagcccgactttctggctcagcattagaatctcctagaccccctctaactcacttctagccacgtccaacctcatccgatcctggacagcacggtggaatacagcggggaggggaaaatctgttccagagtttggacttgtcaaaactgaattcgca

SEQ ID NO: 96623 - DNA, 355 bp, Zea Mays
aaatttcttaacaaatccatcatcttattttatgtgctacatacttctatgggtgacattcacttgagactatatccataagagtgtccaaaaactgttgaaaacttcactacccattgttggaatggttattcatgattcagactggagatcctttgggggatggcactggtggacaatcaatctggggcacagaatttgaagatgaatttcacaatgggtagtagtttgctaatcaaggattttgagcattgaagttactgggaggctaattaaataaatgcaaacccagcataattccataagagtgatgccaattttttcagtttttgtgcttgtgttttgggctggacat

SEQ ID NO: 96624 - DNA, 352 bp, Zea Mays
tgctgatcagctcttgggttgctgttcctttggggtgtctgttgattgcgccttgggtagttgttagcatactggccaagttcgccacacttgaaacaaccattgggttggactagagtagtttgctattgtttttggccggtgtgttcacgacgcttccttgacgattctgctaataaccactagacctttgaccggtctgagtgttgttcctctgctggttctgatattggttgctcctctgaccttgttgtccagagcgtcgtacttggtaattattgttcccactctgatttccaaagcagaactgagaaccttgagagttgctttgtcgggtattccttctagaccg

SEQ ID NO: 96625 - DNA, 359 bp, Zea Mays
gtccgggattggatggggtgttacaaagtgattgagagcagaatggcgagaaggtgaatcgttagtaggggaaacctttccctctcctatcaccaagtacgcgacttaccactagcttctgatgcaaggccaagaactgatgaaggtcagcctgcaatgacttcttgctcttgtcgctctccttgttcagctccccataaagagcctagaggtcggcacccttggcgggatagtccaaaacaaactaggcacctagtcggccgtcaaggcatggcatctccacttggggctccccattcaaggggacgagtgatggcctgcctggcgccaaaagcaccgcaaaaataggagatccactc

SEQ ID NO: 96626 - DNA, 874 bp, Zea Mays
cggaactataatttgtttcacactattcagtgaaattatgccgtctttatgaacatcaaacgccgatatataaacttaatttgcgcaaggaaaaaaaataaattcaggaatgcatatcgcccgagccccttaatttattagaccgatcgagcggcagcacaaaagtcaaagaaatggcgtgtgcggccaggaattcgatcggacgagtacaagcaccatgaatggaacggcggccggctagctatctcaacagtatcctgcatatatgcatatccggagccattaggggacaacgcatcgttgcaccattactcctacctttgaattccaaccagcgacatggctattcaagaacagaaaggacggcagtagaagacaactgaccgatcgagatatcgtgcggagacggcggcagccactgcagatctgccggccgaccgtgtcaccgtgctcctgtgcctcgctctccttggcgtcacaattccatgcgtcttcttgctcttccatggcatctcatctctggcacacggcggcggtgcttgtggatcaggtctcctcagacttcaacggtaaccctgaaagggaaagaagaaaaacaaacgaggagaggaagaagcgatttggtaaatagatctggtcaaaaacaccatggaggggccggactacggatccgcatccatccgggtagattcctgacgatgccgctgccatataccaggttccaaaggttcatcaatggcacagtgaataaatccgccgccccgggaagggagtaaaaaaataaatgtgatggtatagggttcctcggaaagacgaacgggccgggggcgtcgtacgaggccgaggaagaaacaaacaacgagaaaagtacggc

SEQ ID NO: 96627 - DNA, 431 bp, Zea Mays
aacaagtagaagaagcttactactaagcaagcagagttccaaaaagatgtcgagtgttgctttggtgttattcaagagcaatagaccataatcaaaggtcggcactgatgtggcatcccgaggacctcaagtacattgttgattgtgtcattatactacacaacatggttatcaagttcgaacgacacctgccgcagcttgaaggagactacaaagctgcttcaagaccaaatgtatccatggataagaacgtatgtgagattgaacatttaattgtagctcacaacaagataagatgtaagtccagcgtgagcaactgaaagctgatatctgatagaacatatgtggaatatacatggacaattgtgatcagggtgaacatagtgaggcaaatgatacgtaagtgtatttgtgtcttatttcatcatttt

SEQ ID NO: 96628 - DNA, 581 bp, Zea Mays
aaaaagtcccacttaaactctattaagtatgaatttcagtgaattggctcaactttgaagccttatatcttccaaattatgaggattttgccctaggtcaacacatcaaagttgtagagctatgtaaggagaacaactttgctataaggattaagccttgatcccatgaaaaatttggagcgaaatgggcccaaaggtgggctgttcgacttccttaagtctgaattcagactgatagtgtgattgagccatctttgagctaggattcgagtatgatccagtaagaatttgggagtgattgctatagtaagattgaagctggatagtagaacaacaactttcttaaagatggattaataagtcgctacatggaaaattaagatccaggccttgcaagttgggctgtcaggctaactgaagaacaattccaatggtatagtagcagaaaaatctctggcaccgcacacctcgccgccggtaccgatctgcgccgtgatttgcgtcgtggtctggttgagcgttcggcgagcatctcctcacgacgatattcttgaaacggttaagatcgccgcagtggaggg

SEQ ID NO: 96629 - DNA, 459 bp, Zea Mays
ctctgctctccattgcttgtgcactagcagcgtgtacgcttgaccagcagacagcaagaatccttctcatgtgtaaccaagtggtgaactgcaacagtagacaccaaacccaagaagcatcacaaacttagcttgattaagaggctgtcatgtctgcggtatgggcggcaaacttgcctgcacggcggcaagatgagcatgtgatccaccagatcacgagatgattgattaacaggcaacttgccactggatgcctttgcttgcctccaaccccaggttcccaagtagttgcatataatcaccccgatacaatataatcatgtcattgcacggttcatctgtgaaaataatgatagtcctgctgtcatgtctcggctctgaatcaataatgcatcttctgcccaagcatattgagaacgagagcatgcaaagtggccagtaggatttttgcttcgtcga

SEQ ID NO: 96630 - DNA, 558 bp, Zea Mays
tgtaagggcctctccttgaactaaaaggaggatgaccaagcagccaggaccaggagcattcaaccggagttctccactccctcattctcacacttacacccattgtatacatgttcatgtgggaatactatgatcagcactacactggactagggcgaaagcctgaacgagtataaaacccctgtttgaatccctcgattcaacattcgaagtgagtccacactaacctccaccaccgaacacaaattctattgtgtccctagttaacgaaaccacgacagttggcgcgccaggtaggggagtcgttagcgtgctaagcaactttgttcactctgatggcttagtcatccaccttcaccgttggcaagacctttgcgctgggggccacgttagctccagctcccttgactttcttgccaccaccaccggcgagctccacctcaccatctccgacatgcccaccacaacaagcgagggatgacccacacgctttttccaccactaggatcaaggcagaggagcgacgccttaagaggcatgccaccaccctcaagcgac

SEQ ID NO: 96631 - DNA, 490 bp, Zea Mays
ttgcgaattattgggcccaaggcctttcgtgaggtcttttagccttctagtggaccctggtgcttgtatccccccatgactagcaagtctcttaactacactcttctgtattggaatgttcgtggcttggatcaactagaaaaatgtggtgctattaaaggtctgctctactcctactatgcaaattaaacatggtctgcctgcaggaaacaatcaaccattggcgccccccgtggtgggatgatcactgcttggcgcatgtctgacttcgttctcatatacccttcagagctccagctttgcgctcctccgttgcgtcgatgacaaaaacaatgtgccctttaattcgaggcttgatgatgcgttcaacgaaaccatcaaccgcctcagcgcgagtggattgaccttgcccccctcattgataggcgatatacctagagcaaccagtggtgatatacctggaacacccgattcttccacaagcgtgctt

SEQ ID NO: 96632 - DNA, 674 bp, Zea Mays
ttgtctggtatccgttgaagccagctgttcaggctgctgcagctgcaatctatagagacaaaaatattgtagaaacagtagaaaccgatacagattaaagccaaaggaataagctgacaaatgttttttgtgtagcacttctaccgtcgctgtcccatgaagatcatggggaataatgtacaaggtccggtactaacacacatggtggatggggtgaaccgagaatgacaacctatctgtcgacgaacatggtggatggccgcactgacctggaattgctgcgccaaacaattcgtttttttagaaagttcatatggtaaactattggagggggtaaattaaggttggtgcttattttgttaacttgtctctggtttagcaagtaaattatacaacagagtcctgaagattctctaattactaaaaactactagagaggaagataaaaatagagccctctatttattttgttcatcgatcacttggcataatcatgcattgacttcccaaatgatttttaaggagggttttggagacattctgagtgtatgcatatatagagatagattcggtggaatttagcttttaaactgctacgtggtgcttgcaaaaaaacaaaagaaaacaaaaatggcatgtcctagagctcaggtacatgaacttttacattcttc

SEQ ID NO: 96633 - DNA, 682 bp, Zea Mays
caagggtgcagccggactagcacaacaagtgcgcaaaatcaaagtctaccgcaaaagactatccgtgcaaaagtcgcctaagggtgcagccggactagcacaacaagtgtgcaaaaccgaggtcttcctcataactccgagcaaaagtcgcccaagggtgcagccggactagcacaacaagtgcgcaaaagcgaagactatccgtgcaaaagtcgcctaagggtgcagccagactagcacaacaagtgctcaaaagcgaagtctccctcaaaagattatccatgcagaaaccgactacaggtgcagccggaccgacataataaacgcgctagatcaagtgcacaatttccccacgggcacggccggatcagcaaacgcacacagcctcatcatacaaatcatcataccaataatagttacacacatacagcgagggcatcacaccttacattggttcaaccttcgggataatacccatctccctgtagttaaacaacattatcctcagttcctcaccctcaaagaggcttcgcaactccccctcaactacacacaccccaactggcgaggacaacaattcccgcttgccagccctgtccacacgaagacgaccaccctccacctcactcactctacgcttcgccaccgcccttcgccgcctacgcccagcacttggaccggg

SEQ ID NO: 96634 - DNA, 615 bp, Zea Mays
attttcacggccaaccgagtcaccaggtcatgtgaagcatgccaaaaattctctcctcgctcaatcaacccatcgcaattcaccaagctaatcgcccacacatggccacttcagcgttgggggctagacatcgtcgggccactgcctacggctcaagggaacctaaagtttaccttcgtcgccgtcaaatatttcaccaagtggatcgaagccagagcagtctccacgataacagcgaagaccgcccaaaaattcttctagcaaaacattgtgtgtcagttcggagtcccgtccgagctaacagttgacaacgacaaatagttcgacagctagaacttccgggaattctgcagttccatcggcaccaagccagtcttcgcctccgtttaacacccacaatccaacgacgtcgtcgaacgtgccaacggcaagattttcagtgccattaagaaaaggctccttgacgacaaaaagggcaaatgggcagaccaattacccaaagtcatatgggtgctgaatacaatagaatgtcgagcaaccgggttcacacctttctgcctgatgtatggatctgaagcaatgacaccgcaagatttaaagcacgggccccccgaa

SEQ ID NO: 96635 - DNA, 318 bp, Zea Mays
ctgatcttcagggcatccaatggcttctagcttcctatttattgtgcgcatccaatcatcagcatcgagtgggttgctggatccagcgaacttgggaggcttgagccttagaaattgtcccatcttgtcctgcgatcttcctccattcgggcgctgattctcaaggcttttagtgaggacttcaatgagtcgggtctggttggctagaacttgggctagatctagtggtatttccagaggtgcagggaggtgaatctcgctctcctcccccctgtcctcgccttcgatgcctagggtatcctttatccaatccctgag

SEQ ID NO: 96636 - DNA, 345 bp, Zea Mays
catacatatccagtgcagcatccggtctacttcatcagcgaagttctcgagccctcaaaaatgaagtatccccaagttcagaaactgctatacgtggtacttctaaccgctcgcaagctccatcactactttgacgaccacaaagtcatattagtcaccgaatttccaataggggacattcttcacaacaaagaagctatcagaaggatagccaagtgggcctgcgagctgggagctcatgaaatagagttccgacatcgcacggcaataaagactcaagcactggttgacttcgtatcagaatggactgagcatcaggtcccagacaacccggaggctaccgaa

SEQ ID NO: 96637 - DNA, 607 bp, Zea Mays
taagagtcagaaacagaaagggtagcgaaatcaacgggtgtacgaaaacagacgggaacaaaactattaagcgaaaactcgtaatttaatacaaacacacatgatattgatgactaaccggtgacttaccagaaaggccacaacatgaaacaattaaaaacagagagataatactatattgttgtttgtttgctagtggtagacatatagctacagccggtgttgtttgagcctttagaccacctgtcattgagaagagctggtggctagaatgaattcttgtgctataatttatcactaaggatacgatgctttagttaaactaatgcatattgggttcatcctagatttctcaaatatggaataaatacaagttcaatctggctaaaaacaggatccgcaaaaaaacgaacggaatataccctctctcgttcatagaatttttcacatatgaaaacagatgggttagatgtggaaaattgtacgagttgagacgggattttttcccatttctttttcaaccctagaacgtgagggaaattaggtggcgcacaccctgtgccggcgggcctaccattgcccgggagtgtaggtaggaatgttgcgg

SEQ ID NO: 96638 - DNA, 493 bp, Zea Mays
accttcttcagagcattataaataaggccaggcatttgaatctgcttcagcttcctctacctgatatttgtgaacaggactttcctattgtgcaatatgccgatgatactcttttgatattggaggcctgcccgaagcaattattctttcttaaggcaattctaaattcatttgcatcttccactggtctaaaggtcaactataacaaatccaatatgtatcccataaatgttaatcctgagaagatggagatcatctcaagaactctcaattgccaaattggtgcaatgtcgttcacttatcttggattgcctttgggtcttgcgaaacccagaattcagcagttcctgcctcttatccaaagaattgaaaagagattgtcatgctcctcaaattttttatctcaggctgggcgcttggagttggtaaattcagtatttacagctttgccaaccttctttatgtgtacgctcaagattccaaaatctatcat

SEQ ID NO: 96639 - DNA, 445 bp, Zea Mays
ccaggggaaaaatagtgaacctggcagacgatggtatggagtaacatgttgttccatgcaataggacaatctgagatggcagagatgtggtttcagcacttattttttgggcaacaatttcaggggagtaatgtggtagtgatttctctccctttattatgatgaagttgtggcttgtatcaatgttgtatctgcaatttgaaatatgtatatatgccatgtccgattagcaacacaaggcattgggatctccaaatttcacgacattgattcaagtgtgtgcacttcttttcttgttccgtgcttgttttataccttctttttgaattgatgatttttcatatgatatagttctctggccagtagactggcctactaacttcatttatggacaaaaatcaagggtatacatcatccttatggcttatctggaaatggcttgcca

SEQ ID NO: 96640 - DNA, 469 bp, Zea Mays
cttaacccatttggatgaccaaagattatcgacgccatggcaacagaaggcactaaccaaacttctgggtctgcaatttcgtatcctatacagacaaggtagcgaaaaccgagtggcagatgccctttcacgtcggcccaacttggatcaagatgccccatctgcagttgaatgctacgtcagtatcatccgtgataccgagctggttgagtcaagttctcaaaggatatgaacaagacacgagtgcacataagttattgagtaaattagccacaggagagaaactcgatccctataccttaactcaggggaattatcagattcaaaggaaggatctggctgggaatggatagagagatacaacgtttggtcatgtcagagttacatgaaagtgcccttggtggtcactctggttttccggtgatgtatcgttggatcaagtctaattttgcttggccaggcatgaaac

SEQ ID NO: 96641 - DNA, 577 bp, Zea Mays
aggttactattagcttggaatatatgattaatgcaaagcaatgcaagcggatcggagagcatataggagagaccacaccacagccccatatgatggatgtctatcgttgttaactagaggcgtgtccaaatcaaatcaccgtggcatcttcattaatttgcaagggacagagacctgctgttgcaaatatattgacacgcaatcagatgcgacagtcgtctgaatatatagctatccttatatatgtggatattctcccaagttggtgccatgtcatttttgtatcatgcatgtccctggctggctgcatcgcctctcatgtgctgccaggaaaatgacctgataatcatgtatttaatctggacgcgttattatacagctagcgtgtagtacttatgatggaccatgtaagtgtaagcacagcagccatacagaaatcgctgcacatttcaactaaagcccaattaaaccctggccgccaacaattttgtcagtgtatttgtttgaagttgtgtgtgttagtgtattttttttataaatttcataaaaactagacaagtttaacacaagacagcta

SEQ ID NO: 96642 - DNA, 746 bp, Zea Mays
cacccgcaaagaaatgtcatattgaatatttattttctttttttactgtcaaccgggggagagaattccacatgaatttcattgtttcaatgacctcatttttaagggaaacgaggtaaacctttacataactttgtggcataccgcagattacagctgcaagcacaacgcagcaagtacttcgccaacaaggaggaaaagaaagcaaaaacaacacgaacgtacttgacacaagcggaataataactaaccgagttcctgaggacctgatcatcaaacagcatactcgtcggctagccgaaaccaatgtaaaccacaccacccgccgtagcaacgccgcacaattgtctccctccattgcgcacaacaaggccacccgccgtagcaacgccgcacaattgtctccctccattgcgcacaacaaggggaggaatgcttgaagggatgaaggaccgcccaactgagaggcgactagtgagggaggacgcccattgaagcttgccgaagaacaaccatctcccttaaggttatagcaccccatagacagcacatccacgcaccataaactaccatccaacgcccttaaaggggaggaagcctctacggagggagagtgagatcatgggtccacctggcataagattgatgtcaccaccaacaggagacgaatgatgaagcagaggtgtcaatggtcatgcaaccaagagccacgaccattaccatcttcaagaccaaagccaacaaag

SEQ ID NO: 96643 - DNA, 401 bp, Zea Mays
gtgtttggctttggaggagcaggctcaactgatgtagtaggctcaactacaagtacatgcggaataggaagagcaaccataggtggagcctttatagcctgagtgaccataaggttgggaactgagggatccatagtaatggtgatagcggcggcctaaatctctgaaaacagtgacaagtaaatctataggcagactaacagtcccaaccaactatgctggaataggttaggtgaaatctaaagtcgttgggtggatcggagagacaagtagagagaaacctaggccttgaagtccattggactgtatctttaggccataggtgcatatagcataggtgaaaccatatgtagtggaggtggaggtaaggaggctctagtctactgaaacaagtgctaaag

SEQ ID NO: 96644 - DNA, 664 bp, Zea Mays
actgatgggtgccaaccaagtgagaataaaccttctgagatgaaaacagattggaagaggcattgcagcgccaaatatcattgtgatcatgcaactgaagattagctagaatgtcctgaagtgaaagtagctgcccgaacgcttcagcagaaaggggagtgtggaacaattcattcggagaagccagccgagcttgattaatgttgatctctctgacagaggcaaaagaccaaagctccgagaatctttcagatgtgcgcagaccattccaacgatcatgccaaaggagagtagtttttccatttccaatctccactcgggctatttccttaaatacatcttggattttgagaatatctttcgaccagaacgaaccaactagtttaactgaaggcaaagaattgctataatgagtggcccagataatgttaacccacgggatgttgactctattaaagaatttatggaggcatttcataaggagcgctttattttgcaactcaagattgatgactccaagtcccccctgggtttttggtttgcagactgacttccaagcaacttgagaaggtttttttgcatttatgtttgtccctctccaaagacagtgccgtcgaagtttatcaatctgtttaatcacagttttggggagcttcagggtgca

SEQ ID NO: 96645 - DNA, 748 bp, Zea Mays
catttcatcaagcctctcttgagaaggaaattgcatcaggaaaccagagtgacacttggtggctttccaagtacgaccctaagggaaatgaaagccaaaatccttctcaagatcctcagcagaaatcaagccctcaaccactttaaccaaaccaatgaaactgtgcttaggtttttttgacagaggtttggaaaagtgagacgagtaaaaccctaacccatccatcgccatacctacaataggcatacagggcttgttttgtttggggagaacgcacctcgctgtgttctgagtttctttgcgacagatctcacaccataaagatttgaagcaatccctagcatgatgcccatccgtaccacatttctggcagaaaaaacgacacaccagttcattctcttttttcagaataggagggggggtttgagaatacctgactggccgccatcaccggaagaagaggttaggatgtcatccttgttctcgggttttcctgtaaccggcttcaggcgccagctaagactctgattctttccccaagattgtgaaccctgaggagcatcttttggaccccatcggtcctagttagggttacggttcttcggatccatccgacgcgaagcagaagagcgacctgggaggggccactcctcatcaacctcaggcggacgaaacggagaagaataccaaccaccactaaagcttgaacgcgtcgagatcgggagagaccagaggcgagagagacgcg

SEQ ID NO: 96646 - DNA, 670 bp, Zea Mays
tatagaacctggcaagagtgggatatgatggtcatatggtctagtgggaggcaactgggtgggcaccgcaaacacatccgcaaactcttccagaattcctgttagtgtctcatttccagcctcatcttcctctcctttaacctcctccagcatcacaaacacccatacttcatctcccttcacccacttttctaactgcaaaacagacacctgttgcacctctctctttaggtctgcttccccttgaagtttaacctccaccccttgatcacagaaggttagcaccttgttgatccagtcacaatgcattgggctatgctgtttcaaccagtcataccctaatatcacatcataagcctccaacgccaacaccctcatggcagttctataaacatgccccccagccttccacttcacctctctgacatttttttcacacaccatgatctctccattagctaccttcaccttcacaggaggacaatcttctgtgctcaaccccagtttagtcaccatcctctgactaataaaagttgtggaactcccggagtcaatcagcataaccagcacctgatcttgaatcagagatagcaccctcatacaaccatcacactctgtcccctttatggcattccaggacagctgatgtaatccttccactatatgctcc

SEQ ID NO: 96647 - DNA, 297 bp, Zea Mays
agccaagaagtctgctgggccaaaaaggcggaggattattactgtaattgaagctattgaagaaacaccaccgccgacctcagcgtcaaagataacacctgctgccgaagttgctacagctaccgaagttgctcccaccgaagctacaactaccgaagctgcaacggccgaagatacaaatctggagagcacattttctgatattgataaaatgctgttgaatatggccgcggaagaagctgctgcagctgccgaagaaaccctggccacagtgcctggaaaagggaaggagatcgc

SEQ ID NO: 96648 - DNA, 420 bp, Zea Mays
gtctggggtggcagcactttgttttcttttcctgggctccatcatgatttttcaaacgccaaagttcaaggacaaaacgcgaaaggattcgggaactcagaaagctagagagacgcggaggaaaaaacaagaactagggttcagaggtcaagaggacatcagcagaagtatgggttggcacactaagtcgggcgcaaaggggtaggccgatagctcgggagagttttggtcacagcaaaataacatcactcagggattacctttaaatgctagcgaactgtaagacactagagcggagtatgcaacaaaagattggcacgagaacaggttttcattcaccaatggggtaatcattacaaaattgagatcacctcattatgagtcggcctcccgcccctcgatcttacattacattactac

SEQ ID NO: 96649 - DNA, 555 bp, Zea Mays
cctggtgctccccaaggggatgagctgggacgaatgtaccctttttgctgaagatctgcgatttggagctttagttctgctaactcggtaggagccatgcggtatggtctctttgcgatgggggccgttccagggatcagatctatgtagaattccacttctctttctggtggcattcctggtaattcttctggaaacacatccatgaattcttcgaccactgatatgctttctgctgttaaactgaacatcattgggtcattggcgggtggctgggcctgacaagagactgactttccctgatggtcggtgaggaggactgtcttgcttgcacaactgatgatacccttgtgtttagttaaccaatccatccctaggatcacatcaatccctttggatggcaagacggttaggtctgccaagaatactaccccacttaaaaggattctgacttgggagcatttgagctggcatagaaggtcggaccctggggttcgggtgaccaagggaatccctagaggagttgagggaatgccatgtttctccacaaaacta

SEQ ID NO: 96650 - DNA, 850 bp, Zea Mays
ggtggagggagtggctagaatggtcgaccatgatcgattgagttcttgaagtatctacagttaaatagagtgtggcacgtttccttgtaataaggacatgggccatcgaggatctcatctagcgttcgcgtgttgctgccgtgagggacaccgcgtgcccgagccgacggcggccccgtggcatggacatctctcagcctcttgtatcagcaccagtcttgttatgggacaacttccttctttgagggcctagatctcagtttgtcgaggaggttgtgggccttctcgtcggcggtgatgtagatgtcggcatcacagaagaattgctcggaggtcgttgaagcttcttggaggatagctcgtacaaagacattgtcacgggacccccgatagaagtccccgatcacatctgcttcagtgatgtcgaggatgtgattcctcattgatagaaaacacttgaggaatgagcggagggactcgtcattcttgcgcctgacaggtttgaggtcccagggttgtgcaggcttgtcggggagtgataggaagttagcgacgaactggccgtagaagtcagcctagttgtcaacgcactggtgagggagatagcgaagccattagagcgcatcttgcctcagcataatcggaagatacaccgtcatgacggcctctatcacccatgcagcctgtgcagatgtagagtaaatgtccagccaaccacctggatcttgtttggcctcatacttgtcgacgttggagaccttgaaatttggtggccactagaccgcatgcacccggggggtgaaggctgagaccccaaacacgccctaggctctctgtttcttgccccgag

SEQ ID NO: 96651 - DNA, 950 bp, Zea Mays
ctggtacaaggtgagctaccggaggtttgctcacattcttggattctctaatgaagacatttttggggacaagattaaaattcatgactttcgtcaacccaccaaagatgaagcccgggatcttcatatatctgagactggtaaattttgggagtccaccaatctgcataagttttacatatatattaactctcttagcagaatgactctcattccaaaaggaggtaaccaaatgaatatcctgggagagagcaaggtcttgctctcatttatgaagccaaatagttcagaaagtatcaatgtttttgacatgatttggcaagaaattattcatgctgcctgcttccctcttaagggatgtcttcacgcccccttcatcatgaaaatgattgaagtggtgactcaatttcgctatgagaaaggcacaagacatctttcttacacccccttctggattgatccaaacaatccagcagggcgtctgaggaaagcgccctccagctctcgtggacctgctgctgctggaccctcgcgtccatctcctggtcgcggatctcccacaccacgtggtcgtggtcgtggtcgaggtcgtggtcacgggatggatgctcatctggcccatggtattgcagcattcttttccatgtgcagaaatatatcttcagatgtgcatgagctggctcggcggcagcgggagactgacgacaatcttcgtcatcaagcttcctctatgggtatgccatttgccccccgttcgtctgatgtgcctcttcatccttctccagaaatcaatgagtggcaccagcaggcatatggggtgcccttcatttctccagaagatgaagaagaagatgaagaatacattgatgatcgtgagcagtttgccccgcctccccaccagggggatccgggtcaatcctcttcttatcctccgccccaggatcctccgg

SEQ ID NO: 96652 - DNA, 320 bp, Zea Mays
caactttctttggctaccatcccttggagatggtaatgcacccactgggactcttccccgctgagaagagggatgaccccatgtggtgcaaccgtgtgagccatgtgaaagacgtgtgggctatgcatcctgaccaagttgggaggatcactattcagtgcatcagtgcactgtaccgcctttaggctctgcaaagcgaagcctttgcgcaccttgctaaccttgctcagaccactaagctcaccctcgacagccgagaggacttcgtggtcgacttgtcttcagagttggtggagaaggacctacatgtggaacagttg

SEQ ID NO: 96653 - DNA, 694 bp, Zea Mays
tagcactctatagcaatatctatgttatctacatatcacattatagcgaatctttacaatgatctatctatatagatatctataattgtttttagtatttacatacactctttaaaccacctcggttttgagtatatgctcactccaggttcatagataacaacacactctctctttatttaatttcttgccatataggatagatgctggcatggactccttatagagagcagacttggtaccattgcggttgcccttaattctatctctactctctaaaaaggaagtaggtcgtgcatcttccctccttgggcccacctatagtgatacgcacaagcatcgctctgcattagttcgctctctcgcctcctctttgttgagtcctcccttcctacttgtagtgacaccagcactgctctacctttcatccgctcgctctcttgccatctctccacatctggctgacggtggcttgccgctccaccccaaatttgaccacacccttaccatcataccgcatttggcctcacctccctgtttccccttctttcctgcccctgtttccacctccttttgccacaccctcacctcctctttgcattcgcccacattcagtttgcggtggctcgtcgctccactcccgatctagctcctcctagtttcctttttcctttggatgcacttttgcctcctc

SEQ ID NO: 96654 - DNA, 320 bp, Zea Mays
cgcccggcctctagttccctgcgcgcgctcctctgctcgccggttctccttgccccagaaccatcagtcctctatccggcttcaaccccaccgtcggtctctagactctagttcgccatggcgctgaatttcttcctcgtgtcatccctgctcctcgcgcgttgggcaccgggagactttccctgcttggtctggcgtgggttgtagctgccggacaagcgcacccctgtttcctttgtcgtcggtcgtcgtttgacctcgtcttgctgcgtggttcctggtcataatcataaccatctcggactgcgctgtcgcccaga

SEQ ID NO: 96655 - DNA, 1215 bp, Zea Mays
aagtcgagttgtcagactattaagtctgaattcagactaaccgtaagattaggtaatctttgagcttagatttgatcatgatccaatcattatttggctatgattactatagcaagattatagctggagtatcgggtaacaactttgttacaggtggattagtgggttgccacataaaaattggtgatctaggctctgcatatagctctgtcaggcacctgatcaaaaccccaatagtacagtggactgcacaagatcactgatgcagtgtatcttgccaccggcgaccccgcgcgtaggttcatgccggtgaggtgattcgtgctcaccggcgcttggataacgctccaaggtggaaagattttctccccccggatgagcttaaggcactgttgtccggccgccgtgtccgctcaatcccgatcaccttgaatcaaccctcgccggacttagacatctcatggtctgatgccacgtgcctcagcactttaaccacaccgcagtgactcgtgctgacctatccagcgatcgccggtgaggttgccacggtaacatccactaatcccctgcgccagtgacctcctctttctccgaccgccgcgcgtctcaatccaaattcaccggccaccgctcttgcctactataaattgagcccgccgtgagctccgtagggtaatcacccatccacagcacccacacttgcctccaatcattcactagagatcgtgaattgctcattgcccccaatctcggtttccgccaccgtaaaaacacctcgccatggccagcttgctccaggttagttcaagctctctggtcggttgttctagtctccttaagacctcctgatgctgttcgacccctctgattgaactaaaccgccctggatcaccgagaacgcccatgttcatcctttgtccgcgctcgtctccgtggacaggatgatttagagtctcattagtgaaattgagtgaggggaaatggttaggagggatacaatttggtgtctgccgcacgggagcaccggtctttgcgtgatccggccagtctagactcgtcggtgctcaggtctccaccatgcgatgtcgtggacttggcgctgtaaagaattagaagttcaggggcctaactgtaactgtcagcgactcataagaatagtgcggtgaactctgttcgggttatttaaaaagacgggggtctattcgcaaaatctgc

SEQ ID NO: 96656 - DNA, 626 bp, Zea Mays
ctggactactgaatactaagcatgctatagaactcccagtattaagttggttgcttgcattctattagttcttttcaataatttgagcataacacgctattagttctattcaataatttgagcataacacgctattagttctattcaacaatttgagcataacacaggggtaaagaactagtaatgaaagcaatagttacatgatgtgctttgatcaaacagaactatccattctatatagtatataatacaaaaaaataatcttgatttctgcaaatttactggacaaaacaatggacataatgcataacaaaatgataaagaatacaactgtgaaccataaattataatagctgatgatattgctatagattggtcacaaatggaacactacgctccgccgaagttggcagtagcaaacaccaatcaaatgcatttcactgtatagggcaccaaaaggcacctactaaatcgcaggattccaagagaaccgcaaaagaaacaaaaatcgaagaacatatccacatatatttgaatgtaacagccttatatccctcgccagcaaacaaatggcgcgaagcgctggcgaaacacagaagggaatcgcagccaggggcggtaactgg

SEQ ID NO: 96657 - DNA, 399 bp, Zea Mays
ctgaagcagaacaacctgctcctgccgctcccagggaagacctatttgaattgccgaaggttcctgcaatcgggccagtcgaaacgttgaaacttggtgtcaaggccaaagaagaggcgaccaaagagccaaagctaggggaaaaggtagggctgccaaagatcttgagccccccggcggagtcaggattgccgaagataacaagagctcctgcaataactcccaagaggaggagaatggctagagtgctagacgctgtcatggagacaacaaggacattaactcctgcccctgcaaagaaaattgccgaagctgctataagtcgcgctgaaactgaagctaggccctcagcgcctgctgagacagagcctcccgcaactgaggataaggctgagcaag

SEQ ID NO: 96658 - DNA, 792 bp, Zea Mays
cgtcggatcgccttaagtcactgttgacttaagtcgcttgcttttgttaatagggtgtagtggtcaccctgaattgtgtagtcgtgagcatgttgcaccggcttaagtcgccactgactttagccgattgctccgttagtagggcatagtggtcaccccgagttaagtaagcgtgagcatgtcgcaccgccttaagtcgttgccgacttaagttgattgctccgttcgtagggcatggaggtcaccccgagttaagtaagcatgagcatgtcgcaccgccttaagtcgttgccgacttaagccgattgctccgttagcagggcatagtggtcaccccgggttaagtaagcgtgagcatgtcgcattgccttaagtcgtttccgacttaagccgattgctccgttagcagggcatagtggtcaccccgagttaagtaagcatgagcatgtcacactgccttaagtcgttgccgacttaagccgattgctccgttcgtagggcatggaggtcaccccgagttaagtaagcatgagcatgtcgcaccgccttaagtcattgccgacttaagtcgattgctccgttagcagggcatagtggtcaccccgggttaagtaagcgtgagcatgtcgcaccgccttaagtcgtttccgacttaagccgattgctccgttagcagagcatagtggtcaccccgagttaagtaagaatgcaagtcagtcgtgaacaaattgagtatctttgaaaccccttttttattgatgacatatttccactttacagaatacatcgtcg

SEQ ID NO: 96659 - DNA, 744 bp, Zea Mays
attcaggtttagggataagtttgatgaaccaaacgacgactggctgaagtgcatcgaagcttcaagtgatgaactgcttggagcttattccaaaacggaagacaatgccttgtccacagccttcgggggtcagaataaaaaaaggttgaacagggtattcgatgctattggcttcgtataccctgactattgttacccactgcgagggcaaggggtaaaaagaaagattgttgtttctggaaaggttgtcgcttcggccatcacagctgagccgaagggcaagaagatgaaggttctgactcaccggccgcgttacatcgaaccggctgcgatacctaaatttggtgaaggggcctcttcggctaccaaaacaaaagaaattgttcctcctgcgcagaggactgaagagccgactataatgccgaagttaccatcagctgagctagttgagacgaaggctgataaggataaggctgaagggtcaaaaattgaagaaataataaaaatgctagagattttgagccctccatcagaggtaacagtgccgaaggcacaaaagggttatgccgcaactcctaagaggagaaggatggcaaatttgctagatgttgtgttagaaacaataaaaaccttgagtcctgctccttcaagaaaaattgccgaagcttccaaagcgcaagtcgaagctgaaacgaagcaggcggaagtcgaagttgcaacaattcaagctgaaaccgaagctag

SEQ ID NO: 96660 - DNA, 403 bp, Zea Mays
ccaggcgaccaatgggctctagcgaccaagagctttcccttagcgcgctccctgaccaatgggccctagggaccggggatcatatcaccgatagtagccctagagggaacaatgtctctcttcgaaggctgatgaagggtcgggcaacatttcgtccttccaccttttgaacgatcatggtgtttattcatcctccgaactagagccatttttatggcatctggtcatctctcggggtggagtcaggcgcttctccgcccctttataaactccgggggtcctttgcttgttggttacccttgacctccctttctctttggcctcttccttgagcgcacctccgaccggttggtgatcggatcttaggtcgtcaggatgtcgcgctccgtggaccacaagccga

SEQ ID NO: 96661 - DNA, 472 bp, Zea Mays
agcctgcaggcctgctacaacccctctcagtacctgaatggaagtgggaagaaatagacatggatttcgtgaccggactgccccgaacgcagaaaggaaatgattctatctgggtaataattgatcgtctcaccaaggtggcccacttcgttccagtaaagaccacttttggaggagccgcccttgcccgaatataccttaaggagatagtcaggctccatggcattccgcagaagatagtgtcagatagaggaacgcagttcacttcaaatttctggaagggcctccagcaagcaatgggcaccaagctagatttcagcaccgcttaccacccccagtcagatggtcaaacagaaagagtcaacaagatccttgaagatttgctaagagcctgtgtgttaactttcgacagggattgggagtccagtttgccgtacgctgaattctcatacaacaacagccatcaggccag

SEQ ID NO: 96662 - DNA, 288 bp, Zea Mays
attttggccaagcttcctcaatctttattgttgcttattaaatatacttcaatgtttataattggcccaagccatgattctaaattttttatactcttttccccattttcttgaattttgttcataaggctgaattagggtttttgttggggttgcacattttgcctttttgaaaaacccatttgttttgatcctgatactttttaagtataggcttagtgggttctttattcttaaatcaacttgatgttcatgctaaattttggttcacataagatgatggttctt

SEQ ID NO: 96663 - DNA, 494 bp, Zea Mays
gcttattcgttttgtcggagaagaaaccactccagaaccgaaggacgacgaagtagtggttttcaaaagctttttcagggcaggattaaggtttcctttgaacgagatgattggagaagttttggataattttgagatttttcttcatcaggtgacccctaatgccatcgttaggctcaacattttcatctgggcccttcgaagccaagggatggacccaaatgctgaagctttttgccgagtgcatgagctgcattaccaaacgaaggccagagaagacgggctacatgaaaattttggttgttataacttcgcgtatcgcaaggatacgaaggctccggtcctcagctatcgcaccaagcgtccaactggctggaagagcgagtggttttatatcaaggccgatgagaagaagagggagaagttgaagatgatggtcatgagcccactgagtttaagcttcgggatgaccagacccttgtgcaacatgaagc

SEQ ID NO: 96664 - DNA, 348 bp, Zea Mays
agccaacgttgtggcagatgccttgagcagaaaggcccagtgcaattgtatgagcatggatgcaaaagtcaccacgctgtgtgatgagttgtgcaagttgaaccttgaagttgtttcttcaggtgctttaaattatatctcggtggagcccacattacaagagcaaatagtcagggcacagattgaagacaagggtgttcaggtaattaaggaaatgatcaagcagagagcagaaaaatacaaatgcttccggcaggacagcaaagggatcctatggtttggagatcgattggttgttcctaaggaccctgagctcagaaataagatattggatgaggctcacctttc

SEQ ID NO: 96665 - DNA, 287 bp, Zea Mays
caccgccaaagtcaggcactgtggccggttcaatgtagcgcggtcggtgagtaagaaccttcacctttttcttctttggcgcgggctcgcttgaggcgactgaagcaacatccttcccaactgttccactctttctcttctgcccccgtggcgggtagcggtagtcagggtacataaatccaatagcatcaaaaactctatttagcctcttcttttttcggctcccgaaggccgcggatagtgcgttatcttcatacttggagtaggctccaagtcgttcatcacta

SEQ ID NO: 96666 - DNA, 423 bp, Zea Mays
gtacatagttgtttttccactgagtacaacagtgcaccttggcgctagacgaaactttgcgactctccggtgttagcgacggctcgtggatgaaggtagtccccttgttttgtgggacacctgatccttgccctgctggagagttagcaggcagcccaaaaagcatgttagagccacaaagagttgcagtgtatgagtttagttgtttttttcatgtgtactaatcattctcaatttgaccatttgagttttaatcaggctagtttcaggtgagaattctgcagcctatgtctattgggcagatgctgcagtctgtgtcattttagccctaggtgacccgacatacacaagtagaacgaaatggaacatcaaataaacaagcagagaaaacgagccataattttcattcctaacttggcacaa

SEQ ID NO: 96667 - DNA, 505 bp, Zea Mays
gcaaggtgtcatcgtccggtcgttgacgtcaacacgacgatgtctctacgggctaacgtcatcccggcgacacctggcgaggtataggcaccgacaaccacgcaagtatttcaagcgacgctgccacttttgatctaagtgtccctccattgggtgtgcgcttctgatcttcagggaggacatgccgccgccaaataggaccccatgcgtccggatttggagtccctgaagccatttccccactgccaaccaccgttctaatctgcagtgtgctccccaaaaggtattcacctagcccatttaatttcacatatactaccatgtgtctgattgcctgcacaatccaaccctcatagccggtatgaataccctcatattatacctgtttgtagtcttaaggagtttttaactctgccatttagctgtagatcttagcagaccccttgccatacacttgggtaatatttttttagatatttaccattgagcgctttaggtagcttct

SEQ ID NO: 96668 - DNA, 1013 bp, Zea Mays
ttcacctctgatttctaaggcacacaaaggcgacccctgaaatgaaccaaatcattctcatcgatggagaactcccggggtttaccatcgccaaccctcttttgagcttcctgcaataaacgatcctgctgctgagccgcacgcactctctccatgagggaagattgaataagcatacgagtctcctcactagcagtgccgacatagcacaaagcgatccacaaacggtccagatcagcaatcaactgcaaggccacttttggaaccccggacctgctcagggcatcagccaccacatttgccttccccgggtgataatgaatagacaaatcataatctttaatcaattcaagccaccgacgctgcctcaaattcagctccttctgagtaaaaatatacttgagactttatgatcggtgtaaatgtcacaagcctcgccataaagataatgcctccacaactttagagcaaaaactaccgcggccattcaagatcatgagttgggtaattcccctcaataatgcctccacaactttagagaaaaaactaccgcgaccattcaagatcatgagttgggtaattcccctcatgcttcctcaattgccttgagccataagcaatcactcttccttcctgcatcaacacacagccaagaccaatacacgaagcatcagtataaactgtgaaacgcttaccgctctcaagaaaagctaggataggggcgtccaccaacttgctcttcaatgtctgataactgacctcgcaatcgctggaccagatgaagagaacacccttctccaagagtctagtcaagggcttagcaatgctggaaaaatttggtacgaaacaccgataatatccagcgagcccccaagaaacttcgaatttcagagacactagagggcctcttccactccaccacagccggaacattcttgggatcaaccgcaatgccctgctaattaatcacatgccccaggaaagccacttcggacagccaaagtgcacacttc

SEQ ID NO: 96669 - DNA, 449 bp, Zea Mays
cgagaaacccgcaaccgaaaccgccggactccctccccagatggactcgacatcagagtataaatcccaaacccgcaccctccccctcgtccatcgatctcggtagtcaagctgtatctagtgccgagccgaggtaactcgaggtctcctgccgctccatttccaaaccaagggagagaataggctgccgccattgatctaccccaaggatgattctccagcctcagtgagtggtctgagagcgtcgcaagatcaactaggacatgttcgtgtgcatgggcaggctcgggatccttcagagtaaggggcatcgtgcacaggagccaagcgtcatggtggagccaccacctatcggcgtcaggtctttgcacaccataatccaagataagggagccactgtcaaatccaccttgctctcctctacgaacaagacttgtccaagattgaat

SEQ ID NO: 96670 - DNA, 479 bp, Zea Mays
tttgttattagcgcttgctgctcgtcctcaccctcgtcctgattaatggggatggaatctccagggctcctccgtgcgaattcaatctcactcctctatggatttatttcctacagtaatattacatttcgcagaaataaacagtatttctggtgtcaactctgcctacttagattgtttattatcttcctcctcccttcctttcttgccgcgtactcgtccaccatgtgatagcaggagatgggagtcgctagtcctttgatttttcttcaagcaatagtctggtcatcggtcctttttcggaggcgccgccagggccatggtgttgaggcaaatatactatggccagttgagttctgctatttttttggaccctctctccagcgagaatatgttcctcccactgaggttgggaatttgttaactgtggggtttacacaaaaacaggtcttctaattgcagctggaaacgtccatatg

SEQ ID NO: 96671 - DNA, 1256 bp, Zea Mays
caaacatccatcgcgtcaccatccgccggttctgataacagatcctctggaaccatatcttcaagagtttgatcaaagttcgctagagataattcttgtagaccaataagggcagacaaagcaggagaaggaactccactactttccccactggctatgtagcaccgactgttcttccgaatcagagggatttcatcatcttcttcctcctcattttcatcagcaacacggacaacacacccattagggtcagcgtcagatgggtcacacccattgggattagtttcagtaaattcaggcacgagcacttcctcagcagcaggagccgaaggaccagcatcccgatccaagctagacactcggcgaagacgtctcttcttctttttctgcccatcagcaggagaagcaggctgattggcttggcaagggcgtttcgggcgaacactgacaggcctctgaatatccaaggctttactagcttctgggagaggcgccaccgccaatgttctagcaggagcgaaatcagaagaatcctaggctaacatatcaatcatagcacttatctctgcatcactgggatccaaaggcacctcaaagtgaacctgccgttcatcatcaggaatttcttcaagcaaagcaaccaaagcactaacttcttcggcagagggttgcactctaaggcccaaaccgccatcaccagcaggaggatttgacacgaaatgggtaaaggccttggaaggaggcaagttccaggccgagtaggcaacaggggcaccaacatttgataccttgcctctaagtatcattttgagccggctcaccaagtccacaacaggaattcttctattggtgacccgaatggagtcagctaggcctcggtacagataggccgggtatgccctgtccttcaatggctaaatattcttgaagacaaagtcagcaaccacagcctctgcagtcagacccctctccttcaacactccaacttcagctagcagaactcctgcctcagccacatcctggtctgtgggggattcggtccagctaggagcgcgaacatccggctatctccctgaccgtgcagggagagaatttccatgattctcaacgataaaccactccaagcgccatcctttaatgttgtccttgagggggatgtcgagataaccagtcttcctttcgcggcgcatctccaagctcgcgcccccaccagctgatgctgtcctccggccatcccaggccgacagtgatacaaa

SEQ ID NO: 96672 - DNA, 309 bp, Zea Mays
acggtacttctaaccgctcgcaaactccgtcacaactttgatgaccacaaagtcatagtagtcaccgggtttccaataggggatatccttcacaacaaagaagctattggaagaatagccaagtttcggccgtgcacagcaggtaaagactgaagcactagttgacttcgtatcagagtggaccgaacaacaagttcctgacaacccggaggctactgaagtatggctaatgtatttcgatggctcgctgaaactgtagggagcaggtgcagggatcctcttcattgcccctggaggtgaacaactcaa

SEQ ID NO: 96673 - DNA, 434 bp, Zea Mays
aaagatcaaattcgctggtaacactgccttcgacccatataccatgaagaacggggtgtttccatgtaaagcccggcttggatgtgttcgcaggccccagaccacataggacagttctctgatccattttcctgcaagcttttcgctcttgtcgaacacatttttcttgagtgcatcaagtatcatctcgttggctctttccacctgcccattagctcttgggtgtgccactgatgcataattgatctggatgctcctctgctcgcagaaatcaaagaactctgagctagtgaagttagatcctaggtctatgatgctgctgttttgtatcccgaatctgaacattatctcttgaatgaatttcaccgcttttgctgaagtcaaagaggtgatgggtttgtactctatccattttgtgaacttatcaatggcaa

SEQ ID NO: 96674 - DNA, 581 bp, Zea Mays
cgccgatagcattgctagcgcatgttcaccacgtagaggagaggtacagtgagggaagagcagggtatggatgtcaccgcggcggaagtgaccgagccacggtgaccgccggtgagataactccggccacatgcgggtgggttcacggaattgtgccacgtccaaggttatcctcctccgcgatcgattcccccgctgattcatccgagctcatccaattcaacagtgttgtagatcttttcccctgtgttcttcagatatttcagcgctttggatcttcaggatttgtctgaaccgaccaccttccaacctcttgatctcttgattcttgctaaggacaaagcaaccttccttaataaaatttattcactaaacatcagtctacaaatttactataggatacttgggtcaaaaccgagggaattcaaagatatggcgtgcccaaattggtcccatatcactgtgaccatttctagttgcagtttcagttttagttactcgacaccagtctgatagagcaactttgggcaacaatttctttaatttttgtataacaactaaagagattgtctgcatcaaag

SEQ ID NO: 96675 - DNA, 493 bp, Zea Mays
tcggtttccggtaaggcttcccctatcgagttgtccattggttctacactcctttgcgctaggttttacggccgagtggtgtaggtcagcgcacttgggagcatcacgggcgaggtcgcgaccgtcatggtggaagcgccaccctattaagcgccagtggtggaagaagacctttagaccgtaggatcaaaatccagggaccatgagtggaccaagtcatggtagtacttgagccatagatctgggtggctacggttcagatcggtgagagggagatggttcaatattttaaatctgggccatcaatgctagatccgatggcgtaggttattacgtggcgcgggtaatctggaaccttgtatttatgatccgagggccgatgttgctcatggtgttagttagcaacggattgacccggacagcgggatcctgaccgaacggtggagattgcataatggttcgtttggactagattttaatctgaaccctcggg

SEQ ID NO: 96676 - DNA, 538 bp, Zea Mays
tggcatcggcgtcaaagactccagctattgagagcactgctgctgccgaagctgcacccaccgaagccgaaagtgccgaagctaaaaccgctgaagatgtaaatctagatgccacactctctgaaattgataccatgcttctggatgcggtcgtggaagaagccgctgcagccgctgcaaccgctgaagagatcccgggcacagtggctggaaaaggaaaggagaaagccgaggatacttcggaagaagaagacttcaatttccaagatatacttgggcaagaattgtcaaaggctgaaaaagaagaactaaaagagtatgctatatcttgtgggtacagaccaggtgcgttactcttcggggagtcaacgaagaaagttaggatgccttcgagaccatactagggtgaaggttgtcagcactcttataaagagtgttggcctcccgaaggttgaggaagacctcagcaggtaccggcggcagcatatcgccggtagcctattttatgctaactttaaggtaaaattcttaacttttt

SEQ ID NO: 96677 - DNA, 384 bp, Zea Mays
gaccgtccggccctagggcacggaccatttgacatgtcaggcagggaaccaccttatgcgccaggtcacggaccatccgcgcctccgcagagagcaccgccgtcggttctcaacgcagtgattggcactcgaatcggcgtcaacacatatctcgtttggaacaaatacggtggaagggtggcttcacagtttggtaatcacgcgttgtttaagttcgaaatacgatggctcattagaggcggatttcatgatcttcgatttggcaactagaaactaggggttacgcagccatgaaaaatgacagtaaaattagatcccttcaccaacacctgaggggttaggttaaaaacatcattgaacaattaaaaaaggaaaaatctcaac

SEQ ID NO: 96678 - DNA, 406 bp, Zea Mays
cgaacaatcatgggattgtcgtttcacctcatacgcaagggttcactatacgtaagcgaatcgcacggatgatcatggcctcgtgttcttgctgttctacccacgtgattcgtgacgggattctcgatcggatacaatcacgggtaggcgtgttgcgtagtaccatacatgctttacaatttttctttggctcaagtacctaatcgagagattcgattaagaaatagtagcagagaaaacatgccacactgctctagacacttgtgttttgctacggcttcagggaggcgatgagggtaacaaacaacaatgggcattggttaagaataaggtagaacttacctggtggaaatatcattccaatattgtttagaaagccaatccaagtttttccagggaagaggac

SEQ ID NO: 96679 - DNA, 754 bp, Zea Mays
taatgcattatccacagccttcggaagtcgagaaaagaagagattgaatagagtttttgacgctattggcttcgtctaccccgagtaccgctacccgctgcgggggcaagggaagaagaggagagctgctgctctggccgcctcggctgaacttatgccgaaggctgcgggcaaaaagatgaaggtacttacccaccggccatgttatattgaaccgaccgtggtgcctgagtttggcggggaggcctctttagctgctgaatcaagagaaactgcttctccgatgtagagggctgaagaaccggctataatgccgaaggaccttcggttgaactagttgaaacgaaggttgacaaagatagggctgaaagttcaacaactgaagaggtaacaaagatgtcagggactttaggtccttcaacagaagcaacagcgctgaaggcagaaaagagttctgccacaacccctaaaagaaggaggatggtaaatgtattagatattttagaaacaaccgactcccataagtcccgctcccacagagaaggttgccgaagctgacaaaacgcaacccaaagctgatactaagcaaatagaagctgagactacaataacccaggctgaaaccgaggcagggcctacagtgcctgctgagacgaagcctacggaatttgaagaaaaggcaacagaagaaaaggccacagagcaaatttcgtttgaaaaggttgccactcctgctcccgaagctttaaaagag

SEQ ID NO: 96680 - DNA, 617 bp, Zea Mays
aaacaattcctctttttcaggtcagtgttgacctggtcaatggcatactgggacaaatgattgaatttgttgagatactccaccttgcttgagtttcatgaattcttcttgcttcatatggagcactcctggaatgtagtgctcatgaaatgccaatttaaattcatcccaggtgatttgatgtttggcgggctgaatggccacataacttccccaccaggtgctggcagggcctcttaactgctgagccgcaaataatggcttctgggtctccgtgcatcggatgagtccaaacttctgctcaatgacccgaacccatttgtctgcttcgagaggatcctcagctttaacgaatagtgggggacaggtttctgagaaatccaagtacgaagtttcgcggggtccttgcggataagccctcccgccttgttgctgaagttgttgtcccgccatttcacgtaggaagcagatgttatcagcgggcgcagtgatcaaggcagcaatagcctcggctagcgtgggcggtaccggcggtggattgggtgtatcttcttgaccaagggatgttctcgcgccgtcatgtgcacgagttcgagatggcatctgaagcaaagaaa

SEQ ID NO: 96681 - DNA, 396 bp, Zea Mays
ttgtatctgacagagataaagtctttactagccaattttggagagatttatttcaattgttggggacccagcttcatcttagctcttcctaccacctacaatctgatggacaaactgagcgaatcaatcactgtttggaaatgtttctgaggtgttctgcgcataacactcccttccaaatgggtcgcttggctaacttctgcagaattatggtataactagtatggtgcccgtacgttgcaacgacaataattatccgccgtccgcttcttctaggcgcaaatgcgctgcaccaccacggcgcgcaagcgagcacgaagcagaaagttgtcattttttgcatccagacaaacatggcacccaattctctttaaaacttttgctaaggcttaacaa

SEQ ID NO: 96682 - DNA, 395 bp, Zea Mays
acggaagaacaaggtaaatgtgctgaaggacagtgggtaactgactttatacctgattaaggtcggaggtgaccaagcgacggggagagagacaccgaaaccgtgtagagtttgactcgatctctgaacgaccgcagaacgacaaccagagctaatccacacaatgcgaggcagccatactggaacccacaaggcatgaactagtggatcccagaggaatctcttcacaagtccaggagaataaggaagaataggggtagagtaaacactcagcagctcggctgcgttaatcacttggattatcaaatcatcaaaggttatcaaaagttatcctacatcagagacataggaggggtatttatactagctacaaccagacttagatagatataaac

SEQ ID NO: 96683 - DNA, 643 bp, Zea Mays
ctagaccgcattaaccacgcctggcactgagccacagcgtggttgccgatccgcttcctactcatgatctacggacccctcgagtcgcatagcactcatgacctacgagcccccagactgcgacgcattaataacccacgcgcccctcggtttgcgacgcgcttatggcctatcggactaggcctgagtacgcacacatcccgcgcggcactacacgacgagatgcgtcgagccctaggctacaaaagccaagggtcggcttaacccaaatgatggcacctgggactatcgccgcccccacatcatccaccacgataaatacacgacagccatgcaacccacaagtactcgtggcctcacacaagataaaacgctggttttacccctgccttccgactcctacctagagaagccaccgctggccgacccctctctcgacctataaaagggatagccgccttagggcaaagggatggatggatcaaggggcagaagaacggattgagggacgaccagacaccttcagacggagataagcccacaagaacgaataggaggagcgccgacgaggactaggaggccagcgcccaatcaagtagacttagctaggactccacctctcaacttctaagctccgcttcca

SEQ ID NO: 96684 - DNA, 632 bp, Zea Mays
ttgtgctccaatagctaagtctgaaaatcagtgcattaggaccaactttagaaccctgtatcttccaaattatgaggaatttgcctagggtcaacacatcaagtttgtagagctatcataggagaacaagtttgattaagtgactgatcactggtgctgaatagaaattggagataaataagtgtgaagttgtgctttcagaagtaagttgggcaaatctgaaaattggattcagaaaagtatggccctaaggaaatgcagtcaatttgagagcaccaaatctgagaatctatacataattgatccatgaaccctataacaaacttaaagaccgttgtttggggaacaaattttattaagggaggttaccctgttcttaacaagaatcatgagaaagtggggatgataggtggtcggttcagtaaaatgctgaagatcaaaacactgtaaatatctgaagaacgcggataaagatctgaggcactgttgaaccggatgtgctcgagtgatctggtgaagggagtcgatcgcggagagataacttcggacgtggcaccatcccgcgaacccagccgtgcgtggctggagatatcccaccggcggtcgccgtggctcggtcacttccgccgcgg

SEQ ID NO: 96685 - DNA, 440 bp, Zea Mays
attacatcatgacatttgcattcataaacattcacttagacatgcataggatcatcatcagcataacatgcaaacttgcttcggttccgaaaggaaggcaatcttatgcttcgctgtgtacgcaaagaagggaagatgtttttcgcatatggctcaaaagtattaatttcgtccacaccaaagcatttcatatatggacggaaaagtatgattatattacagagtaagacccagattacatcatactttatacaaattattacagaagttttttgagctacttttacagattattcaagcttcgatactatctttggagcttcgttcttctactctacagctccagcttcagcctggtcaatctgcacgaaggtattataagctaaattcaaaaattcaaaggaaaaggtaaggataaggtatgattttgttaccagctt

SEQ ID NO: 96686 - DNA, 917 bp, Zea Mays
gcggagagccctcggttgaagtcttcaccaagaattactgccttcattggcagaagaaggttattcgtggcaaggttgcgcagtttggtacatgcactttcacgttgaggactagattgggcgaggttgtggagctcgttccatgcgccaagaataagtgagggaactggtgggatttttggttttatatgacgttggaggacaccgaggggttcccaggctgcctccatctatcctatgctcgcactgctacattgcgttcccgcagtttaaattgaagaagggggataaaaacgaagatgccctttggcgcgcggccaggacgagcagcgatcacggcttggtggaagagttctttgcatgaggagtgtggccccttgcgcatggctgtgatgtgggtgcggtaaagctacgcccgatgccctttttgaataatcggctggtgccgagtcccgccttcgctattgagttgcgggggtgagatgcagctgcctttattagagaagtagaggcggaggcgatgaggattgttgggaagtattcggcaaggacaaagatgacgagaagctaggacattcgaggttcaaatgtaaggttgaaccgtgttttgagttgaatggccttcgctatggcccgtatcctgaagagggctctgctgaggctagggatgaatgaggaaagataagagtggtgacacgggtagacaaaggttgcttgaaggggaaggttgtggttacggcagcgaggaagaagaaaaaggttgaagttaaggtgaaaggtacgacgaaggcatccggggctgcaagggccttggagggttttgttcatgaattaacggagacgtgcgctaatcctggggaggtcatgaccttgtccgacctccagacaccatcttcgggaatgctgaaggtgaccag

SEQ ID NO: 96687 - DNA, 455 bp, Zea Mays
tcttcagagcagggctccggttccccctgaatgaaatgataggggaagttttaaagcactttgagatataccttcatcagctaactcctaacgctatcgttagactcagtgtctatatctgggccctctgaagccaagggatgggtccaaatgctgaagctttctgccgagtgcacgagatgcattatcaaacgaaggccagggcagatggccttcatgaaaattttggctgttacaattttgcgtatcggaaggatactaaggcaccagttcttagttactgtaccaaatggccaactgggtggaagagtgcatggttatatgtgaaggctgacgagaaaaagagggagaagctcatgaccatgattatgagtccactgtcaatgagcttcggaatgaccaggcccttatgcaatatgcaactgggatcaccctgccagctggctgaagtagaa

SEQ ID NO: 96688 - DNA, 1204 bp, Zea Mays
attaaggaatgtccgagacttaccattgcagtctgtagggcgagggatgatggcattccactgcagcacattacttgagtctttacccccgcatgagacgtaagaagtaggcaggtcaaaggtagtgttccttgaaaccatgtacacacataggcagacaaagatcgttttccagttcatgaattggacagatgtcgatggaatagaggagggcgtcgtagcatgaggcagtagggttttgtggtgccgtctcatggcaggagagcagcgccaccctggtgaagtcaagctcgcaactcagcgaggagcaagcaggtgatggcggcaacagcagcagtaacatgatggtgacgagcagcgaaacagatggtgaggccatcggcagctctagtatgtactagtgggtagtgtagtggcgattgtgacgcggccattcctatcaattgtaataataattaattaattcaaaaattgaggggtggacctgctggatgctacctcgcgctttgggcactggactgcaaaaccaggagtagtagacaaaccatccgaggaagcctgcaatggccacacatgctacgactgcgatggcgactatggcacccgatccgagcccgctaggagctggcgttggtggttgggacacacccttcttatccagctgtcgggagaatggatctcttggagtatgcatgtagtataataataatacgatggaatggagtaagtagtgattaattaacgaatgttcgagacttaccattgcagtctgtagggcgagggatgatggcattccactgcaacacattacttgagtctttacccccgcatgaggcgtaagacataggtaggtcaaaggtagtgttccttgaaaccacatacacacataggagtaaagatctttttccagttcatgaattgacaagatgtcgatggaatagagtagggcgtcgtagcatgaggcagtatagttttgtggtgccgtctcctagcaggagagcagcgccacactggtgaagtcaagcctacaactcagcgaggagcaagcgggtgaaggcggcaacagcagcagcaacatcatgatggtgacgagcagcgaaacggaggaggaggccatcgactgctctagtatgtactagtgggtagggtagtggccattgtgacccggccgtccctatcgattgaggtggtggtccattttata

SEQ ID NO: 96689 - DNA, 495 bp, Zea Mays
gttctggctaatctaaaatgagcataagcactattttcgggagtcgctgacacttcgcagaaaggccctcgatcttctatctcttcacaggggaaggtcctcgacaacggcgcgcgttgtggagctccggcgagcaccaagaccggccaaacggaacaagggctggttccaagctttggccgaaaccgaatccatgccccaaccattgattcccctaagttaattgcacaaatggctacccaaatgtccctggccacggacgcagcggaagtaatcaatagaaccgtgtgttcccagtgatctacggcggtttagttcaaactaaagggccaaggagtttgaggagagcttagggatgttagaacaagactagagacaacatgatcggacctgatttgcactgaccacggcgaagtgttcttgcggcttgtttgaaccgatttggggaaattgtaaaattcgcgctcgttggggatcaactgagggtaattcttg

SEQ ID NO: 96690 - DNA, 874 bp, Zea Mays
cgctttttggttccttcattttattttattgctgagtacaggagtcttttatgatcttaggaagcaaagtttttagctaatatatcagaggaacctctctactctctctttcatcagtccctttaaaacctttttctatgttgtccttgagacttcagaaattatagattattttgcctcattgccattttgagtcacttgtgtatatcttcactacaaggctaagaaatattctagataggactcattaggcaaaattcttccagatttctagatagtgctaagcgcaatccttggtatatcactacagctcctaagttctgttggcaaatttgattttccaaccgaaagattgcgtgggcaatgtcagaaaagacaggcaagcacctataatcatttctatctgcagtatgccagtatgggtctttaatcatttctatcttcttgtgtcttgctattgtctctgtttctgctatccaggcgaatgtttttgaagaactacttctcttctcagcatctcttgagtatgatacaagcaacacataacggatagttctctctaagctaaaaagtacataggcaagtgctctcatccatattttataccatttcatattaatagcaataagactatcgtctttctaaaaaataaacaagtgtttcacctttctcttcgcaacggactgattaacagtattaatttcattgtatgtatgcattgttaaatattccaccggttcactgatgaagaagtctatatgagaagttactttgcagtgtgtttgatattctggaagatgggcaactcgtagagttctttttttctttattcactacatatcattgtatcttctctggtatgctttaaaaggat

SEQ ID NO: 96691 - DNA, 541 bp, Zea Mays
cccccgtcgggactcaaaacccataccactcacctcaggtggacaccatgcctatggtaaccccgattgcagaaccaggataaatttagaacaatagatcgtcagcgtcggatcttgtaattaatgtttaaaatagaagtcttagtcatagccttagtcttactctcagttagttttagttagatagggtagtttgcttatcctgtgttttttatgtttgtcatgatggactatgatggatttggatctttgtaattactatcgccaaagtgtggttgccccctgcactttggtttacctgttaatgttaataaaattagttatctagttgggaagcccttttattctaattatctctttatctgggaagctgtgcttgtctgtgttgggagtcagtgaagatgcttatcggttcaatattgtggaagaattctatactcttttcttatgctacaagttttgcaagatcagttctgatgtgtgattgcattctgcagatgtcagacaataggcacagaggaggaaggcgtgctcaatagga

SEQ ID NO: 96692 - DNA, 343 bp, Zea Mays
tgattctaactgactagaaactgaagagcctcctttcagttttaaattgtgcatcggaattgtagaattgttatcttagctttcaaggcatcgacacttcaaccttcggtttactcgtttcacgtgtgatccagctaagcactagtgtgaagtcgtagaaacattggccctttcgttcgttctcttgggagagttccagtggcgatgaagcttttcagttttcacagctcggatgtgagcaaatccatcagctcctgcactgcatggtacggtacctgctacgttttgaacatttgtgaagcattctttttttttgcctttgtttaagacagactgcttatca

SEQ ID NO: 96693 - DNA, 279 bp, Zea Mays
caccaggtcttcggaagtaggggaacgaatctttagagctctggcagctacatccaatactactcgatgatgagtcatccagtcggctcctagaacgatgtccataccctctaatccctaaattaggagtgtggttttgaagattttacttcccattgagataggcacacttcggattaattggttggttgcaattttacccccaggtgtgcctatcatgaatgacacttttgtatgatagaaaggcaattgacatttagcactgaacttctggctaat

SEQ ID NO: 96694 - DNA, 345 bp, Zea Mays
caagtccttaaggggattagagaggatttaatcctctcttattcaaattgtatagaaatgaatttaatcctctccaatctctttcaatccacccataatcgaacaagtcctcaatccactccaatccacgtggaatgacaataaccaaacagatcaaaatctttcatatttttttgtttcatccaattcaaatgaaatgggaataacccgacaagttataaaaagatcattcgaccggtctcaatatatgacagagtaggggaaaatgattcaagtaagactgcggcctacagttgcatttgtgacctttgatgcctcccgtgtgaatctttccatcgcgtgatt

SEQ ID NO: 96695 - DNA, 414 bp, Zea Mays
tcacataagacttatctgaaatggataatgaactccctcctgttacacaccaactttggaggtagacaaattctagcagtggtaatggaaattccaaattaatcaaagttctaccacacttttcagtctccatgaggagaaacaatggcagaaagaaagtacgtgtgaatggctagatgcaacgcacaatgctggaaaaatgtggaagtagcacaaaatgtataagaatatacaagaacaccaataattggtgctacattcagtagcttaattgcatttgtcacttcattcagcttctgtagcacaagcataacgttgtttcaaggttacactacccctaccagattgtgtgattccacaatttcatggatagcgttattgcattagaaacaacggtattctagtcaataaatg

SEQ ID NO: 96696 - DNA, 368 bp, Zea Mays
ggctgcgggcaaaaagatgaaggtacttacccaccggtcgcgttacattgaaccggctgtggtgcctgagtttggcggggaggcctcttcagctgctgaatcaagagaaactgttcctccaatctagaggactgaagagccggctataatgccaaaggaaccttcggttgagctagttgaaacaaaggttgacaatgataaggctgaaaggtcaaaagctgaagaagtaataaagatgtcagggattttaagttcttcaacagaagcaacagcgctgaaggcacaaaagagttctgccacaactcctaagaggaggaggatggtaaatgtattagatgtattggaaacaaccgactccataagtctcg

SEQ ID NO: 96697 - DNA, 1606 bp, Zea Mays
ctcgtcgctagtgttttggagccaccactggtgttctggagccgcagcctgtgttctggactcagcagaggagaggaattgcctttatactaatgtagacgggccaaaaaaatagaagcccactagcccactagaaaaccctagtcgcctggacaatttctggtcgatttaccatctagtcggacgactaattgcccctaatcgacggctagtcggacgacctgatactctagtcgagtcgtccggctgatcaaccactaccaggcgacctgcctgactaatcgcgattaatcccgattagtgggacacttgaaaacagtggaaaatttatcaggggaagtggaagggttattttgaaaactgatgcacgatgggagggttgttttggaaaattatcatgactgcttgcacggtttggaccaagtggttggtttgcacctgatacattccctttacacaatatttactaatgatggattttgtagtgcagatgaagactggatgtgttgcacttgtattatgtttaaacataagtgttgatccacctgatgtaattaaaatttccccttgcgcaagattggagtgctggataggtaaacttttagttgactatatatttccaaatttcaaattagttgaaaaaatacagtaaatgaactgcttttcacggtgaaaccatgtctttcttttttatgaattgcgtttctgaatgccagatgagagcatattgttaatcagaagtacacaagtcttttaatcctaggcacattggggtaggctggagatgaaacccagcatgagcaccaaccagaagtaaaaagagaagggaaaaccttatacaaatatacacagcgcatcaacagtatagtaacattattaaagaatctaaatctagacttctagagtcttgttcatggttcattcttgtagatagctcatagctggttttcatgtgcttccatagttccatccaaggaaattctttgtgtgcattcggtccttccaagtaacttctcttttggcatattgctgatttaaagtaaatcacaagaaggaaactatctttcacctacttttttcaaaatacactgttaaaatctatattctgaaaatgagattgtttttctcaatagtttttagaggaatcttccatctgtttaaaatttgaagttgagaattgacatttaattgtaaaggaagtgaatttttctaatgtaagatactgcacctattggctgtggccatggatatataaacttatttattagtccttgggatggttataatgtcaagcaagtgttaccagactttaggcaatgatggtaatttatatttgttgataggtttgcacttcattactgttattaacttattacacttggtgcagttggtttgtgttatgttcatagacctattccttccttttcagaccctttctctatgacacctcttaaagctcttgaaagtattggaaaaacgttgcattcacagtatgagcgctggcaacctaaggtaaagaacatgcttgtctgtttaacttcaatgttattttggtgaggattatttgcatcttcatgtcctatttctagtggcacttgcaggctcg

SEQ ID NO: 96698 - DNA, 282 bp, Zea Mays
tgtccgaaggtttctctacttaagggctcaagcaccaactatgcaggacgacatcattatggaagcaatgattaaaggacttcgtctagggccaacaactcaatattttgccaaaaaaccactcactccctgaagaagctactgcagaagatggatgagtatataaggccaaacaatgattttcaccaaagaagggaagaagcacaaagatatacagaaaccgctaggagctttggaggaaggttccatcaaaagcacatttgaagcatacacaacctggct

SEQ ID NO: 96699 - DNA, 430 bp, Zea Mays
cctcgatctggcaggcaccaattaatttccgtgcaaatccttcaacgattcggttcggtgtgccgtgtgcgttacatcattctgatgtgcgattaggactcttgtgacattcagcctagtagtttccggtggatttcagccttccagggctggtcgttcaactgtgtgccattggttttcagtcattcttgatggaggtggtataactttacggctagttttgaaacttaaattccctccgggattcccgaagattgatggctggggatttaagtttccaaattaacccttaaactgaaattttgtggacggaagtaaccaatatgtgaaaccgctccacggacaaatcgttagcttttcttttactcggcaacagaaggatagcttgtacttcagcagttgcttactgaagtctagcaagatagcaaat

SEQ ID NO: 96700 - DNA, 1239 bp, Zea Mays
atgaaactttgatatcccaggttgtagccctaccttatttatatagtttgatttttttatattgctccgtattttctgttatcttccacttgctaatgatgatgtttgctggaaagcaatgtactgttgttggcaatgttgagaatgcatattacaatacaaattaaatgtcttttttcatctggaggagcactaccactcagttcccattttgatgccttactactacatctacttctcttcatacttctttttttttggctttcctttcaactgatgtattcatttttgaaacatgcagatacttccagtaatgcagcaaatatgtcatagtagatacaggattcttctaaataaagataattaaagtgcatatggccataagttgaaacatcatgttatgaaatcaagctcttggctagtataatgtatctttttttatagtttttcttattggctgattgctagatttcttagtttttaggcttctctcaaattgctttttagtgctaatggtccttatcagcattattggtctcataacatttgtgaaaaatccaacgaccagtcactttatgccagccttttcatgcacatggccatgccccatcagttgtacgacataaaacgatagttgttgattctaaagcaaacctcttttcttttcgaaacaaaattggactagctttatttgggaatagtgcaatgcaggaaataaattcatattgatattggtttattcttgactagtcacaaggaaaggaacccaccagaaaggccaagccaaatctgttaacaatctagctaagccaaaggaacaccatgttttcccttcatttttgttaacttaatttcttgatttagcattgtatcccctgtactatgttaagatgctttatagttcatgcaatcaaattttctgatttctgaactaactcaatagtcaatatgttttagactatggatcagtcctatgaaaattgtatcattatatttggatttaaaaaatgatttagaaatgctcttgttatttaatatcccctagtgtactaattgccaaagtctataagaaaataaaaggcagggatgtgtacgagtaaggcttctcaaaatccaggcaatgtaccttttaatgaagatgttgaaaaaccatgttctttaactcatttgggttttttcagtcatagctagcttgaggggggtgatacaccattttatgtaaacaaaactcgccctaga

SEQ ID NO: 96701 - DNA, 345 bp, Zea Mays
cggaagggaatcaaagataaagattatggtggaaggaaaaagaaaaagagagcccagatgatttcaaggaaagtgggttagctcaaattttaattcctctttgtgttttataatgcatgcatgctggaagaaacgttgcctctcaaaagaaaatagggtgctttttagggcatccttaaaatataagtactggcccacggggcctaattaattagccacctatttctccctctatgcctaaggcctttcgtcctaggtctagcggtctagtcctgacgatccgtagtagtttctaggcaagttttagattttgaaaattagtattcatggtttattgtccttctc

SEQ ID NO: 96702 - DNA, 357 bp, Zea Mays
cttttgcatgcttcgctgctagttcttccggtgatagccgtttgaatcgaggccggggtgcagcagctaccttagatggtgcgctgttgctggcttccttgaataccaaactcttcccagcaactttgtatcctcccctttttcctgcttccagttcccttctctcataggcccttgccaggttcatggcgcgctgcaaatttccaggagcttgtagttcaacatctgtgcgcaggggttccccaagaccggctgtgaacatgttgacctgctgcatggcagtaaggtcgttgcatcggcagagaagaagtgagaactgccgctggtattcctcaacagtgccggtgcggtagaggt

SEQ ID NO: 96703 - DNA, 657 bp, Zea Mays
aagagatcagactcagaaacaacgaacatatggttaccggcaaacggaagctggctattaggatcgatgggcagaatgattggagcagcaacactctgtgtcttcctcttgggggccatcactgtctctcaagtgaagtgggcaaactcaagaactcataaaacagagaagcggcagaggaaaaaaagcaagagttaggattcagagctcaagggggcacgttagcataaatatgagttgggtcgataagtcgggcgcaaaaatgctagaccataactcggaaaagcggagatcacaatcatcactcgggcattacctctaaaatgccagcgagcctctaaatgagcaagtaaaagcacgcaacggaggataagcaaagaactgcatttttcattcatgaggggagttcgtcacaaacttgaaacggactcatggcctcttccacttcttggtcattacattacattacactactctactacttacactacgctataccaatactactctaatctactattgtttagtactacttactacttactactaccactatctatactaatatctaaaccagtagcattatgccattggccttgccatcgccgtcgtcgtcgtcgcccttgctgccgtcactgtcgcccttgttgccgtcgc

SEQ ID NO: 96704 - DNA, 603 bp, Zea Mays
gtctttgtgtgcctcagaaatcagaagtgaagattgacatcttgagagaagctcataaaacgccttacaccgttcaccctggcgaaaccaaaatgtaccgagatttgaagcaaaacttctggtggaagcggatgaaggttgacgtttctaagtatgtggccacctgtgaagtatgtcagcgcgtgaaggccgagcataagaggcctgcaggattattgaagccattggaaattctggagtggaagtgggagcatatcaccatggattttgtggtgggcttacctcgttctcctcggggtagagatgctatttgggtggtagtggatcgcttgactaagtctgcgcattttattcccatgaagaccgcaaattcagcttcagaattggtccccttgtatatgaagaaagtaatcaggctccacggggtacctaagtccattgtttctgatcgagactccaaatttgtatccaaattctgggagagtcttcacagtgcattgggcaccaagctttctcttagtgtcgcttttcatcctcagactgatggtcagtcagagcgaacgatccaaaccttggaagatatgttgcgtgcttgtgttctgt

SEQ ID NO: 96705 - DNA, 638 bp, Zea Mays
gtggtgaggagtactgcgtatagcaacttctagacttgagggtatctgatcttggaggcctaagaacttcgctgatgaagtatacggggtgttggactagatttgtgtgcccttcttctctccgctcgattactagcgtggtgctcaccacgtgagtcatgcatgagatgtacagcagcagatcttcagctggttggttggcggtggctcggttaggtggtttcaggatcgatggggtggtcaagaattttttgagtgcttccaatgcttcttgatcctcgggagtccactggaatctattcaccttcttgagcagtttgtagaatggcatgtctctcttgccgagccgtgagatgaagcaattcagtgctgccatgcatccagtaagcttctggaccttcttttgcgatcgtggtggttccatccttaggatggctttgattttctccaggttggtctcgattccttggtgattgacaatgaacccgagtagcttctcggctggtaccccgaacacgcacatgttcgggttaagcttctagcggtagtgcctcaggctattgaagacctgttgtctgtcatcgatgaagttctcaagtccatggttttgattaccacatcgttaatgtaggcctcca

SEQ ID NO: 96706 - DNA, 350 bp, Zea Mays
caaatatatcgttagtgatgggtttgtgtatagagctaacaagctatgcattccagctagctccgtctgtttgttgttgttacaggaagcacatggaggtggcttaatgggacattttggagcaaagaaaatggaggacatacttgctggtcatttcttttggcccaagatgagaagagatgtggcgagattggttgctcgttgcacgacatgtcaaaaggcgaagtcacggttaaatccacacggtttgtatttgcctctacccgttcctagtgctccttaggaagatatttctatggattttgtgctgatattgcctaggactaggaagggacgtgatagtgtgtttg

SEQ ID NO: 96707 - DNA, 486 bp, Zea Mays
ggccgccgcaaaggaaatctactaagctagtgcaccggccactagctaacaagtttctgcaacttgttgtcttgttccgtgtcgtgcactggccagaactttacctgcccgttttggtcgatttaaagcggggagccggtaccgaaattttgctacatgaggccgcacaagctagctagtttgcataaacagacgcgcgcgcgtgcggcttttcgctggctgtgctgccccttgcatgccatggcccatggcccatggagagggcagcgccggcatcttttacagtttcaacttgccatggttactttaatcggtcttaaatttctgccacaaatacgtactcactcacatggtggttaatataaggattaacttttgttcagcataaaattacagaccctttgctactgaacgaagtttgcattaaatcttaaaccacaatatgcataagtagattgtatatataatacaaaagcaacaggtttc

SEQ ID NO: 96708 - DNA, 317 bp, Zea Mays
ggctataatattaggcatgcagacaaaaatggtttctcatttaaggatctagataatggtaccttgtgctcaaatgatgaaatccaggaacatggtgtcatccattctaatgatgatgttaagaagaatgtgtgtggcgaacaagattcagatcaagattgttcaatggatatattcagtgacagaaagttgaatatacaacatggtgtgacagacagggaattcagaaggtttgatagatttaaataactccttcatcccttcttattgtttccccctctgaacacaatgcttgcaactgattcagtgcttcgtat

SEQ ID NO: 96709 - DNA, 584 bp, Zea Mays
cagagacagaatcctcttatctccctaaggtagaacaactcaagtatgtgctacaactcctcttcccggtgtcgaacaacatagcagagtatgaggcattggtgcatgagctacacatcgtcatttcatttggcatcaagcggttgatggtgtatggggactctctggtggtaataagtcagatcaacaaggattgggactgttccactaaatctatgggcaagtactatggtgttgtctaacaagtagaagacatgtttgaaggcccggagttacaccacatggaaagggaccgcaatttggcagcagatacactgtcaaagcttggttccaacagagtttaggctcctctagatgtttttgtgcaagaagtacgatatccaagtatcccacaagactcaaaagaaaagtgcaaggcgataagaaactccatactccttacagaaccagacccaaacgactgaagaatacccattggtatatcaaaaatgaggacgatccacatgacaaagtggccgcagagcgtctcaactagtagtccaccaactacacacttattgacaatgtcttgtacaaacatggag

SEQ ID NO: 96710 - DNA, 345 bp, Zea Mays
gttgatcagagcaaagaagactatagcattctgatcccaacaaagcctagtcatcttgattttgaaaaatctattgtgacggaagatgacatgcctatgatgatgaaattgggctattttggagaagctaagagcaaacttattcgatttgctggagaagaggtaatcccagagccgaagaaggatgaagttgtcgttttcaagagcttcttcagagcagggcttcgattccccctgaatgagatgataggtgaagttttaaagacctttgagatatatcttcatcagctaactcccaacactattgttagactcagtgtctttatctgggctcttcgaagccaa

SEQ ID NO: 96711 - DNA, 909 bp, Zea Mays
ttttaagatcataaatacaaagcctcaaagttatctatgtctctcacgttggctcaatatatacagtaataacatggattcaagcacgtatgttacgtcggggttgtatataatatctcgttgactactgtaataatatttacgttatatctatcactatttgtgttcaaaaatagggatttttatactcaaactgggggtgcgctcacggttatcccacatgcacggtaaaaaaagaatcccttaatttatggtgtctataactgccataaaaaatcaaatcctctgattaactcgtctaataaattttataatcaaattccttaatttatggtggtcgcatgaacataagggttgtttgttgggagtgaatcaatatttacgctacatctaacactatttacgcttgaacttaaagatttttacaatcatgaatacaacgtatcatagttatccatgtctatcacgttggctcaatacttacggtaattaattgtattcacacacgtctgttacgcgggggtcgtacacgacatctcgttgaccattgcaacaacatttatgttgtatatgtcactatttacacttaaagctaagaattttctcggtgttgaagaatatatatgtgttaatatctatgcagttgtgtttgcacggttattcttcccttccgaagcaatcacattatcctaactcagtccacttgtattccttggtgaacccatcaataattgaaatcaaatatagaatataaaagaagtctgtttatttagctatttaacgcacttatttaatgtctatgtgatgcaagtaactttgtgtttttcacctatcaccgctgctacatcaatcagcatttggaaaagcatggcatctttattatcgtattaggctttatcgtctaaatat

SEQ ID NO: 96712 - DNA, 1022 bp, Zea Mays
catctcactatactctcattagggaagcactgtacagaaggggcacgacaggagtcctcatgaagtgcattctttcggctactgggaagcaactgctagatgaaatccacgctgggcaatgcgggatacacgcagcatccaggactctggttggaaaggtcttcaggtctggtttctactggccaacagcaaagagtgacgcagccgagttagtccagaggtgttaagcttgccaatacttatcaaaacagcagcatttaccagcgcagcaattgcaaaccatactcgtaacatggccatttgcgtgctcgggactggacatgattggacccttcaagaaagctcaaggaggatacactcatgtactggttgctattgataaattcactaaatggatagagtacaaacctattgcttctctgacttcggctaaggcagtagaattcatacaagacataatattcaggttcagaataccgaataacatcataactgacctgggatccattttcactagttcagagttctttgattctgcgaacaaagaagcatccagatcaaatatgcttcagtagcacacccaagggccaacggtcaggtggaaagagctaatggaatgatattagaagcacttaggtagaaagtattcgataagaatgagaagttcgcaggaaagtggatcagagagttgtcgtatgtgatctaaagcctaagaactcaacctagccgagctttgcatggaaacactcccttctttatggtctatggttcggaggcagtgctacctactgatctcaggtttggggcaccaagactgatcttcgaaaacatagctgaagctgaggccactagactggaggatgttgatatactagaagaagaacgattgaatacagtgattcagtcggccaggtaccagcaaactctgaggcgctatcatgataaggtcatacggcatcgatccttcgcagtgggagatcttgtcctttgccgaattctaacgggggaaggacggcacaaat

SEQ ID NO: 96713 - DNA, 453 bp, Zea Mays
attttagttcagcctaccatcctcagactgatggccaaacagagaagactaaccaagtactggaagatatgttaagagcttgtgctcttaagcatggtggaagatgggataagagcttaccatatgcggatttctcttataataatagttaccaagccagtttgaagatgtcaccatttgaggctctatatggcagaaaatgcaggactcctctatattgggatcagactggagaaaggcagttctttgggcttgaacttattcaagaggcaaaagaacaagtgcgaatgataagagagaatttgagaattgcacaatcaagacagaagagctatgctgatacccggagaagactactagagtttaaggagggtgatcacatgtatctgaaggtgtcatcgatccagggtatgaggagatttaaagtgaaagggaagttgtccccttgcttca

SEQ ID NO: 96714 - DNA, 415 bp, Zea Mays
cctgagattgatagccttcgtgagactatattgaaggaatcccatgattttgattactctatccaccctggtagcaccaagatgtatcaggatttgaagcagaagtattggtggtatggattgaagagagatgtggctgcacatgtggctatgtgcgatgtgtgtcaaagagttagggatgaacaccagaggccagctagactcctgcatccactgaagatacccgaatggaagtgggaagaaattggcatggatttcattactggattgcctcgcaccccgaagggatatgattccatatgggtgattgtggatagacgggccaaagtagcccacttcattcctgtcaagactacttataaaggctcacaactggtagagttatatatggctcggattgtgtgtttacacggag

SEQ ID NO: 96715 - DNA, 563 bp, Zea Mays
ttcacccccctctaggtgctctcaaggcaatgtcgttggttagaacctgtagattcattaccaccctggcaaggtgaatctggttgtagatgccttgagtcggaaaggctcggctcatacgactatagctacccagatgcccgacgagttggcagaggagtttgataagctcaacttggggatagttcctcacatagaaggagttaccatagaagtggaaccccactctagagcaagatatctagaaggatcagattggagatgccaaaatccagattcaaggcttgatggtagagggaagaggtgcagatttcacggaggataattagggcacaatctagttgaaaaatagaatatgtgtttctgaaatagatagtctccgagaaactatattaaaggaagcccatgactcagcttattctatccaccccgatagtaccaagatgtaccaggacctgaaacagaagtattggtggtatggcatgaagagagatattgcctcgcatgtagcagtatgttatgtagcgtccaccacctctagcttccactactcctgctcccgc

SEQ ID NO: 96716 - DNA, 287 bp, Zea Mays
aaaaaaaggtggatctatggaaggtgaggttgcagaaggtgttagaaggagcagcagattggagtcatctgaggaaatgaaaattgctgataaagctgctgcaagagctattgctaaagatgctttcatcaacaaaggtacgtcttacaatcctttctctgttcttaatactgataatgctgttctcatggatgtggctcacaaaattggagttgatttaggttcttcttttaatgatgctgtggaaaatttaaacctgattaaatctttagagttatctaggaaaa

SEQ ID NO: 96717 - DNA, 352 bp, Zea Mays
aaaagacttcgattttgcgcacttattgtgctagtccggctgcacccttaggtgacttttgcgtggagtgtcttttacaaagacttcgattgtcgcacttgttgtgctgttccagctgcacccttaggcgacttttgtgcggagtgtcgcacgcgagggtagtcagcgctgcccctcgcggtgacttcggtgaggtcgaatgccgaagaccgtcgatgcggtctttttcgacatattgtgtcttagtttttgcgggggatttttgcaggtatattacatggctccgcctcattaaaaacctcaccccccgggaggaaaagagtgcgggctggaatgatactgtttggtgaat

SEQ ID NO: 96718 - DNA, 390 bp, Zea Mays
gcagagagcagaaatgcttaaaagtgggaagtcgaggtacgtggagcttgtaaatgaagatggggagaaggtggtgacaaaggttgcacataaacatctttggtacatgcctctcactcctagagtgaaacgtttgtttctctcgaggaagaccgctatgcacatgaggtggcataaagattgtatggacagacaagatggcttaatggtgcacccatcagatggtgatgcatggaaggctcttgacaactttgatccagattttgccagcgatacaagaaacgttcgtatcggcttggcaactgatggtttcacgccattcaatatgaccactgcatcgtattcatgttggcatgtcattgccataccgtacaaccttccacctgctct

SEQ ID NO: 96719 - DNA, 394 bp, Zea Mays
gcatgatctggatcatgctagcaaagtcttatgactatcatgttgcacttgggcaaacatattgcaaagttttggattcgtgtatctcaataattatgatttgtttcacagcaacatattagctaaattactataatcatgagatactccatctatatgtgctgttattatgttcctcagtaatggtgatgtgaactcaggtggtcacatatactaccttgtttcttctggaacagaactgtcgctatttgttcaacatcatgtgctaatggtcctacgtttattctgactgaataactctatattcatgtccaaaattatgccattgattttctttgaccagtgcgaccgtgtgagtttgagatggagggacggaccagtgcggatggcaggg

SEQ ID NO: 96720 - DNA, 713 bp, Zea Mays
gccatgttccctttgccttgattggagctcccagaattacgttgattgttgaacttattctgcttcggatatggacagccttttataaaatgaccaaactttccacagttgaagaagtcagttgaagaactagggagggcggggaaacgagcaccaggggcactcggctgatttgtagaagtgggggcagtggtaggacgaatgaaaacaggctgtttaaacggataggagggtggacgaggcaaagaacgattctgattaaaaggtcggattaccaacctggttcgcttctcaggtccctgattggacctgtcacctccaaatccctttgattttctttggcctgtattcttggcttctactgccagcgtcgtgctgacagctctgctgtaagtaagatctaggcaggtggccatttttcgttggagccggtagttgagtcctctcatgaagcaattcttcttcttcaggtcagtgtttacttgatcaacagcatattgagataaatgataaaacttgttgagatactgcatcacagtatctcctccttgttttagtcgaataaactcctcttatttcatgtgaagcactccttctggaatatagtgttcacaaaatgctaatttaaattcatcctaagtgacctgatgtccggctggttgaactgctacaaaatttccccaccagatactggcagggcctctcagttgttg

SEQ ID NO: 96721 - DNA, 439 bp, Zea Mays
cgcggagatagatgttgtgcttagtttgctggctagggaatcatttgactcgacccatgccgagccaatggctatcacagctgtgcaagaacttggtgaggcggtatagacttggaaacctgaaagtgcccacccaaagcgtccacaccgagtgagccacccgactgcacctgttgaggaaaaaaggaagaaaaggcggcttcggcgactgtcatgcttggatcagggtgcaggtccttctactccggttcatgatgaggtactggaagaggccattcctaaggttgatgccaagggttgtgatcattcacaagctgttgtttgcatatttgatgaagacaaagaggaagaagaagaagaagaagtcccgctgaaccgcaagaacaatcggcactatagaggtagcgaggggggtagtgatattccttctctggctcgg

SEQ ID NO: 96722 - DNA, 747 bp, Zea Mays
tcttttgcaatggcaagcaagcatgcacgcatgcatgtgcgacaactgacaaataattgtttcctttggattcaaatcgtgatgtacggataagcaacgggtagcattttagctgctgcctgttggtagtgaagtgggtggaacaccacatgcatgcatgatccatgggtgtcatgctggggtatgggctcgggtcggatcatgcacgcatgcaagttggcgcagcagtgacagactcgagtgagagcgagtgcgctggcgacatggggtacctatgatatgcatggtgatataggcgacatggtggtgataggagtaatcaggaccgagaacgagtgcagctacgcgcgtttggcgccgagtgcacgcatgaggccaagaatattgaacgcttgaatctggacatttggatttgattgaacaaaagatacaatgttggatcttgcagctcgctgatgagtattccggcccgttgaggtgctgtttggaattaagcgcatgtttgaaaccactcagtttttaagaaactagtttatgaaaattgagataagatggttctaaacataccaatttatatatcagtttatagaaactgatttcatagtttcttaaaaacaaagaagctagtctctcctatctaaaaaaaactggattactttcaaacatgatttaaaaaaaggaatacaaaatacagatgtagaaaaaacagtctttgctacggtatttctacaagactaaattgaaaag

SEQ ID NO: 96723 - DNA, 1346 bp, Zea Mays
gctgagccgcacgcactctctccatgagggaggattgaataagcatccgagtctcctcactagcggtgccgatataacacaaagcgatcctcaaacggttcagatctgcgatcaaaggcaaggccacttttggaaccccagacctgctaagggcatcagccaccacatttgccttccccgggtgataatgaatggacaaatcataatctttaatcaattcgagccaccgacgctgcctcaaattcagctccttcttagtgaaaatatacttgagacttttatgatcggtgtaaatgtcacaagactcgccataaagataatggctccacgattttagagcaaagaccaccgcggctaattcgatatcatgagttggatagttcccctcatgcttcctcaactgccttgagccataagcaattactctgccttcctacatcaacacacagccaagaccaatttgagaagcatccgtataaactgtgaaacgcttaccactctcaggcaaagctaggataggggcgtccaccaacttgttcttcaatgtctgataactgacctcgcaatcgctggaccagacgaaaagaacacccttctccaagagtctagtcaaaggcttagcaatgctggaaaaatttggtacgaagcgtcgataatatccggcaagccccaagaaacttcgaatttcagagacactagaaggtctcctccactccaccacagccgtgacattcttgggatcaaccgcaatgccttgttgattaatcacatgacccaggaaagccacttcggacagccaaaaggcacacttcttcaatttgccgtaaaaccgattcttcctaagagcacccagaacgaggcgaagatgccgctcatgctctgcctcggtctttgaataaatcagaatatcatccacaaacacaaccacaaagtcgtccaagaactcatgtaacatcctattcaatgcttccataaaagcggcaggggcattagttaagccaaaagacatgactatgaactcgtaatgcccatacctggtgcaaaaggctgtcttctcaatatcctcctcacgaatcctcaattgatgataaccggagttcaaatcaattttggagaaaacctcggcacccctcaactgttcaaagagaacctcaatacggggtaccggttatttattcttgattgtcacttgattcaaagcacgataatccacacataacctcttgcttttatccttcttctcaacaaacaatactggggaagcccaaggcgacctgctaggcctaatgaaacccttatccagcagatcattcaattgtcgcttcaattcgacctgctcctttgga

SEQ ID NO: 96724 - DNA, 453 bp, Zea Mays
tattccaggagggctctcccatatgctccatacattatgttcatcatcaagagggtgactagttacacattctcccatggtggccttcatgagctgttttgagttgagagatcccgatcctcaactctggttgctcaggctagctcttctactagtgagcgtccgagggcatcctttggtggagagatagctagaggcactcttttgctagagaccggccagggccttctcgtcctttgtctacttatgggaagaaaccaagtaagctcatggtgttggtttcacaagatttttggtacattctcttatgtagccaacaatgcatatgaggctcgtcttaagatccatgagcttcgagagcatgtaggccttcctcttatccctgctcctcaacctcctcctgcatacagagacaattcagatgatgaagaggaagaggaagatgaagaggag

SEQ ID NO: 96725 - DNA, 615 bp, Zea Mays
gttggggaggcttcttcagctgctgaaccaagagaacccgttccttccacacagaaaactgaagagccggttgaaatgccgaagatatcctcagccgagctggctgagttgaagactgataaagataaagctaaaaagccaaacattgaagaaacaaaagcgctaggaattctaagcccttcatcagaagtagcagtgccgagggcacaaaaaagtcacaactcccaagaggagaaggatgtcaaatgtactagatgtgttagaatcagtaaagacattgagctctactccttcaaggaaagttgttgaggcttcaaaagtgccaaccgaagttgaaacaaagccggccgaaattgaagttgcagtaatccaagctgaaaccgaagctgggccttcagagcccgctgagaaaaggccttcggaaattgaagaaaaggcaacaaaagagagggccacagagcgagtttcgcctgaaaaggttaccacttctgctcctgaagctttagaagagaccattgattacatcatccgccatgcttcgggaaagggactctctaaggaagagaaacaagaggctcaacattatgcccaaaaactaaaatacccaaagggggc

SEQ ID NO: 96726 - DNA, 488 bp, Zea Mays
atttcagattctcttaagaagttaggagggggctaacagtatcgatgtcccatcgttgcagcggctatgtaggcgcgatcagctttgacttctttgaaggccccctgcttggggcaaaggcctgacatgcctcgcaactttgggtgacattttgtgcgtcactaacaatgacgagccagaagaaaccaagtcataaggttttggaagcgatggcccttgggccgacgtggcatccggagaaaccctagtggacctcagccattagttctctgccttcgcctggcctgatgatgcacttgagtagtggttggactattcctttccgatacaaggtgtcttcaataagcgagtactgtcgacacctgtatgcaagcttgaattcttctgaggggtctgctaagtggtaatgcccccggaggtaggatataatctgagccttctagtccccttgacagatcatgttgatcggtattgcttctaagtctaga

SEQ ID NO: 96727 - DNA, 392 bp, Zea Mays
ctttctaatcatgcaatttccctcctaattgcttatgcatgcttagtttcatgaattagcctctaattgctcttaagttggactaatttcgtgaaaacagtgaaaccctagacctactccacaattcaatccttaatctaaccttaatttcttaactttaatcatcatgatttggcctaaacatacactgatctacttaaattaggcgcatatttttctcactagggtcatggaattttagatagctcaagaatttgaactaaaacttgaacttgttaaggaaaaacttaaacttaaatatcaaatcgtgcatgatgcttgcatgaatctaatatactgaggctaatttcacataaaacaagcatctaacacatcattatccactatctggc

SEQ ID NO: 96728 - DNA, 403 bp, Zea Mays
gcagaagtggggcgaataaatacgggttgtttgaatggatatgaaggtgggcgaggtgaagaacgattcggagtgaaaggtcggattaccaaccttgttctcttttcaggtcgttgagttgatttttcacccgcatatccctttgtttcccatgtcccgcatttttagattcgactaccagtgttgtactgatagccctgctgtaggtgaggtccaaacatgttgccatcttctgctgaagtctgtcatttagccccctcataaaacaattcttcttttttagatctgtatccacatgctcaatggcgtactgggagaggtgattgaatttattgagatactacatcacagtatctcccccttgcttcagtcggaggaactcttctagtttcatctggagcac

SEQ ID NO: 96729 - DNA, 387 bp, Zea Mays
ccagtccccaacacacaaatggccatgttacgggtatggtctatagtagctgtgctggcaaatgctgctgctttgataagaattggcaagcttcacatttctggactaactcggctgcatcactctttgccgtcggccagtagaaatcagacctgaagaccttcccaaccagagttctagatgttgtgtgtatctcgcactgtccgacgtgaatatcatctagcagttgcttcccagtaaccgaaggaatgcacttcatgaggactcctgttccaccccttctgtacagtgcatctcctatgagggtgtagtgggccgactgccttgcgatgcgttccgctacagctttatcatccggttcctcttcatttttatatacctgatgat

SEQ ID NO: 96730 - DNA, 677 bp, Zea Mays
tgcatcttgtgccaaattgttagctctgtgattctcaactctagagatgtgtcgaatgctgaattcatcataagaatgaattatgccccaacattttcaaggtaactatttagagtaccattagaacattgatactcttctaatacttgttggacaactagctgtgaatcaccaaatgccttcacatgttttactcccatacaatttaaaagttccaagccgaacaaaagggcttcatattcggcttgattgttagtgcaataagtttttaatcggctagagaagtcgaaggagacattacatggtgaaacaagcacgatgccaattccttgtccttcattgcaaaccgatccatcaaaatataaagtccagggagtaacagtgaggtaagatatgtctagtttatgagtatcatcaatccgatgttctacaataaaatctgctatgacctggcctttcatagatttcaatggttcataggccaagtcatattctatgagtgcataagcccatttaccaattctaccactcataatcgggtttggaacatgtatttgatcacatcggtttgaccggcaacggtgcaatgactagacagtaaataacatctacacttggtgcatgcataaaacaggcataagcataacttctcgataaaagtgtaccttgttttagca

SEQ ID NO: 96731 - DNA, 634 bp, Zea Mays
gctcctttgatctctttgctaaaattcatgcggtgatttgtgttccaggccaatcaagaggctgaacagagctgtgcaggtgagcatgcattcattatattcccacggttgatattctttgcggtactacatctatggtagatttagtcgctgctgccatacaccagatacccagatcttctttaggcccttcgtcggcgaggagtatcacaaggtacgccaatcgcttggtcttatcttcctgctctacgaaaacaagcacacaaacccaatttactatgttacacccttggcttccgacgaggtggacgaggcgtgaggctgacggtggcgctggtagtccgcaaggaaccggatttggacgcgctctccctcgtcgctaggtaagagacccaggtaaggaacatataagtggttgttctgattttggatattagccaatttccccctccaatctgttactgatttatatgcccttctagggatcagcagatcccacacctattacatgatttgtccttctagaatagaatccgctttctatcttctgaaccggcactgccttcttcaatatcggccaccggtcggtccacctcttcaataatcgtccttcacttcagttgtgagttgtgac

SEQ ID NO: 96732 - DNA, 417 bp, Zea Mays
accgaagaggaaaaagttgaaggtccttactcaccgaccgcgctacattgaaccggccacagtgcctgaatttggcggtgagacttcttcagctattgaagccaaaggacctgctcttatgcagaggattgaagagctggctgcaatgccgaagactgacaaaattgaagaactgagaaccgaagggacaaaaacattagaagttctaagcccttcagcaggagtggaggtgccgaagacacaaaaaggtctagcagcaacccctaagagaaaaaggatggctagtgtattagatgtgttggagacgataaaagcttcaagctctactcccgaaaaaattgccaaggcttcgaaaacacagattgaaaccgagacaaagctgactgaagccaaagctatactgagccaggctgacgc

SEQ ID NO: 96733 - DNA, 286 bp, Zea Mays
gttgggcaaacccacaatgaaatccatgcaaatgtcctcccatttccaagaagggatggggagaggctgtaaggtacctgctaccttcaaacaactagctttgattctttggcaagtgtcacactcagatacatacttagctatttccctcttcatcctggtccaccaatataaggatctgaggtcatgatacatcttgttactccccgggtgcatggaaaacttggaaagatgagcttcgtccaatattttcttcctgagttctgggtttttgggaataaccaat

SEQ ID NO: 96734 - DNA, 572 bp, Zea Mays
tttccatgcagagctcgactaggttgagttctcaagctccaaaccacatatggtagctctctgatccattttcctgcaagtcattcttgtcaaacactttcttcctgagcgcctccagtatcatctcgtggccctttctacttggtcgttggctcttggatgcgctgctgatgcatacttaatttggatgctgcgttgctcgtagaagtcgaagaattcggagatggtgaagttggatcctaggtcggtaatgatgctattcggtataccaaacctgaatattatgtcttgcataaattctactgccttggctgaggttaaagaggcaacagatttatactctatccattttgtgaacttgtcaatggcaacaaacacgtgagtatagcctccctgagctttcttgaaaggtccaatcagatccagcccccaacatgcaaatggccatgttacaggaatagtctacagctgctgtgcgagtaaatgttgttgctttgataagaactggcaagctccacatctctagactaattcgacagcatcactcttcgttgttggccaatagaaaccag

SEQ ID NO: 96735 - DNA, 286 bp, Zea Mays
gttgactggaaagaatgtgacagataacaccgtcatatatagcaccaatatgtgatggacgaacgcagctgtcacaaaaggtgatgacattatgtgacggtactctgaacagtcgtcacaaggtacataatgtgacggtcgttatatgacgacccttatgacgcaacattttcgtcataagatgctttttatgaccaattttgtactaaacatgacactttacttttgtcatacaaaaccattttttgtagtgtatgtggatgatgggcaccaacttgcttccctg

SEQ ID NO: 96736 - DNA, 395 bp, Zea Mays
ttacgtcatgtgtgttgcggtgtctgttgcctatgcaatatgatgagatgatctgctgtacatgggcactaccgcccccctttatagtccgtgaaggtgcaatttgttacataaagcctatctagccgctagctagataagaatcgagatcggtccaaacgactacccctaaaaacaagaacgccatctttatatttacacgtggactcccttatagatcaagatatgctaattttacaaagatattgtccttatcatgaatcatcatcttcccttatttgcttcatgtaggtggattctgttttgacatgtgcgtcgagtaccctaatatccgagtatgactccctcgaccaagtctggattccccggacctggcccataggccaacatcttca

SEQ ID NO: 96737 - DNA, 555 bp, Zea Mays
gttttgaaaatattctagataatgtcgattcatgtgtgaattgtggtaagacgggacactctactttggattgtcgcttccctaggtgagcgagtgagcgacaatcacttgtggctcttcctcgcggtagtcagccgaaagcaaagaagaaagagggtgttcttaaaatgggtcgagttcattatactaagatcaaagctattcctgagggtgaaccagtcaagctaggtgcttttccggttgccaatcacttggctactattttgtttgattctggtgcttcccatacttttataaatcagacatttgtgttaaagcactagttgtctttggaggtggtagagaatggatatagcatacaatctcttggagggcgtttacatactaaggagatggtatatcaaatacccataaagctagttggtcacatgtttcctaccaatatgctagttcttctaggttaggacatagatgtgattctaggtatgaattggcttcgttagcatggggcggtgatcgacgctctacaaaggacgatacagttggactcaccta

SEQ ID NO: 96738 - DNA, 513 bp, Zea Mays
agattatgccctggatcaaggcaaatggagacttcggatcatgtggtttaagagccaattgtgtaagaagttcttgagccttggtgtcctcctgataaccttgtagtacctcctgaatccacgttggagtacattgtgaaatgtggttcaattgagcggacgaggggtaccgagatagggcatcagcagctacgttatcgcatcctttcttgtacacaatgcgatattgaagtccaacaagcttagaatataacttttgttgcaacatcgtgtgtaaacattgctcattgaactgcaccaaactctaatgatcagtgaaaatctgaaactctacaagttgcaaataagatctctaatgggccactgctataatgattgctaggtactctttttcatatgtggacagcccttgatttttcggacccatagccttgctaaaaatgtcagcgatgatccttttgcatgagaatagccccgatacctattttgcacgcatccatatatatgcaaaag

SEQ ID NO: 96739 - DNA, 382 bp, Zea Mays
tttcgaaggttcaaggggttgtcacgttggcctttctttcggtgagtgaggaagaacaagatgaggagcgcatagctccggtaatgagttaattttttcttattttaatggagatgaggatggcaaggaagaagacaccactacaactgctctagcggtgaaggatgttgtgttgcctgctgcagttgaaggaaggccaagagcctgaaggccgaattaatgcctccaatgacaactccttcgacgatggtaatggtcgagaagactggttgtactaagcctgttatggtggaagataagggcaaggggcctgcaaagattgaagagcgtaagaaggccattgaggatgacacaccacttggcgaagggcccttcgatcaag

SEQ ID NO: 96740 - DNA, 419 bp, Zea Mays
tgcaacatgaacgccatgtccaatttagtaagcatatgtctattaattatttgcgatgtgttggtttctttttcttcagaattttgcaagcagccaactacaagtcggtagtcaactacaagtcggtgcctgctcatcgccttatttttcgctaactcacttaacatgtatgtttagatgtctcagtagtacgtgtattatttgcatacgactatatttagttctatttgcatttctctgacatatatggcctgcccatgtcgtgtgtttccaaattgttttgttccaatgcacatgaaaccattttggacacctaatcattagttagcaaaaaagatttatctttttggccaaatatgcatgactactgccgcttttaaacaatttgtcaaaggaagtgtttgcccttcattagaccc

SEQ ID NO: 96741 - DNA, 543 bp, Zea Mays
ggaaacaacattcttgcgcttggaggaccaggaaacaagattgtcacaaataaagattgcataactggaagtggatcgtcgcgtgttaggacaaccagcccaatcaacatcagtgtagatggtgaggtgaccacagagcgccgaagaagcaagccgtcctcagaagtgccacaaaggtatcggagaatacgtttgagagctgtgaagtggggctctcgcgggtcatgcatgtggagacatatctgttgaactgcataagcaatgttaagacgagtgaaggtgagatattgaagagctccagctaaaccgcaaaaatgagttgcgttctgaacaggaggtctgacatcagctgaaaattttgcctgaagatcaaccggagtggaaactgatttgcaattttgtagactagcccgctcaatgatgtcaacaaggtaatgccgttgatgcaagaattggccactatctctgcgttccattgtaatacccagaaagtgatgtaatgggcaaagatccttcaaaggaaactcggactgaagggacgaa

SEQ ID NO: 96742 - DNA, 571 bp, Zea Mays
tgcttgcatagtaacaacaacaacaacaacaataataatgtcagctctaattgacagcccacctgtttggatggatggatggtcagaaccggctggtggtggttgccaatcttcgtccccaaataaaaaagggagagaatcaatgctatggccactccaaaataatgcaacgaccatgttgaaaatcatctgcgctctagtagccgcattatagcgaaccaggtccgggtggttcagactccaacgatgaaattcagagcactgaaactgccatcggaaattcagagcattgaaactgctcttagtagtacaagggcgcttttatgtgggaggtaagagatcggagagcctctagagcatcaccagtactgaccgcagatcccatggtactgccagaaagtattagtaacaaattgggcaatcattaagagattcctcctcgccctctaattagggccccatcccatgggggaggaaaggggaataatgaggcgtgcatcacattggctgtctaccctgtggagaagtagctgatgccacgctctcaccaacttcctgactaagacaagag

SEQ ID NO: 96743 - DNA, 457 bp, Zea Mays
tcgggctgtgggaagatagccagtccatacccaagatgacatcataacactgtagaggtaacaccttgaggttaacacacaagatatggctttgaatgttcatttgacatcgaggaatttgatgagtgcaacatataacttgaccattcaccactttgacaataacagactgagatagagctactaatccaggaccaaaagctgccaagagctagctaataaaagaggatgaactacctgaatccacaagcataaccactattttggagaacatggatgcaattaatgtcaccgtttgtggggcttcaataccttgcaccgcattcaccgataaggtcattaaatcatcactagattctttagttggctctaaaatattttcctgagtcccagatgtatccaatagctgccagagttcctccaccacatgcaaagggacagtagtactgcatttgtg

SEQ ID NO: 96744 - DNA, 822 bp, Zea Mays
aaaaattggagaaaactactcctcaacttgggctgtcagaacgactgaaggtggtggccatggtacagtactaaaaaaatcttcagattcatccccctcgccgttggtgacctccgcgcaaggattcacgctaatcgcggtgatttgtgcaggactcggacaggatagtaccagggggtgaaaagatcggaaggggagtggatttggtcgcggggtgaagcttatcaaccgcacttgtagccatgcgacgtggccggaccgccggtgtcgtcatggtactccagcaacctcagctacgccacgccgtagctctttaccacgtagtagtaatcgtggtgcgcctggacttgccatttcaagagacgttgcaccggcaagcgccacgactgaaccgctagtgatcttccttctctctggccgctagctttcatttccaaaattcggagcctcctcttaattcccctataaattgatggcccggtctgctgcgccatgttgtcatgaagccagagcaccgactcccgccttcgattagccaccatagccggagaatttcattcttcccccaaatcagttgtctgcgccaccgtgagatgtcgcgccgtgcccagccacctccaggtccgccctcgctctccctgttcatgttttagcacccacgcgtgcttgtatggctcgtcggctcaacccattgagctagaccgcgctcaatctaccggaacaccttgatttgtatatggtgtttgccgccgtcgtgggtgggagaatccagggcaggattggttcgattaaggcatggtttaggtttgccttaggtcaggg

SEQ ID NO: 96745 - DNA, 573 bp, Zea Mays
ctgcccctcgcggtgacttttgtgtcggtcgaatgtcgaagaccgttgatgcggtctttttcgacgtagtttttgcgggggatttttcgcgtgtatattacatggctctgcctcgttaaaaacctcaccccccgggaggaaaagagtgcgggccagcttaaaactgttctgtggattacaagggcgaagtggccctgaggagttagacaaaaaatttgcgaagattatcaatgttccaagaatgttctaagtcttcgtcggatggcgttgtgagcctgtacgcgctgggggacgccttcgtcttgacaatgaaagggccctcccatttcggctccaacttgccccgggactctgtccgagctgtccggacgagtacgaggtctccttcgttgaactccctcgggatgactgtgtggtcgcgccatgcttttgtctgaacttggtatttgtttagagcctgtagcgcgaagacgcggtctccgtcgatgaggtccttcgaagtaggctcgtctacgtcggggacggccgacgcgactgtccgaggtgatccgtgttttatttcttgcgaagtca

SEQ ID NO: 96746 - DNA, 463 bp, Zea Mays
taagatgagcggaccccagtccgggagcaacaatcgtccccatttcttaggcagttcatcttagtagtacaggcatggccacccacaaagatatcagcagcagaaccagtgtcagaaccaacagtatattcagaggcagtatcagcaaccacatcagtaccgtcagaatagtcaaccgagaggaaatcagtaccaaaggcagagtaatcaggcacctcgccttcctgccccagcaaccaatcagagcagttaggtagctctagtgcaaggaggaggccgaggatgcttccactgtggagatcagggccactaggcgatgcagtgctcgaagaagatggctcaacagcagccgcccccaatgccccatcaaggtagaatgcacattaatagggagctggcaaccatggtcagacgcgctacaaccatggaggctgaaccatctggagccgaagcagtccaagaa

SEQ ID NO: 96747 - DNA, 672 bp, Zea Mays
agcaaccaatacaagaaccaacagaggaacaacactcagaccggtcaaaggtctagtggtcaacaacagaatcgtcaaggaagcgccgtgaacacaccggccaaaaacaacagcacaactaccccagttgaacctaatggctgtttcaagtgtggcaaacttggccactatgctaataactgcccaaggcgtaatcaacagacaccctagaagaacagcaaccagaggattgaacaaaacacacctactcgtggatctgcacagaacaagactccacagaaccagagtaggggaagagttaatcatgtgacaacagaatcagttcctgaggatgtcgacgtggtgtatggtatgtttcttattaactccatacctgcatcagttttatttgattctggagcatctcactccttcataacaaagtcatttgtggaaaaaacataatatacccgaactatcccttgaaagaagaaactattaattcgatcaccaggaggtgaacatagagccactcactcatgccctcagactaagattgaaattagaggcctaagctttctagtagagctgataattttggaatcgagtggaatcgatgtgatacttggaatagactacttgaccaagtatgatggagtaatatcctgtgccaaaaggatggttacattaacc

SEQ ID NO: 96748 - DNA, 1057 bp, Zea Mays
tcgtctgtgttggcctgtagggatttcagtgattttgctgtggtacagggataattgcatcgaatttgtgtgtaatccctctgctcaaatttattgacgcggttctttttctatgtaaaacggaggaataaaactcttcatggtcttgatggagcaactttgacaactatgtcttgccttgatgtattcgtagtggctacaagtgctgacaatttttgcaagggccaatgggtggtatccagttactgacgacagggcttgtttagttgattccttgtgagttatccacaggtttgatgcagaaatctgatgtggcccctctgcttagatgtcacgatgtgatccctttgctttagatgtcatggaaaagttgaacctcaagtcacgaggtagaacaacaggacttgatgtgtcattattgggttcctaacaagctgactgtttagtgaggcgcacctcctgtcaggtgggtttccgtacatttctttctgttgggctgtccattgaaagattcctccccatgaaaacgtactgtgtgtggcccgattcgtccagccgctttggtatgaagcttttgcctcgcctttagaaagagtttgaggaaacaaaagtgatcttgtcaacttctttctttttttcatttcagggaactcagattcctattcctccatgcaagagctttacgtccgtccgtttgccacatgagaatggccggctggtttagtcttgaatcatcatcatgattcagtacacatctacctttgctggcgaccaacattagcctggtgcagtgcatggtctgggcttgcatgcatgcaatgcccccgggatctccgttcctatctcttgggttgagatttacatatgaagcatagctgaaaaggttgtggtccgccgcagcagatgctgaaggccccaggtatgtgctggagcgtgtggctgttgcctcgtctcaagtcccggctatatgtccccatgcatgcctacttgtctgctgtcgaaacctctgcggacggacgttgcatcgtttcagaattacgtcacatggtcatctgac

SEQ ID NO: 96749 - DNA, 564 bp, Zea Mays
ggattatataagtcatttgttgtaccatgtagtaatttctaaaattaattaggtacctaacatttcagagcagaggggagtactcacttcctatgagtcgataaagtttgagtacccgtttttacgtttttctaagtccggacgctaagtgacacaatgtgtcaagttcgtgaactcctagtatactttactcttttaattacatggaaaaatgataatgactaaacaactcggaagagactagcgttcgtggggatatttgagcaccctcaacatggaaaagtataatttgatagaacctactaaccatacggatcggagggcaagctaaagatgatgcaaggatattctctttagtctgtcttttgctttttatccattattttttgttttttctttttgccagaaagaatgtctggttgtgatggaccacgcagatcatttcttctttttggaaggaaaaggctgtaaagcgaagctaccgatccatagaaagaatcctacaatttgtcctactacactacacgtcgcaagccaggggatccatacccttccttgtatcac

SEQ ID NO: 96750 - DNA, 281 bp, Zea Mays
cactcctattgttttagaattcagcagtatctaaatttgcaggagtaaaatgctgtatgatgattttgaaacttcttcacgggacatagaggtcgcccctatatgagtaatcgtaagcatgtggaatcgtcttaagtcgttgctgacttaaaccgattgcttttgttaatagggcatagtagtaatcccgagttaagtaagcgtgagcatgttgcaccgtcttaagtcgttgccgacttaagccgattgcttcgttagcagggcatagtggtcaccccgag

SEQ ID NO: 96751 - DNA, 571 bp, Zea Mays
caaatatttccatgatatatccatagtgagagctagaggagagagtattgttcctcttcctgaagcagacgaagtggtggtattcaagagttttatgaaggctggacttcgttttcccttgcataagatgctggtcaaagtgcggaagacatttaagatataccttcatcatcttactcccaaagctttgattaaaattggagttttcatttgggctatgagaagccaagggctggagccagatgccaaatgctcctgcaatattcacaaattatcttaccagacgaagggagttgggtaagagcaatatcataataacttcggatgctatagcgttatgtaccggtctgatgtgtggtgtcctatgccaatgttccagaaaaaatggccgagctcatggatgaagcaatggttttatatcaaaaatgatttgagagagagaagatgtgaagggcagaatccaacgccccatccgttcacgcttcagcatcaggaggcctttgatcgcaagtggaaatgaagtagaagcatgtttgatggccttcaacacagtgtgcacttacatcggcac

SEQ ID NO: 96752 - DNA, 314 bp, Zea Mays
tgtttcgaccactttctttgacttgtggtctttgctctccttggaagaatcttgttcatttgaaatcaaggcatgagagtctcttgtcttgattggggtttcatcggactcgtgttcttgaatcttggcaaatagtttatgaggagtcatcttctcataatcatcacggtcccatatcatccttgctagactcttgtccttttctttgtaggctctcatgaatagcctagtgaccttagagtcactccaatcttcacttcctagtactcttattttgttgacaaaaccatcaaccgatcaaagagggattgcag

SEQ ID NO: 96753 - DNA, 1020 bp, Zea Mays
accctaagtcgagtaagtatgcagattgacaataaacaattcgagtgcctttgagaatgaagtcattttattgatggtgtatcttccaattatagaatacaatgccgtcccaatagcttttgaaatctagctaggggtaaaacttcctgagatgctctatattccatgagttccctatttccgtgccatccatttgagtaagacgatatgatccaggccgagtgacttctgctattatgaatggcccttcccatagtggcgacaatttgtgccgtcccttccccgttagaattcggcggaggacaagatctcccactgcgaaggatcgatgccgtatggccttgtcatgatagcgcctcagagtctgttggtatcttgctgactgaatcactgtattcaactgttcttcttctagtatatcaacatcctctagtctagtagcttcagcttcagctatgtttttgaagatcaatcttggtgccccaaacttgagatcagcaggtagcactgcctccgaatcataaaccatgaagaagggagtgtttccatgcaaagcttggctgggttgagttcttaggctccaaaccacgtacgacaactctctaattcactttcctgcgaacttttcattcttgtcgaagactttctttctgagtgcttccaatatcatttcgttggctctttctacctgcccgttggctcttgggtgtgccactaatgcatatttgatctggatgcttttttgttcgcagaaatcaaagaactccaaactagtgaaattggatcccaggtcggttatgatgttgttcgatattccgaacctaaatattatgtcatgtatgaattccactgccttagctgaggttagagaagcaatgggcttgaattccatccacttagtgaatttgtcgatagcaaccagtacatgagtgtatcctccttgagccttcttgaaaggtccaatcatatccagtccccagcacgcgaacgaccatgttacaggtatggtttgcagttgct

SEQ ID NO: 96754 - DNA, 374 bp, Zea Mays
tgcaaatatcttttttgggaagaagtgttcgagagtgatttatgccagacatagtgtgagtatagaactgtactctttcactatttctctctacggttgtacacaaaatcataatcatgggaactaggaaccatgctattcatctagaatttgagtcctactgcttcaaatagccctggtaaaaggtaatctttatccgagtaagatactcgacaatgttgccaaaaaaatcctaaaacgtgtaacatacatggatgtgaactagagcccccacaatagtacgtgcgcacttgactgtatccttggcagtttgctaagaaaacatgatttatccgcaattacacatatatctatctgcttattttggccttctc

SEQ ID NO: 96755 - DNA, 359 bp, Zea Mays
ttaattctgctaactcggtaggagccatgcggtatggtctctttgcgatgggcgccgtaccaggaatcagatctatgtagaattctacttatctttctggcggcattcctggcaactcttctaggaatacatccatgaattcttctaccactgatatgctttctgttgctagattaaacatcattggatcattggcgggtggctgagcctgacaagagactggctttccttggtggtctgtgagaaggattgtcttgtttgcacaacttatgatacctttgtgcttggtcaaccaatccattcctaagatcacatcaatcccttgggatggcaagacggttaagtctgccaagaacact

SEQ ID NO: 96756 - DNA, 927 bp, Zea Mays
agcatagagcatgaacggaccttgaacgagctagccacagcgaggtcactatgcacggtgtttcggactgatttgggggaaatcccaaattggggctctctggtgagcaattggaggcacgagaatacctagcggagccgagggtgtgctcaatttatagggcccttgagcggtggcccgtgaatttgagctcgcacggtggcgatcggagagaaagaggtgcactggcgcaagcgattggtggcatttaccgtggcaagctcaccgacgatcaccggatgggctgaggtgactcactacggcgtggttaaagcaccgaggcatgtggcgcaaggttgtggggtggctaactccggcgagcctatccaaagcggccatgactcaagcgggtacggcggccggagtagaatagtggtcggagtccatccacggggtgatatttcttacccccttgccgttatccaactgtgctgaacacgaatcaccgtggcgggcgcgaatccgggtgcacggtcgccggcggtgagttatctgagctggcgtactaatctggtcactgtaccattgaaaacccgattcagagcgcctaacaggccgaattgcaatgcctagatctcgaatttttgtgcaacaacttgccaatacatctgtagcaaacttgtagcccttcataccagctacaattctgctataacaactaccctcgatcgagcaatagatcttactctaatttgacccaaaagtttggccaatgacactggtgacctaaattcagtcagtagagtgactgacaacacaagtttgagcttatttttctccaaactttgtatgtgatcaaagcttagttacttaagcaaagttgttctcctattatagctctaaatgtttgatgtgttgaccctaggcaaattctttgtatctttagaa

SEQ ID NO: 96757 - DNA, 692 bp, Zea Mays
ggcgagctccgagaacgccgatgaaattctggacgtcgagaacggtggatcaaggacgagcgccggggatctcacgcgtgtggctgacggggagatgagacgagcgcgtgggatgaagctcggcgccaagttgctgctgtggagggtttgacaccagcgtggacagagaattttgtcaagcacaaggcaaacacaggcttaaagcttgaaggcagcaaggttctctgaccacgcacttgaacgcagggataaaggaacatgcagtggctatgtccggaatcacgctgagtaggggtcttgaggtatcaacagctgcatgagtatggttacgtggcttcacacacagactccatgccggagcacaaacacagctagtcatcacttggtcggattccctctgccagggataagcagataacgtttcaccgtggataggcaccaactgacccagtgcatggatatttactacagagacttggccttctcaatttttttgctgcccagtccaactccatctccaactgatgcgcaagtggaacacagcagggatataaagatctttccttaccctccatgccaatgtttatccacttactcaaagtgtccaaaacaacaagagcacacagtggttcagacctatcttatttctctacaaccaaaattttaaaaccccaactaaacctctcctgttc

SEQ ID NO: 96758 - DNA, 300 bp, Zea Mays
ccaacctgtgaccgagggtccctactcgctgcatcaagggttgatccgttacaagggccgtgtctggctgggcaacaatatgtctctccaacagcagatcatgtccgccctccacgatagtgctttaggcgggcactcgggttttccagtcacttatcgccgcgtgaagcagttgttctcctggcctggtctcaagaaaacagtcagggattatgtcacctcatgctccatttgccagcaggccaagtcagatcgagccaagtatcctggccttcttcaacccttaccagtaccggaaca

SEQ ID NO: 96759 - DNA, 848 bp, Zea Mays
tatcaatcttatatcaatattgtccggctgcacacagaaatttaacatttacgattcaatagcgactaaatctaacgtaatataggtacaacattacagaaagtatgtaagaaaataatagtatcataattgagagaacttacatggctttgaagaatatgaggtgtgtcctgttcatgcgtcccaatatgtctcatggggatgtgcttattgcgcctatcacgtctgcccattttgtgtgctcatcaatatgtcttggtgccctcaatgccgcgggggagtaacagatacaccctctgtgtaaccggtgatcgtagacggtacaggatgcatgtccattggaataggcgtaccagttgatctatgcacagacactacaggttgcatgtcatcgccagcgccggtgctggacattttctcgccgttaatcgccgcccggtgctctcccttccgtcgccgttaaacaccgccaatatcacagatacgaacgtggacgagcggctgtaaattagaatttatttcctcccgtagctgtccctttatttacgcgattatgtagcacgtctttccttatcttaaaccggtggagatttatataatgcatggtttatgctatcatgttacacagcgttatgcagtcgtaaacagtgtgcacatggtaatattcgttcccgtgattcgtggtacaaaagattccttctatgcatgatttatacaaattactacatatatttatgtgtgcgtatatcgcctgtcgtgtatcatccgggattcgtggctatcatatgcatggctgacgcaagctcgcgtacagtgggccgaccgcgacctggttggcgtcctgggtg

SEQ ID NO: 96760 - DNA, 552 bp, Zea Mays
tttgttttcaagaacattcaaccgttgaaggatagggcatacccggcctacctgtaccgaggtctagctgactcaacccgggtcgccaatagaagaattcctactatagacttggtgagccggcttgaaatgatactcagaggcaaggtatcaaatgctggcgcccctgtcgcatactgcctccttccaaggcctttactcattttgtgtcgaatcctcctgctgctgacggcggtttgggccttagagtgcgaccctctaccgaagaagttagtgctttgtttgcctcgcttggagaaattcctgatgatgaacggcaggtccactttgaggtgcctttggatcctagtgatgcagagataagtgctatgcttaatatgctagttgaagattcttctgatgctgctcctgctgggacattggtggtggcgcctctcccggaagctggtacaaccttggatattcagaggtctgttagtgttcgcccgaagcgcccttgccgagccaatcaacctgattctcccgctgatgagcagaaaaagaaaaagagac

SEQ ID NO: 96761 - DNA, 818 bp, Zea Mays
tcagttttgcaaagccagctgactgctcagatcaggttgaagttccaagctgccgtccaagggtaagtaatccgacatactcctgttatagctgctcaaaaggcatacagctgtccaagggtatccggaaaaaaatagcagtaccatacatatctgacctgagcaatgtagtaccagaggttttttcagaacaaaaatagcagtacgatacatatctgacctgatgaatgtagcaccatagctgagctctggagtacatggaactgcatatgaatgctgctgggcctgttcctcgtattgcagtatatagctgacatagtttataatttatgtatcccactggcagtatgccacacctacctctttcctctctgttcttctgtccgcccacagcaaggcttctgttaaaacaaaggttatgttcttttggaacacgaaaatctcagacaatattctgttcgttctggtatgcagaactatttatcattggattaagaagaatattatataatatattcacaccacttgttagaaaattctatatctttgcaaatgcatatacatatttttttggtttttataaaaatcactttttaccagatgaagctgttagttaattgattattgctaatggttcatgttacagttggtaatctagtattaaattaatagaagcaaaccatgtacaaaagagtaaagcatccataagaaaatgttatcgatgtgatatatgagggtggatgtatcaactatgtcaacatttagcaccattgtttatccaatagatctaaaaagatgctaggtaggttttgtcaagc

SEQ ID NO: 96762 - DNA, 515 bp, Zea Mays
gttcttaggctccagacgacatagggcaattcccttatccattttcctgcgaacttttcattcttatcgaagacctttttcctgagtgcctccaatatcatcctgttggctcgctcaacttgcccgttggctctcgggtgtgctacagaagcatacttgatctgaatgcttttttgctcgcagaagtcgaagaactctgaacttgtgaagttggatcctaggtcagttatgaggctgtttggtatcccgaatctaaatattatgtcttgtatgaattccacggccttagctgaggtcaaagaggtaatgggcttgaactctatccatttagtgaatttgtcgattgctaccaatacatgagtgtatcctccttgagctttcttgaaaggtccaatcatatccagtccccagcatgcgaaaggccaagttactggtatgatctgcagttgctgtgctggtagatgttgttgttttgacaagtattggcaagcttcgcacctctgaactaactcggt

SEQ ID NO: 96763 - DNA, 515 bp, Zea Mays
cgaggtagtgtgggtggttggtgatggtgggcatggggacgagcatggatacccttgtaccgacattgatgcagaggcgcgagaagaaacatgtggttgagaggtccaacggtgtcgctgcctagcgcactggactgaatgtgtgtcatgctgccgcaggagcacacctgaaggcgtcctgaaagccactcgacgccaggcgagcgatgggatctcgacgaggtgtgtgagggtgatcgtgggggatgggaaggctagagccaggtgaggaatgaggggatgatccaaaaaaacatttactgttggagcgattgattaagataggggaggtaaatgaagcgatctaaagtgttggttttaatggtgagatttggatgtggataatttgttatgtgcacttagtgatgttttagctgctagattataaagaggtatagattagatccatcatactagttagaggtttatatgtttattgatgctgataggatcacatgggtatataaagatgatga

SEQ ID NO: 96764 - DNA, 603 bp, Zea Mays
tatgatgaagttgtgtgcccccgcacatttggctatgcttgtgaaggcgttgcgtacttggtcaggtgtatttgttatgcttcatccggctgtgccctcgggcactgctgcgcggatggtctttgcagtagacttcggtttttcgcacttgctgtgctagtccggctgcacccttaggcgacttctgcacggatagccttcgcggtagacttcggtttttcacacttattgtgctagtccggctgcacccttaggcgacttctgcacggatagtcctcgcggtggactttgatttttcacacttattgttctagtccggctacacccttaggcgacttctgcacggtaagtcctcgcggtggacttcgatttttcgcacttattgtgctagtccggctgcacccttaggcgacttctgcacggtaagtcctcgcggtggacttcgatttttcgcacttattgtgctagtccggctgcacccttaggcgacttctgcacggtaagtcctcgtggtggacttcgatttttcgcacttattgtgctggtccggctgcacccttgggcgacttctgcacggagttgtcgcacgagagggtggctagc

SEQ ID NO: 96765 - DNA, 503 bp, Zea Mays
cgttaatcgaagtctctcattaaaaagacaccccgcacagagtcacccacaggcgcatccggaccaacataggcgtacgaatacggccaacagaccacatcaccatacaaattacaattacatacacatggtgagggcatcacatattacatcggctcaactttcaggataatacccatctccctgtaattaaatagtattatcctcaattcctcaccctcaaaaagcttccgaagatccccctcgcctatcctcgccccaatcggcaaggacaacaattctcgcttaccaacccggtctactcgaagacggccacgctccatccccatacgacagcgcctaccacttcgcgagaattcacccatactatgttttcccaccacccttcgtcgcctacgcccagtactcgcaccaggaaaatccccagcaccctccacacgcggcgaagtctccgccgcagccacatccaacgcaacaaaataatccaagccttcatccgagga

SEQ ID NO: 96766 - DNA, 573 bp, Zea Mays
caacataggtggatagcggcgtcagagactcatgtactgacagagtcctgaaccctctatcacctgcatccattaccttgacatgaatgtgagtgatgtagtagcaagcccgaggaggctcatacacttgccttgtctcgtacaggggtcggatgtaggttcccaacgcgtgcaaaacatcctgcagcaggttagggaagtgccctgtctcaaacattgaggtctaatgttcagtgacaggccataaccccacgtagtggtcctgttgttcttcgtttgcttcatcgttgaggttttcctcttcttcttcttcttcctcatcgtcttcatcatcgtcaccagagtcgtttgggtcgtcgcctccaggagcaggggcttggactgctggtgctggcaatgctgaagctgacgatccagctgtgaaggctagtgattctaccaatggggtgggcataggcagaaactcctccgagttgtcctccagaatgactccattctccacccgaatgtgagggagatccacagggatttcctcgactaccactgggtagacaggaacttgccgtggcggag

SEQ ID NO: 96767 - DNA, 692 bp, Zea Mays
atttgtgagctgggttccacaattggtgctgtggaagaagtggatattctatccttagataccaaggacattgtgagattcaaagtgcatgttaaaagtgttgcaatgattcccccaattattgaagtaggtgtcaaaccattcttatatgacatattttaaaattgacaatatcactgatgagggatggaatgacgattccataaatcttggtaagagagcttctgttgatagataggttttctgtgatccttcatttgaaaaatcttgaaaaaaagccagaaatattggtgaaaaatctgtgatggaagatctgaggcctgcaaacattgaggctcctctatctcaaggtaaagagtctgggcgccattctgagatgacagagggtatggatgttgagaaaaatattgaagatgataaagggtatattgataatccgagtaatgatgaagatgacttaaatgaaaatgaagatgatctattgtgttcccaagatctagaggagtttgctaaagatgaagacttagttttatccacccttcaagagaaagaaaacatgaatctagttgaacttcaaactgaagatgcttctaaagatattggggacaagaaaggtgtaactatggaaggggaccatgttgaaggaatcagaaggagtagcaggctggaatctaatgacgagatgaagattg

SEQ ID NO: 96768 - DNA, 469 bp, Zea Mays
ggcgggtgcacgggtgggcatggcgtcatggtcgaacgccgcggtggcctcggtggcttccaggaatggcttgcgaggagtgagaatggggtgggaggttgaagataagcacggaccgtccgattggtgacgagcaccttagattagacaatgctaccccttcgcatggatgaagcttagaccgttgaattttgatcctagggttgaaaataaatcctgcttcataaagatctggccctcgatctatgaatgaacggctcggtttgatgcgttcctaccggtgcgcgtcagccattggatctgaatctgtgggttaggaattgtccgggcttcataaaatctggggcgcaaattgataatccaacggtctttgtggcgtaccggttcggtagagataggattaaatcgtgtccgtccaaggctaatcggacagctgcgatagtacgataccccttcgccgagaaattat

SEQ ID NO: 96769 - DNA, 614 bp, Zea Mays
ggcagatctggctcttgtggtgggctcagggttttcggttgctctgccgacttccttaattctggatcttcggttgttttctccttagcttcggcagaacgcttcggcacttcggctgtctcggttttctcctgttccgctattaccatcggttttggcacttcggccgattctcccttggcttcaacaagagtggggtagtctggctcaaccgcagaagaaggcccttcagcaagtttcggcactttggccgtttcaatatacctggccggtgcgttaaaactttaaccttttttccctttggcgtggtagagatagccgaagcaacagcctttcttttctttccctgcttttgcgagggatagcaatagtctaggtacacaaaaccaattacatcaaaaactctgtttaatcttttcttgccttgccctccgaaagccactatcatggcatcatcctcggccctcgtgtaggcaccaagcaactcgttgctagttgcctcaatgcaatctagccagtcatcatttggctcatcaaattaatttctgtacctgaaggtgtacttcaggtaaattaaaccatcctggctggatctagaagcagcttcgttcgtc

SEQ ID NO: 96770 - DNA, 308 bp, Zea Mays
aagatcttcacataaccctgagagagccaagcactaattcccttttatttccttaattctttttcttttcacttaccctcacccttacacagatgacttctcacgaatcctcggatggagggaacacacattcccacacggacggatttgcgcgagagggttttccccgcattttgtgggaggtgatgtagggagccggttatacgacgcctcctcaatatgcggtgcagttgttcgaggagcaccgggtaccccgctgtagggtgaggatgaccttgaaacctcatcccttgcagccgggctggcgt

SEQ ID NO: 96771 - DNA, 342 bp, Zea Mays
gcaacagcgagctgatcagcagcagttgcagagagaggcacgacacagagagcagtatggcacggcgagagaacggagtggacgggtactgctcaagggacctgagctcgcgatttatagagaggggaagagagatggaggggcgctaggagagagaagggcgcgacagcgtcttcaagtaccatcaatggcgatgttaccagagataataatgggggaggagaagaaacggtagtaacggcagccacgacttcgacgacttcaatggggcgtggagcgcatggctgctcggcgtcgcgcgggtgtaaatgggcccctagttgggccttagggttagtttag

SEQ ID NO: 96772 - DNA, 393 bp, Zea Mays
gtaataacaaagttttggcaggtgaaatcaagtaggatttgtcagtatacatctagaagcagggcatatcatgagatcgacatacctctacggctctacgaaaagttggccatggccactcaaccttatgttttccaaggccgtacggaaaatgttatatgtctctgagcaatgattttaaaggcgtccagattagctatgcgggtgcatagtgtttgccttgctgtcctaggcgcccgctattcttgtttaggcatgcaggccttggcaaagagctgtggacagtcaccttattcgtgaaagagccttgcacgtgcaagaaaagagtggccttgcactcaagtgggaagaaaatcactcccatgcagtacattctgccttctgcgtggggag

SEQ ID NO: 96773 - DNA, 349 bp, Zea Mays
tgagacatgtctgctgaaggaaagaggtctaactgccgaagctgtggttgctgacttcgttttcaagaatattcagcctttgaaagatagggcgtgtccagcttacttgtatagtggtattactgattccactcgggttaccgacaagaaaattcctactgaggatgtggtgagacgaatagacatgatcctgaggggcaaggtatcaaatgttggtgctcctgttgcttattctgcttggaatctgccacctcctaggtcattttttgatttcgtgtctaaccctcctgccagtgatagtggtctgggtcttagagtgcgaccctctcctgaagacattgaggctctg

SEQ ID NO: 96774 - DNA, 338 bp, Zea Mays
cctggaatggttgtctaatttgtataataattaaacacttggaatctttcctggtttggttctgggttaactgaacaggccctaactagactacaaaccaaacctaaatgatcggaaacgggccatgttcagtttgaacttgaactcaaggaatcagacacggagtaaatctgatgtcctaaattgattaacagaaatccagaagcacagaaagaactagcatgcatcatgaattttatcagtttatagctaaccactccgagaggactacttccagtggccaaattaagtaaatactctattttcaatgacgaatcaaacatccaccataatagaaa

SEQ ID NO: 96775 - DNA, 1719 bp, Zea Mays
caaagagaaaggtaacgaggttacaaagttaaactgggttttacaaataatattggcttttatgtaagtgtaaaaccaaaatgtcttacctgaagaactatgggtaacaattcaggaggtttcttgtccttagagccatgatcaagccaaacttcgaaagccatcaattgttccataaaaaaaggacttggctggtttgaaggagataaagaaattagcaaaacaatacaaagaaaaactattgatatttcttgaaatgctcaatgatgattgatgagtagaaaacctgaaactctgtgtttggatcagcaattaactgaggaagcttggaaaggcaaatctcagcagccatgtcccatgcatccctgggatttagcaagttacaaaatgtacaaaaagtagttgaagcaaaaagaaggacgagtcaggttagttaccacatatggtgttgatgtgttgggggtaacaacggataagaaactggagaacagtttgcagatcgcatgattctctcagcaagcaagaagttacggaagagaccggcaacaagaaggtcctgcctgaaaagcctttggaacagatctgcacagtgaaacatgtatcataaaccaaatataggctaacatttattttgaaatttaataatcttctctagttttcttgttccccaaaaacattatttctctcataaacaatgtaccacgtggaagaacattccatgcgatagtatctgttatagcagtaaaaatccaattgagctctccaagaagtgttttacggtcattttgccttccaggaatttggtcaataagagaacgatccagaggaccatggagtgatgttcgcttacaaaacctgcatggtttataggcatgtactagtgtaagcacaacatgctaagaaaaggagagaaggaacagtacacacacaaaaaagaaggggggagaaagaaccagtgcaaagccattttgatgggcgttgtgaggcaagccgtaaacacatcagcaggaaattctgcactctggggaagcgtctgatgtgcttcacaggcagcaagaagaatgaaatccttctgcgaagatgccgaggaggtagaactccagtctaggcgctgaaataaacaagtcactatgaatactacacagtccaagaacaaaatcatatgaccttcaacttcaagcacaagagaaacaaatgttcatttgaaacatgtatcatacctctagaaaggctttcacaataattccagcagctgagcaatcaaaaacataaatggaaggtgtcttcagccatgaatcaagatcagtaattgaaagtgggatatactgtgtgtaactctgcaacaaaatgcaaaaaaaacaaccattttatcagagacaactatcataaataatgcatgcggcaagtattacagtgtcttcataatgttaccttgttaaacacccaaatctcaccatttgatgtaggctttggtacaccatggccattataatggaaaaggactctctcttctctggcatatttgcggcaagtattagaaagcttcttaacttcctccactgttggatccagctgaagcttgtatcgagccttcaagtgtcattaggtataaaacatgaagatgcaaataatcctcaccaaaataacattgaagttaaacagggaagaagttctttaccttaggttgcaagcgctcatactgggaatgcaatgtttttc

SEQ ID NO: 96776 - DNA, 863 bp, Zea Mays
gcacactcttctttctcagacgctgccaaacgatcgtcttctccttctcttctttactaaaggtggagcatctgacagcttgatggcctagcctgaggcatttgaagcaccgagtagggcggcggcaggttggggcgtgatttagatcacgtggtgccatgagttccacgtcgatctagaagtctggccgagctgcaccttctgctcctaggagagtggagctgcttgggctaggaggtcccaaaacctctcctggtagtcatccactgttgtgcggaagggtaggcgtgctagttcgatgagaggattgctgcgtagctgccgcccaaagcggagttggcattgctgcttgaagagcccccacgacaaggttcatcgtgctgaagcttggtgtaccatgttcgggcaatccctatcatgtgcgctgaccttcaaagaattgttcacatcgattgagccattggagggagtcttccttgtcatcaaataaggcaaatttgaggcgatggaagtgaggaactcctgcagttgaaggatgggggtgacactgatatatggttggggaggtggtggataatatggaatgggtgaaggtgaatgtggcatgggtagatgatggattgggaactgggtgctgatggctggtggcatgatggaggtgtaggcagcgacaaatgatgaggagatgggtggtgggatgggcacatcggttggcatcgaggtggggggtatgcctccataccctggcaagccataggagcagcttgccggaagggacgatgtcgatgatgcaggcggagtctccactgctgcaatgggtgaggacatggaggacatctgcgttgggaaagccccaagttggc

SEQ ID NO: 96777 - DNA, 538 bp, Zea Mays
gtcgcctggaagagggcgattacgtggacgacgcgattaggatttcaagtcgtcctagtcgtccgactaatcgtcgacctgggcgattagtcgtccggtcgaacgcttgctggtcgtttttgtcgtcgcaattttggtattgggcttcactctagtttttggcccatctacagtagcccgcccctccagcagtaaatcagtcaccacaaacccgccagaaaccctcccagccgccagtaaaccctaattctctcctctgtcctctctggtttttgccgacgtctctgctccaagtgctccagccgtccaacgtctgccatcggcgtccagtactacagtgctccgatgtttgtcacctagtcaagaattgaagatgagctcgtcatctgaaggtagcacctgctctcccttctctgattatctcccggtctcccttccctctattaccactggtagctcgtcatctgaaggtgcacctgcagacctctgtttgagcagtctatattattgcagaaattactgctagtctgctactaat

SEQ ID NO: 96778 - DNA, 775 bp, Zea Mays
atcaggggcacaccagaacgctaaaatgggagggcagaggatatgagcagccctgaagcacgctggccacggtgaggtcaacccgagtggaattcttgagtgatttgggggaagtaaggaattggagctctctggtggacgattggaggcaagacttggtggcttggtgcgtgattaccctaaagacccgacggtgcgctcaatttatagagtccgtgagcggtggccggtgaatttgacgatgacgcgcggcggccggaaagataagaagttactggcgcacgcgattagtgtcctattaccgtggcaagctccccggtgatgaatggagggttacaatgagtcacgacgatgtggtggatgtgccaaggcacgtggcgcaaggccataaggcggctatcaccggcgaactcatctgaatccgtcgtggctaactcggtacggtggtcggagtaatttagtggccggaatatatccatggcgatgatatttactcaaccccaagcgctatccaaccgatccgagcacgaatcaaggcggcgaaggcacgaatccgtgtgcggctcatcggcggcgagggactgagctggcggcctgatccagtcactgtaccatcgcgaagtgcattcagtcggtctgacagagcagattcaaggcagcttttctccaaatttagcatgataacttcatcatccttctgcaccaaagttgtagacctatcaaccatctctactttttctataacagttctagccaaattcccactaaatctaac

SEQ ID NO: 96779 - DNA, 548 bp, Zea Mays
gtttgttatcagtggcttggaaaaaaggattgatgaacttgaaaatttgttgaaggaaaaggacagcctactcaattccaccgaaggctctcttgctgaagctcgggctcagaatgaaagattaagcaaagagctaaaggaagctcaaacacttttggaagaaaactcaaatcggttcagccgtgagtctgaagctttgaatatgacaattaaggttgaagctgaaaagaatcttaaaatgagtgaaacacttaaagctcttcggaataaatgctttagctttgcaactcaatgtacttctcggctaaaaagtatcttcaattctatcggagccatgtctaaagaagccaatctttctactgaggatatccccgaagcacttggatatattaagaaagaaattgatgttcttcacaaagttataattggtcatggtgatttttgtgcgctagtggcttctcgtggaacagctgctgcttttgtcaaggctgggtgcaatcacgtaataactcttaatagacaaaactttagcctctcatcgtccgact

SEQ ID NO: 96780 - DNA, 590 bp, Zea Mays
gaatgattgaatacagtaattcagtcagccaggtaccagcaaactctaaggcactatcatgataagaccatacgacattgatccttcgcagtgggagatctggtcctccaccgaattctaacgggggaaggacgtcacaaattgtcgccgttatgggaggggccattcatggtagcagaagtcacttggccagaatcatatcgacttactcaaatggatggcacggaaatagggaattcatggaatatagagcatctcaggaagttttacccctagctagattccaaaagctatcggggcagcattgtattctgtaattggaaaagtacgtcatcaataaaaagacttcgttctcaaaaagctctcgaaatatttattatcgatctgcatgcttactcaacttagggtgactactataccctactaacggagcaatcggcttaagtcgacagtgacttaagacggtgcgacatgctcacgcttacttaacttaggttgaccactataccctactaacggagcaatcgacttaagtcggcagtgacttaagacggtgtgacatgctcacacttacttaacttagggtgacc

SEQ ID NO: 96781 - DNA, 359 bp, Zea Mays
gcatgcgcgagtgagtgtggataaccatcagggatgaaaagatcgtcgagggggtgaacttgagccctatgcaccgtacccacttgcccggtgacgtggccgagcggccatcgccgtggtggccgccatctatctcggttacgccacgcgatagactgattcaccacgatgctgggagtcatggcgtgtagatagttactgcccaaggccgttgtttcaccatatgccatgacaggtaggcctcggtagaaatatctcgccgccgctgtgaactcaacctcgtctaaattcgtgacactagaggccgattagtataaattgagtactctccttgctccgcccttctgttaggaacccag

SEQ ID NO: 96782 - DNA, 693 bp, Zea Mays
ttcctcaaatagtgccttcagggcacgtaagcagacaatggagaaacatctgagtttgcttctcttactgcacatatagctagctgaaagaacttcctaatctttaaaacaaatccatgaaaatacataaccctcctaaaacccttgatccatccttaaaagggaaggttggttacaggttgccaataatgaattgagcaaatcggtaactcctggggcacgaaattacatgttctaaattctcaggcctttcaacgacacagcactcacaggctaccttagcatgggaagatgttcgggtcaagcatttataatgcaacataaaaccaacaccaaatcctaggatctagacaatccattctccagaatgcccgtgcctattgtcaatacggttctcccacagcaaaggcacctaatccaggttactattcaaccaaacccagtgtgcgtattttttctcaaggggttaaaactgactgggtacatcccatattctgtaaacactaaaatctcccgaagcaaccaagcgtctcgcattgctaggtgcaaaccaaaacgagaaatcatccacagttccacaccagtatccacatacaccaagatctacacgcacgatccaccgcacaacagagcactgcatgcaaggcctccaaacaacagagactatcacgtttcacatcagcataaagcaag

SEQ ID NO: 96783 - DNA, 928 bp, Zea Mays
atgcacatgtcatgaagataacgcagttttagttatctttggacacacaagtcgtgtgcatgtgatttggcaaggaggctctatacatacatttctcttataacaaagccggttcaaaacgacgcatgcggggctatccacgtcatagttaaattgtgcaccgttggattacaaagcaagggctcatgttgcttctgctgtagcagctcgttgatttggtcaaaaataaagggggcggccaaaaggaatggcggctgctttctagagaaatctaccggccacttccctagtcctccttcccttgcttctcgcttcttctcccaactgtggcgctcatcgctttcttcctttctagatcaacacatgcgcttcatctgttgccgggatcctactcggctcctttttttggtgagatagaggttttgcttatccctttctctctgtgttcattcgatttcgtcgacattaggttcctcgttgactccgccttcgtacagaagtttcctctcagtcggcttcctcctcgtctctagttgtttgctcagatatgatttttttatctttcgttgttcgtttcgattcggtggacatctatctgtttctagatccatgctttcaatcacgctcagcatgcttttactgagattttcttgtacctgcgaacctcatgattttttggatagattgagtttcgaaaaggccactgttttacttagctcattaactaatgtctctgttcttcagtaatttctcccaatgtttagggtttttggtttgtgtgctccattacggttcgaaaggacaattttttactttgtgcaatgatcgaacatcacttatcctcaatttcccccaaaattttagggtttaggcttctctctaattttggattctagatctaatccaagatttttctcctccattttag

SEQ ID NO: 96784 - DNA, 788 bp, Zea Mays
gcttttaatgccttgaaacaagcgctgatcaacgcaccggtgctcgctctacctgacttctctcaacaatttgagattgaaaccgatgctagcgataagggcatcggagcagttttacatcaagcaggtcaccccatcgcgtttgtcagcaaggccttgggcccttgtcatcaagccttgtcaacttatgagaaggaatgtttggcaatcctgatggcagtggaacactggagatcttacatcatctgcagtgaatttatcattcgcacggaccagcgcagcttaattcatctagatgaccaacgtttgacgaccccgtggcaacaaaaagctttgactaaattactcggtctgcgatataagatctgctataaacagggacacacaaaccgggtggctgatgctctatcgcgtcttcctggtgatcatttatattccatcacaacggtgcaacctacctggctgttgactgtcgcagattcttactcgagccactctgatactgctcctcttctgaaaatgcttgcagcccagactccttcagctcagtacagattgcaaaatgggttgatttggttcaaagacagagtggtgctgccggctcaatcagaatttccgaagaaaatattttcctcattccatgacacccctattggaggacattcaggatttttggtaacataccagaagattaaaagaatgtttagatggacaggtatgaaacagatgatcaaagactggtgtaatcactgtgcagtctgtcaacaagcaaaggttgaacgagtaaa

SEQ ID NO: 96785 - DNA, 1103 bp, Zea Mays
agaagcaaatgagcaagatctttacagcagaattgtagctggttttagggctacaattttgttacagagagattaacacattctcacacaaaaatctgagattagggcgctgcaaaccgtgttgtcaggtgctctgaatgactccctgatggtacaataacagaaatatccctgggttcagtcaccctcgccgccggtgatccgcgcgcccggattcgcgccggttgccgtgattcgtgcctggcacgcagtggatatccacggggaggtaaaagatcttgcaggggagcagatgtggtcgcgggggaggcttatcaccacgcttgtagctgttgcgacgtggcaggaccaccgatattgccgtggaaactccggtgacctcggttgtgccacgtcgtggctagttactgtgcggtagtaaccgtagcacacttaagagtacaacctttgaaccattgcgctggtgaacgccacgaatcctttgcgccagtgcacttctccctctccggctgccgtgcgtctcctccaaattagccgccaccgctcatgaatcctataaattgagtgtgccatcagctccgctaggtagttgtgcatccagtgtgtgagctcttatcattccctacagctccccaatttgagacttcccccaaatcggtcgagaacaccgcgtgtgtgagctcgtcatggtcagcgctccacaggtccgatcatgttctcctcgctcttgttctagcattcctgtgtgctcttgaagctcatcggcccaaccaattgcactgaatcggagtagatcgacgggaacactttgaattgtccccggattgcacggtcaccgtggacagcgtaattaggcgttagagtcttgcaattgagtgaggggaaatggtcgtcatgggttgaatttggtgtcaagaaaagggaagggctggtcgttgtctattccggccagtacgagctcgccggagctcggcctgtcaccgtccaccgtcggggatctcgagttgtaaagaatagaaaggggaggggtcttactcgagatgtcagtgagaaaaagatacagtagggaggagcctttacgagttgttcgaacaaccaacgaa

SEQ ID NO: 96786 - DNA, 581 bp, Zea Mays
gcgagtttggagatgcgtcgtgggaggaaaaccgagtacctcgacatcccactcaaggacagcatcaaaggatggcgcttggaatggtttatcgtggagaatcatgggaattcccttccccctcggtcagggagacagccagatgttcgcactccaagttggactgaatcccccatagacctggaggtggctgaggccgaggctctgcttgccgaggttggattgttgaaggagaagggtctgactgccgaggctgtggtcgccgattttgtttttaagaacatttagccactgaaagacagagcgtacccaacttatctgtatcgtggcctcgctgattcgacctgggttaccaacagaaggattcctgttgtggatctggtaagccggcttgagatgatactcagaggcaaggtgtcgaatatcggtgctcctgttgcatattcagcctggaatctgcctccttccaaggctttcatcagtttcgtgtcaaatcctcctgatggtgacagtggcttgggccttagagtgcgaccttctcccgaagaggttgaggctttggttgcttcacttggtgaaat

SEQ ID NO: 96787 - DNA, 567 bp, Zea Mays
gaaaagtgtaattgttttatgcatgtggtcggtgattgggatagtcgaggcgaatggggagtatgattagtcctgttggagtcactatgctgttgatgccttgtgcgtaaagtggggacacatatgtgtgtgtgccatggtgtattagagtagtggtggcgtaagatatttgtttgaggtgtgcgggtatatgccgtatgatggttatactcgcggtgaggaaagatgtatgtattgtgtaacacgacgcttaggtcgctattatataatcgtgtgaaggatgctcaggatggtcgtgtaattgaggagtgatgtaatggcaagcgagaagtaagttaagtttttcaaacggttagtggatagtgtccgttggtgttgtcatgattttagttgtatggcaatgtgatgcttgctttgtcaaatattgcattccattcccattgaataaataaatgccttgatgatcgattagaggtcttatatgagcgttatcgcagcccaataattattggaagcgagtagcgttcataagtcgatccttgttaaaattgaagaacaatccgataa

SEQ ID NO: 96788 - DNA, 485 bp, Zea Mays
gcaacctatatatttgttcaccgtgggattgatcaaaagggcaccgcgctaatcagcttgatttttcaaacacctcctgccaacgttccttctattggtcaacaagaagctagcgagaggtcttgggatttattttatatattgcatctgctattattgcagcacgcaagcacatgctaacaagaaggccctgctactttttttttgtagtttgcagattcggtgacacgctgccataagctagcaaaaaggtctgacagcttctctgattatatctgcagatctcacacataaactaacggggatctgaatattggctacatacttccgaatcttcaactatttctgttgcctctttttagctttcttgccaagttgacaattcagagacttaatgccatgccgctgaggggtcgatcacgccgccaaggtgacttcccgcagaatatgaatactattcatgctcgaccatccttccctcactc

SEQ ID NO: 96789 - DNA, 672 bp, Zea Mays
aactcataatttaatacaaatagaaatgttattgatgtttgactagtgattgattgacagaacaataacataaaacaaatagatatagagaggcaacattctattgttgtttggttgctaaatgtgtacatttagctacatccgatgttgtttaagactttagatcacttgtcatttgaaaagagccgatggttacaatggtcaattgtgctataatttgtcacctaaatacacgaggattgagtttatatactaatgcatattaggcccgtaccatatttgtcaaatacggaataaatacgagttcaatccggaaaaaacgggatcccgcaaaaaccgacggaataagccctcttccgtttccatatttttccgtaaatacggaaatgatcgggtcaaatgtagaaaacggtacgggtcgagacggggttttttcggtccgttttcaaccctagcagcagcagaggtagattctcgaaacaggaatttagttacaagtttgataacctccttctcccaggtttccactacttacaagcacacttgccacaaggacacaactcacgccaaactactgcacccgatattcactgcctctgcctccttatccaacaaggagtgctatatggttctgttctctaaatttagcggacatcgaacatttttttccat

SEQ ID NO: 96790 - DNA, 435 bp, Zea Mays
aactgtatgagatgatctaatctcatccactagtcacgcatccgacgacccaaactacccccaatgaaccgttatatcatgttttaatcctggtcattcatagatatattaatagctactggcaccccacccatctccctgcctttccccaccaccatagggtggcgcctccatgccgtacgacggagggcataccagcgacgtgttgtccggcacattggtgccctgctagccaatccagagggtcatatgagctactcgagacacgacgaaccagatgagtgcatccttacctccaacgtttgcggagtctgcaccgtccatgacgtggtgtagatgcctggcggagggttggctccgacgagaaattcagccatccctaagggtcctcccccgcattagagccacgacctcgctctccaaatcttagcgaac

SEQ ID NO: 96791 - DNA, 403 bp, Zea Mays
ttcgtctcttcaactatcacatcaatgttgaggcatgtgggagcatcagggctgttaaatacctgttcaagtacatatacaaaggccatgatcgtgcgtctgttgttatgagagatgcgagcaaggcacatgatgatgtagatgagatcaagcagtacagagatgcaaggtgggtgactcctccagaagccttatggaggatatacgactttgagcttagtcagatatctccacctatgatgcaactgcaactccatcttccaaacatgcacatggtggcgtttcacaagcggcaaatggtcgagcgagtcatcaatcgtcaaggtgttgataggtcaatgctcacagcatattttgaggcgaataggctacatgaggaggctcgtggcatcctgtatcgtga

SEQ ID NO: 96792 - DNA, 1009 bp, Zea Mays
gacaagctgaattctctcaaggcttattggcatgctcgtggattgtgtgacaagtgcgcggagaaatgggctcccgggcatcgctgttcacctacagtggtgcaattacatgtgctggaagagatatggcaactcttcgacaatgcttctgaatcacccccagtagagcctgacaccacacctccagaagaattgctcaccatttctctgtcagcgatgtccaagcagtctggtcaacgtactcttcagcttccaggtgaatgccagggacaactgatccttattctgctcgactctggtagctcccatttctttgtgagcacctccaggccgcacacactatcaggcgtctcttccttgcctacgcaagtctcggttcatgtagctgatggtggaattgtgacctgcacctaggttttcagagcaacccagtggtcagtccaaggtttcgtgttcatttcggactttagagtattcccactcaaaacatatgacatagtgcttggtatggactggctcgagcagtttagcccgatgaaaatccattggtcaaagaagtggttatcgatcccttaccagggccaaacagttgtgttgcagggtaacacttcttctatggacaacaaacatttgctgcatgtggtatacttgttacatttagccggcgagaccagtactgtacctcagttggatccccgcatagccacagttttgcaacagttcaaatcagtctttgatgaacctacaatgttgcctccttccagatcttatgaccacatcattccactggttctgagcgcccaacctgtttttattcggccatatagatatgcaccagctgttaaagatgagatagagcgtcaggtttcagaaatgctggcttccggcatcattcaacatagttcaagccccttttccatcccagtgctattggttcgcaagaaggatcagtcttggcgcttttgtgtcgattttagacacctaaacgctctcacggtgaagaggaaat

SEQ ID NO: 96793 - DNA, 334 bp, Zea Mays
ggaatacctagtaatgtaccaagaattgactcacatatatttttttcgatgtgcatcacatcaaggttatgtcgcagcttcaaacctgtccagtaaggcaaatcccacaaacacgaccttttcttccaacattgtccatcatttgcatcccgctttctcttcttgttttgaggatgctttcctggtctaacatccttgacactgtccaactgctgcttcaattcaacctcactaaatgcctctggattgtcacggttttcaactttcccatcaaagtctttcttttttctccatggatgatccttttcaaggaatcgtcgatgcccaatatagc

SEQ ID NO: 96794 - DNA, 592 bp, Zea Mays
attaatgccattgtggccatcatttcacaagatcattacactcattaaaaagatctaaatcattcatttatgcaagcctcaaaccattacataacaacaacaacaataataataatattttttctagtctacatctatcaacttattacaataactatcatgccaacctaaagaagcttggtaatggatccgagggttccataatgaagcctcttatgaggaggagacacaagagtgaatggtacttcttcatctttaagagggttcatccttcgagttgtgcttcaaactctacgatccttatgccagtttcttgtagttcttcatgcttcttggatatatctagggtagtgctatctaggttagagttgagtctcgcagccacacacacacaagcatgttgagacggtcctcaccatcctcgcctcaccaagctcgtccgatccgtgccacggggatgtcggggatgatgatgaaactccatggtactcatctaatacgatgtgtgtggtagagcaagcatagtgccctcctagtaccattgctgatagaagcagaataggtggagagtgacatcgatgaatcatgagtg

SEQ ID NO: 96795 - DNA, 321 bp, Zea Mays
ttggctcttcgaccgtatcatccttagcttcggctggcccaactgtaggcaccttcagcattacaatagactcttcagcgctctgcacgatggaagcagtttgttttgcttcagcagttgaagaggtcccttcgccaaattcaggcactatggccggttcaatatatcgcggtcggtgggtcagaaccttcattttcttgcccttcagcatagcagtggtggccgaagcgataatttttctctttttcccttgccttcgcagcgggtagtgatagtcagggtatacgaagccgattgcatcaaataccctgttcaatcttt

SEQ ID NO: 96796 - DNA, 373 bp, Zea Mays
ctattgaaataatgtgtggtgaatgcgatggttcaagtggtcttgtgagagacccatcccacatgtgttgaataaacaatgttccgctatgtaatatatctggcaaatggcatgaattaaaacatgcagttaataggattctgaagatccatcatgagatcctatgcagattcatatcttttatttataaatatgcaacatataaatctcatactgaataatatattcctgatgaatgatcactctcctatgtagggagaatatctcctagttgagattataattcccagatggagtctttccagaagaaacaaagtctgtgttgaacactaaagtttgataacccctataaagggataaagacccatacata

SEQ ID NO: 96797 - DNA, 738 bp, Zea Mays
gttactgtgccaggttggcgtggtggtcccatatccataaccataataagggcatgcccgcacataggtgactagaggagtcaagaggttctcggttgatgatatcatcaaagaaacaccatgctcgctcatggcctcccgtgacagacatatgaagaaacagattgaggtggacatgggaatggcaatcctaggccacgtatacgagaacaatcctatcccatatattgcagggtttcgatgacatgggtccacccaaatcatctaaaggatgacttcgccatgcctactctaggtgggatcacattacaaggagtggctagcaacaaggaagtactttggacttaaagcgacatcatcttggagaagacaccacaaccctcgccatttaacatcgaccacaacgacgacgataatgacactgacaatcttctgttcgagagcaatccatacgaagatacacaaccaccaccatccaccacactcacacatatatggagatactagcagagtttttgactcttcagtcgcacagcaaaattttatcaccggttgaatggcccatttcggatgattgccacgaaaacaatgagaacgacaagtatgttgaccttgggcaagcttgtagaggacctgtgagatataatgttccaatagatgattttgacctattatatactattattttcgttctcgaatatttgtcgtttgctagtttaattttgaactaaaagaaat

SEQ ID NO: 96798 - DNA, 709 bp, Zea Mays
ttcgggtgagaccggctaacctttccgctcctcttgtgctgctcattgtataacgcgcgttgggatctagggtcgggctaccgggtgtcggtggtggaagctcaccagacgttggcatggcgccaccgtgggaagaaaagccccgacgccgtcactgttgatcggagatgaccgggggtccgtctgccattggatggtgaacggatggacgggattaaaaagggagaataccggtttaggtttttagatccgagccgttgattccgtagcgtgtgcatcggattagatctggcttatttgaaatagtgaccgtagatcgggggatcaacggtgttcggtggaagcggatcgagtaactatcggttttgatctgggcccttggtttctaatccaacggctcagagagaaccgtaccccttcggctagagcaatttgcaaaagagaccccacaatcttaggtaatcaacccgccatccatcgccagtgccctgagtcttgagaattctttcaccgtgaaccctgacttttctggaaatcgaggcccagtcctgagaagattaaaaacagggaaataattatagaaattcgtttttaataaaaaaacaaatctagaaacttgtaaaatgaatagaaaactcattttagctccaaattgaacctttccaatttctaaaattttgtaataatattctttatcatttagtgtctc

SEQ ID NO: 96799 - DNA, 319 bp, Zea Mays
cctcatagcttgggatttcttaacgaagctctctctgttgtggccttcttccttgctcatcttgcgtgatatggcgcatctctttggtagcttcatcaatcttcttctgaagttcagctagccgaagcatcttgtctctctttctctccacttgttggtggatggcctctaggtctctgatctcttggtctagctcctcttcttgtgatgttgggctgatgaccttccttttctggtttcgagcttctctcagagggatcccttcttggttgatgtctagcggtgtgagggcatcccctgacgctattgtcttctttgg

SEQ ID NO: 96800 - DNA, 603 bp, Zea Mays
ttcgtggcaacaccaccacaaaatgacaatggcagggggacaacgagtccgcccaacaaggaggaagaatatcaacgccaaccaggcacgcatccttgcccgcgagactgctcttcggcagcagcaaggagagcttgacacccatgttcgtaagctcgatcgagtttatggcgacattgagcataaatgcctcggggccgaacgacctagggcaaagaagatttatgattagcttgccaagagtagtgacggggcacaatacttcctcaaccctggtggctacaaccatgatgcttcggtccatccccgagcctaacgaactagaggcgaaggcgatataccgaaacctctgcaacctagtggagaaggctacggtatagcaggctgagatcgatcggcaagctcccatcggcgcggatagctacaacacgcgcacgacctcgtcttagagcagggggcacaaccctcccagtccgcaaaatatagcatccccgcgaagaaccatatcggggagatccgcaacgctcgacacctcctcaacaaccaccgctggaagtaggaggaggttgagcaggcccacgagcgaagccctatccctcccgg

SEQ ID NO: 96801 - DNA, 422 bp, Zea Mays
atgtactcgaataagagcgactgaatacggtgattcaatcagcacggtatcagcaaactctgaggcgctatcatgataaggccatacggcatcgatccttcgcagtgggagatctcgtcctccgccgaattctaacgggggagggacggcacaaattgtcacctctatgggaaggaccattcatagtacaagaagtcactcggccgggatcatatcgtctcactcagatggacggcacggaaattgggaactcatggaacatagaacacctcaggaaattttacccctagctatatctcaaaggctgccgggatgccaatgaactctgtaagctgagaaatgtatcatcaataaaaagacttcaaaggcactcgaattctttaactgtcaatctgtgtactcgcctagctcggggtgaccac

SEQ ID NO: 96802 - DNA, 552 bp, Zea Mays
ttgagcgtcgacgtggttcactcgtgccctgccatgaaactgggtcttgcttagctggctgttggaggagggtgccttaggggcgggtgctggagcattcttggggccattcaccgagttggagtaggtaggcacggatgtcttcaactgagggcaattattcttgtagtgactggggtctccgcagtgccaacaagcattggctggaggttggttgcttgcaatagatggggcatggagggaactttgacccggctggctgaaacgtgtcagagcggaccctgctggcttgttgaagctcggtcctttgggaggaaacccgaaagatcgaactctctggtgcctgtcctgttgctgagctcggaggacttgtatggccttgtttgagaggtacgagaagctgagaaaatcttggctggcgaggatagtcttgagttttggtcttagccccttcaagaaatgggccatcttcttggcttctgtgctgatatcatcaggcgcatagcgagccaattctgtgaacttgtggacgcattcactaacagatctccc

SEQ ID NO: 96803 - DNA, 497 bp, Zea Mays
agaaggggcgtgacatgagtcctcatgaagtgcatttcctcggttactaggaagcagctattagatgagatccacgctagacaatgtggaatacacgcagcatccagaactctggttgggaaagtcttcaggtctggtttctattggccaacaacaaagggagatgcagccgagttagtccagagatgtgaagcttgtcaattcttgtcaaagcaacaacacttactggcacaacagctgcagaccatacctataacatggccattcgcgtgctggggactggacatgattggacccttcaagaaagctcaaggaggctatactcacgtgctggtcgccattgacaaattcaccaaatggatagagtacaagcctattgcttctttaacctcagccaaggtagtggagttcatactgtatataatattcaggtttgggataccaaatagcatcataaccgacctgggatctaacttcactagctctgaattctttga

SEQ ID NO: 96804 - DNA, 348 bp, Zea Mays
aaaaagtcagggaacttacaagggaaaaggcatcccttcaagagagcctcgaaatagcagaaggcgaggaaaccaatacccgtgaggcctacagcaccctaaagatggattacgacaagaaactgaagaagctcacccccacaagaaaaatccacaagaagaccaaaagccaaggatgtcagactgagcaggaggaagcccctccagccctaccccctgccgggataagaaactcgtccgacaccgaggagatgtccctagccagccttgatgaccttctcaaggaatttggggacactttagagaaggagttcgggagtaccctagatagcactcgcgtgtaatgag

SEQ ID NO: 96805 - DNA, 441 bp, Zea Mays
ggactggcgtcctacttcggttgaaaccgaattcaagtcctatccagtgttttccccaagttaatttcaagaacgatgagctaatttggtctggccacggtaaccgcgcggatcggggaagaacacgggcgttcacggcagcccagggtggtctagctcaattaaaggagtcgtacagcttgaggaggacctaaagacgctagaacaatcgaccagagtgtatgaacgaacctagaataatctggccgcggttaggatgattctgcggcggcggagagtcggtttgggggaaattggaaattggggagctgtggggaatgatcggagctacgagcgggttctctggacgcacgattacctagcagaacgggctgaggcttcaatttataggatacttaagcggtggtggccaatttggtcgagcaacgctggcagtcggag

SEQ ID NO: 96806 - DNA, 344 bp, Zea Mays
aattcagttggggaaaagttcagtcagataagatgtgctcaaatctaaggattgaaataagggggatagatttccccactaacctagtagtaatgggtactcaagggatagatgtcatcctagggatgaattggctgcacaaaaaccaagcaactatcagctgtgataagaggacataaggttagtgtccccatccagggaagagatagtaactgaactgatcatgcctgatttagaaggagcctgtcaccatatgtctatagatggtaaagagaccaaccttcttgagttcatcagagttgtgtcggagttgcccgacgtgtttcctgaggagttaccaagca

SEQ ID NO: 96807 - DNA, 432 bp, Zea Mays
atgatggtcatctaaaacgtgaatttaccttacgtgctgtatatttgtggtcaattcatgatttgcctgcttatggtatttggtctggctggtgtgtccacggtcgactgtgttgtcccatatgcatgggggacacacaagcatatcgattggagcatggtaaaaaggtctcattctttgattgtcatcgacggtttcttccatccaatcacccgtttcaaaatgatacgaagtcatttagaagaggcataaaagttaaagatggtccaccaaaacgtttaatgggtgaagatatcctgatacaacatcgtgccctccaaagggctgcagaaggtcatgagtttgaaggctatggtcaagatcacaactggactcatatttcttttctctgggaacttccgtatgcgaaggtattgattttaccacacaaca

SEQ ID NO: 96808 - DNA, 378 bp, Zea Mays
aaagttaggcaataattaaggaagcttatcctcccgggagagttatcttatcccctagaaaatttgtaatatggttaggcacctaagctataaaggtggccttagattgtactaggagaccatcaaagaagttgtacctgtgggtgcggctgcttgatcaccctagcaagtcctacgccatctggtgatctcagctcccagccgccacacagagtaccctattccctgcgttcttctactcaatccaccttgatatcccacccttcgtggtgcactcctccccgctctgcgcatcgcagccgggttcacaacaatttggtatcagattccaaagctgcagcgacatccatgtccggcagcgacgaagatcctgggaag

SEQ ID NO: 96809 - DNA, 505 bp, Zea Mays
ttggagaagttttggataattatgaaatctatcttcatcagctgactcataacgctatcgttaggctcagcatcttcatctgggcccttcgaacccaaggaatggacccaaatgctgaagctttctgcagagtgcatgaattgcaataccaaatgaaggccagagaagacgggctacatgaaaattttggttgttataacttcgcgtatcgcaaggatacgaaggctccggtgctcagctatcataccaagtggccaaccgtctggaagagtgaatggttttatttcaaggccgatgagaagaagagagagaagctaatgcaaatggttatgtgtccgatgactctaaagctttggactgactaggcccctgtgccgcatgacgtcagggtcaccatgccaacaagctgtagcagaattcaaggtggtggctgaacagatcagcactagagatctagtgcaagaatacctggccaacagggtatctccaacgttgagcgaatgga

SEQ ID NO: 96810 - DNA, 658 bp, Zea Mays
ctagttcatggggatgtgtcggctcctgatgtggcaggctagggttactcggctcctgtgggcacggtcgagagtgcttcagcccccgagggtgccactgaagacaacccagccccgagggtactactgaggatggcctagcctcctagggtgctgagcttggctcctccttggctacttccatggacgttttgacggatcatcaccggttcaatctaaggaactagtggtgaccagtcctcctactgctcttgtcggtccagtcactttagaggtcagtgacccggatgctgggaatccgctgcatgctgtcggagctgaagtctctctgagtgttgccttgggcgtgagctctgatcctcctttgggtctcgagtctgctcttaatattgcttctgcctatactccaccattagatagcgcgtcgatgcctccggctttgggatttcccttgttcctttctaaccttcaggtcagctattgccctgtgttacttatgtcggcaaataggctctttagctaacttttgtgtttgcagaatgttctgaactctgtgtcggcccaattgaggtcttgtggtgtacctgttcccgatcaggttttgtccctgctgcagtggaatcctctcttgctccagaagcaaatagatgatctaaaa

SEQ ID NO: 96811 - DNA, 1074 bp, Zea Mays
cactaggtcccatgtgtggttggtcagcaaggcctcataatgctcctccatagcactacgctagtgggggttagcgagcgcattactaacgaaggatgatacatgagagggaggtggagcggtggggccatgagcaccagctagtctataggtcggagaacaccagtcaaccgttgcttgaccattgggtgggcgtggtatgggtcgtggtggatggcgtctagatggtgcaccaacggcttggcatgggaataggttggggcactaggtggctcatcggtagagtgaactagtggacagggacacacatgttgctagtagacattggcaggatcgatgaaatgagccatatgtgtcgagaagtatagggtcgtacgtggcatgatcagaggtgatagggtcatacgtggtacggtcgaaggtgacaggacctcacggggcactgttggactaagagaaagttctgtatgatgttgggagcaacaagtatggtgttgagctacaaggggccaagaaggactaggtcacgtacctaatgaggtgacaggcagagtcgacacattgctgacaatgatggaagaaggaaagatggggttgtagggatggggtaaagagacagtaccttggtcaggagtggtgtggtatgaggcgttgtagctagcaacccaatcggtggaagtagcaggagtgggctacaatgacatgaggtgagaggagagatccaacggagacaccctcccacagagcctctaggatgggtgttagggtcgccactatcgagcaggctcacatcaagtatgggcggtggtgacggcatggcctctatcatcatggagacattatcaacacttcggaacacaatggtcctagagagtggtgggcctcgggagggtggatgaaggctagagggtggtggagctcaacacagtagcagagaactagattcatgtcctgatcaaaggccatgaacgaacgtgccccgaaggaattatgcatcttgaagggatacacgcacatagtacggaggcacgtggaccacagtggagcgaaagataagcgtcgagagagcaggtg

SEQ ID NO: 96812 - DNA, 658 bp, Zea Mays
aggacgtaggcggcgctgctgctggtggtggtggtgtgtagtactgctgctgctcgggcagccgctcagcgaaatggtgatgttgctgttgcatcccggcatgatcttcttcttgctgcctgtacatgtatgctagctcgtcctcagggtcctgaaagggccgccattgcaagaaccaaggattagatcgaagcactcaagctagttttcaggtctcgtgctagttcttagcagtcttaccggatgcaaatgccgccatttgttgagttcatccatcaccccggcccgatatatcttccaaatcactaagaagagagaagagcaagaactacgaatcagcagaaagaaactagcaatattcaaaagaactccttttacgagataaaaaagaactgaacacacctctgtttttttccccttctgttaatatgacttgcttcctcctccaagttcccagttcccactgcttgaagactctttctctcccggtgatgcttttatacaggcctggtggtgtgaattacgggcccctttgctgttctgaagaaggcgttcacgtgctccttgcgttgcgttcctcagaaaaggcaacgacttgctacgctagcaactctttgcacgattgcatggttggatctgcacacgcgttccttttttt

SEQ ID NO: 96813 - DNA, 644 bp, Zea Mays
tttccaggaagatagctgggtaaaattggcttggagagagattagagtatttcggggaattgtattgtttgttctttctttattttctttctttcttcttcttggtacgtcacctatctctttcttaatccttattccttctttagcaagggcggtataggctgtgctacagtacccagctcaggctggtccatcctgggccaacacccataacagtatcacattcgagttttccatgcaagattagtgtagcagggcttccaggaaggctatgagggccttgcatataatcaacgattctgatgggattagtcgtgaagctataatggagtatgctttgcttttcaagcacccacttatccagtctcatgttgatgccttagctgctctttttgggtggtctacaccagaagacttaaagtcctagggcttgttttcatctgttcagttggttccctgttagtttatccaatggatccttctaaaatacttttctgaaatgtgagaggacttaaatcttcggtcagacaagatgttgtgagagttttggttgattctgctaagattgatgttgtttgtcagctttgtctggcaagagagctgctgcatagacttgaaattgctcaggatcacagaccactcac

SEQ ID NO: 96814 - DNA, 319 bp, Zea Mays
cagacgatgattggctcgatgccattgaggcaacaagtgatgaatttctagggagctacacgaaggctgaggatgaggctatgtatactgccttcggtgctcgagggaaacgaaggttgaacagggtctttgatgctattggatttgtttatcctgattaccgcttccctactaggaaaagagggttaaaaagaaagaatgcaccgggggcttcttctgttacaacgaagcaaaagaaggtgaaggttttaacccaccgactgaagtcgtacttcttagagagtgttgcacaactgccaacacagggacttcagaaaca

SEQ ID NO: 96815 - DNA, 296 bp, Zea Mays
aagttcacaaataatgagtgaatcatcaataatcactagataatatttataacccgaaacactaataacaggagaggtccacaaaccatagtgtatgaggtcaaaagtatgcacaacctgatatgagctagggaaaggaagtcgaacatgacgacctagctgacaggtgtggcatagattctcagaggtgcccctagtacaagagatgactagactactacacaacttggacaacacatcagggctaggatcatcgagtcaatgatgccaagtgttggaggtactagaagaagtca

SEQ ID NO: 96816 - DNA, 325 bp, Zea Mays
tgggtttagtaataaatcgaatttcatcaattctaagcacggcaacggcagtgcttctatccaacggccggggatctattcgatttatcaatttgctaatgccgaaaagcttaagttgttatttcatcgtcttgcgctaaaaaggcaccctcctattatgctaaggccagggacggataatggcaaagtggaacagcaatagcgaaagaaggtacagtaacgacgctatccctaagcggatatggcgaatcaaaatagataaatttagatcgttgcgaatttccttctaaggaaagatcctaccaatcacggattcctagcttag

SEQ ID NO: 96817 - DNA, 420 bp, Zea Mays
gttttactaggagattctataagtcatgctggcatatcattaaggacgatatgcttgcggctatcattgccctccatcaaggtaattctcgggggttgtggctgctgaactcagcttatcttactgtcatccccaagaagattgatgccacaacaacggctgattttagacccataagtctcattcatagttttgccaaattggtgaccaagattatggctaaccggttggctcctctcctgccaaggttagtggctgcaaatcaaagtgcttttgtgaggggaaggtctatccacgataactatatgtttgttcagcactcgatcaagtcccttcatcggtggaaggtctctagcctgtttttaaagcttgacattacaaaagctttcgattcagtctcttgggcttttctcttggagg

SEQ ID NO: 96818 - DNA, 327 bp, Zea Mays
cgctgtagagcgtggagatataggaggaaagagaatgctaacgtgacacatgagtgggatatagcaccaactcagcagcagcagccattgcgcaaaaggtggccgagagagagggattggattttctccgcatctcgtatatccatccatcatatcataggggccgccggcatggttggcaataatctcgaaatccttgtggcgacgtgtacagtacagtgccgaatgagttgaaagaagcaatacgtacgtacaacacagtacacgaatcaggcggatgcatgcaatgcaacaactgtgtgtgttgtgcgaataaagacgttgcag

SEQ ID NO: 96819 - DNA, 757 bp, Zea Mays
ggattgctggaccctgcgaacgtgggaggcttgagtctcaaaaattctcccatcctgtcctgtggccttccaccacctgggcgctggttttccagacttctagtgaggacttcaatgagtcgggtttgattggctagaacttgggctaggtctagtggtagatttggaggtgcggggaggtgggtctcactcccttctccgccagcttcttcctcggctctcagagggcaacctgctccaattccggaggcggtaggcgtggttttattcgaagccatctgccatgggaagagagtcactatcatgcacatgccattttttaactagttattttattcattacatcaagccattacataatacagcacaccgctaccataagctcatcacacacgagtgctatctagggtactcccgaactccttctctaaagtgtccccaaattccttgagaagatcatcaaggctggctagggacatctcctcggtgtcggacgagttccttaacccggcagggggtagggttggaggggtttcttccttctgctcagtctgacatccttggtttttggtcttcttgcgtatttttcttgcgggggcgagcttcttcagtttcttgtcatagtccatcttcagggtgcggtaagcctcacaggtattggtctcctcgccttcagctattgcgaggctctcttgaagggatgccttttcccctgaaagttccctgactttttgctccagactttccacccgggagg

SEQ ID NO: 96820 - DNA, 275 bp, Zea Mays
taagaaacagagaagctaccggcttagttggaaagtgggatggtgagctcaacgaatttgtcattgactttcatccactgttcatcaatttagtcccaagcgttggcggatttagtggtgtctggacacgaaatgtgcaagaagaggcaagcatctcaggcaaagccatgtggatagtctactattacgggtcctaggggtccttcggagctggtgctgccacggccatcatttcaccgttgaagttgaagacttcatatggagttaaattggaa

SEQ ID NO: 96821 - DNA, 393 bp, Zea Mays
ataacagtaaatgatctcaacatgagtcagatgacttcatgatcagtacatctcttgcttccgtaattccgcacttggttcatgaaggacttgagtctgttgtacatttcatgtggcccttcgcccctcttcgtggcgaacctcccaagttcaccctcgatgagctccatcttaatgactttggtcattgagttgccttcgtgtgcgatcttcgatgtatcataaatttcttttgcattctccaagtcattaaccttgttgtattcttccctgcatagataggctagcaaaacaatggtagctttggaatttctatgaattaattcttctacttctatagcatcaaaatgatcatcatcactatccgatatttgcattccattttctactaaa

SEQ ID NO: 96822 - DNA, 501 bp, Zea Mays
attttataattttttaagaattttctataaatgtccaagtttggaagaaaaaataaaaggaaaaagaaggaatagtattgggctgaaaccagcccaaaccggcccaccaacaggggaaacccgcgcccgcgcgcgcccgcactgaccatcttgcgtagaggccctcgactttttgaataaccggcaaagaagtcgtggaactattcatgtgtctctctgacatttgcgcaaaacccctcacccttctttctcttcacaactccaagtccccgacggtgaacgacagcgtgcgcgctctccggtgcactcgtaccggccagaatacgcaacaaccagtgtcctaacttggtctacacctaattccacccctggcgatcctaatccatcccttaattaaggtagtccggcccagagttcatctacccacgacggcggcaagacccaagggaaaaccgaggtgttcccgacgactaggtgcggtatagtttaattggaagggtc

SEQ ID NO: 96823 - DNA, 533 bp, Zea Mays
ctcgtacaagataagaaagcctatccagggaaagagaggcaagcatggtgctggcaaggaaaagaaagaaaccacagttaatcccatcaatgctcacagaaagaaaacaagcaaagagaagacacaacacaagccatatggactgcaagatcaaacatgctacaaatgtggcgtgtggggacattggtccaaaatatgccagtcaccaaagcatgtcatagaagcatataaggcaaagaacatacacaaacaaaaacctgaggcgcacttcaccatggcaaccaacaatgaagccatggaagaagaccctacacttgaagcatctggcatgcctcttgatcttgcaggtgctgtgaagatgattgccactgaagagaacatctccacaactctagtggaggctgacaccgatgccttccttgattccatttgagtgcttgcatgcacatttattttttagagttcgaaaaaacataaattatggtctgtaagctctatgagagcattatctttatttcatgaatgttgaactt

SEQ ID NO: 96824 - DNA, 651 bp, Zea Mays
aatagtcattgggggtggcggtggcaactgctgctgagcttcctcctcctagggtgcctactgctcctgctgagcatgtcttccgcctctgcgcctattctcagacatctgtagaaagcacacacacatcagatctgactttacagtctttcaacataagaaaagatatatggaaatcttcatagcactaaacaattgatcatcttcattgactctcaaacacagcttctcagataaataggaaagtggaaataaagggattgccaaactaaataactaactttattaataactacaccaagttgcaggggatacccacaccttaatgacaatcattacaaagatccaacttcattacgagttcatcatgacaagcatcaaaacgtatgataagcaaactaactctaactaagactaactaagactaagacactgaattaagcattattacagactccgactctatcgatctatggctctaaatctatctgggtcctgtagtcaggggtgccgtaatcaaagcgaccatggggcagcaagcagtaagggtgctgaatcccgataggagcgggagaaccaccatcctcatagtggcacgctacacgctcaacacgcaattccgcaaccttcgctcgaaccttgcccaactcg

SEQ ID NO: 96825 - DNA, 563 bp, Zea Mays
cggtgagcgcgccctccggcgaacctgtactggccagaatgcgtagagactgacgccctaatttggttgataccagttcctacccccggtgacctaaagccctccgttaattgcacaaatccgcgccggcgaacactaaggacaaaccgaggtgttcccgatgattgggtgcggtttagctcaattgatcgggtcgacaagcatgccaagtgtgcctgagtgctaaaacaagggtgcggagggcgagaacggacctggagacggtggtccacggcgcggtggctcacggtggcgcggagaaccgaattgggggaagaaaggaattagggcgctatggtggctaatcggaagcaagggctggtgctctggcttcgttacaacctagcggagctcactggggtagcaatttatagactccatcggtggtggtgtccaatttgaagaaggcgcgcttgtggccagagagagaggaagtgcactggcgtgggttgtcgtggctttcaccgtggcaaagcctctggcgatggatggacttactactatggttcactgcgacgtgttaa

SEQ ID NO: 96826 - DNA, 485 bp, Zea Mays
taaaggcgaggctaatgacaataaatgagtggtattgagctactctactttaaataaatgagcatgggctatcaagttaactctgttggtaagtttgttctccttatcagtccatgataccaaaacataaacaagagttggcttcctaaatcagcacttccatgttcccatactgtaatacttgcacattgcttcagttttgttaatccacatcaaatatgcagacacttaggacagctatattatctgtccgtatatatcctctaccagaaatttgtcccttctctttcttcaaccaaacatgcagacacttaaggctgctgcaaagagatctcagaagatagtggaactagaaaagcaactttcctatttggaggaactaatggagtaacttgatgaagcagaggaacaagaagtaacaactattctaggtagatctggatatctttcccagcaggaaatcaaatctgccattttgaaagcaa

SEQ ID NO: 96827 - DNA, 672 bp, Zea Mays
ataaaacacacccaccaacgcacgccgtccaaaacacatgaaacatgaagcaataaccaaaagacccaaaagaaactaatgaacatccagaggagttgttaggaaagatatcccttttgctcctgctgcctcccagagatgtctttcctcaccaacttggatcatcgtagtcgcgatactatgtgagataccatcaaacacacatttgtttctatgattccagatggtccatgcccccaaaataatcaagatgtttaatccccctgtcaattgttcacccaccaaatcattgactctgcgccaccaatccaagaaactaaacatggttggttggggctagagaatgaagaccaacttgcttgaaccaaaggaaccaaaattgccttgagaagacacagtacactagaagatgatcaagagtctcatcctcttggttgaacaacaagcaactttctaggtgctccatccccctacgggctacgcgatccgctgtctagcatttgttgtgtgccactaaccacataaagaaccgacatttagggggtgcctgacttttccaaattctcacataaggttcaaactcaactggccgtctggcccaatgaaaaagctctcatatgccaactttgcagaatagattccattggtagagagatgaaagaaatgggtatc

SEQ ID NO: 96828 - DNA, 414 bp, Zea Mays
gacacattgaggtacttaatcggtttggttatattgacaacattgactgggtccaactaggaggcaatgatttagtgtccaaaccgaaagatgaagtttttgtcttccaaagctttctaaaagctagacttagatttccactgcataagacgatagtttctattttcaaaatgtttagcatttacctttaccagcttacaccaaacaccatagtgtgcctaagagtttttttatctaggtcgtgtggagccaaggcattgagcctagtgccgaagctctttgcgaagccttttgtcagaaccatgaattgcgctttagatgaaggcaactaggggccttcacaacaacttcgggtattataattttgcttatcggagaggtgctttgtttctggctcttgcataccgaagcaag

SEQ ID NO: 96829 - DNA, 826 bp, Zea Mays
ctttgcaggaccaggtccccgaccatgggcggcagagcgactacaccggtgaacttgtatcggccgttataccctataatccctgctcgaatgtgttctacacctaattacaccattggcgctacactggggatcaacaattaagcacgaacgccatcctagagctcgatctatggacacccacggatttgaagctttcccggcccattcccaacgacacagcgcggtagagttcaatcgactgagtcgatgagcatcacaagcatacaagggtgttaatacatgtacaagaaggacgaggacatacctgtgggtggctggccacaacatggtgtctcacggcggcgcgacaaaccaattttggggagaaaccaaattcgagcgctacggtgcacgagaggggctagcagggggtgggttggatgcgtaacaaggaggcggagtagggggtatcttcaatttatagatcccggttgagcttatcatgaattttggattgggatcaagttcaccgtggccgggatatttttacagtggtctgctcaccgtggcgcgcgagaggggattggttcagggatggcaaccgattgcttgccacgaccacgactgtatggggaagtaggcgactacgtgcctttcactgcgatcacgtcgagcaccagcggcgatatttcactgaccacgtggcaagtgggcacgtcggtgttccagctcaggcctaagttctcctcacccacgatcttttcacccgccacggttatccacttcacataggcatgaattgcggcgcgaagatcatcggcggcgatagattcactgaatcagt

SEQ ID NO: 96830 - DNA, 303 bp, Zea Mays
attatctcgaaggctgagccgatgtagtatgtttggtgccctcactcttgtcttgcggtagtaagtgaaaacactgccctcccccggctcgcaataaagagggaggggagaaagtgcgattgtatttatttgtgcggtggggttggtggcccttcgctgtgtgtatgtaatctatgacgattgtttattgtttgtgtaatgtggccggttacccttcacttgccagtgcgatgttgttgaatgagatggggaattcgtgtgttgtgactgtatggctgcacccttaggcgacttttgcacgga

SEQ ID NO: 96831 - DNA, 743 bp, Zea Mays
atagtggtcaccccgagttaagtatgcgtgagcatgtcgcaccgccttaagtcattgccgacttaagccgattgctccgttagtagggcatagtggtcaccccgagttaagtaagcgtgccaattgacagtgaacaatctgagtgccttcgaaacctttttattgatgatatttttctcaatttacagaatacatcatcgtcccaatagcttctgagatgcagctaggggtaaaacttcctgagatgttctatgttccatgagttcccaatttctgttccgtccatctgagtgaggcgatatgatcccgaccgagtgacttctgttactgtgaatggtccttcccatagaggtgacaatttatgccgtccttcccctattagaattcggcggaggacgagatctcccattgcaaaggatcgatgccgtatggccttatcatgatagcgcctcagagtttgctggtatcatgctaattgaatcaccgtattcagtcgctcttcttcgagtacgtcaacgtcttacagcctagtagcttcagcttctgctatgttatcaaagattaaccttggtggcccgaacttgagatcggcagatagcactgcctctgaaccataaaccataaagaagggggtatttccatgcagagttcggctgggttgagttctcaggctccaaactacatatggcaactctctgatccattttcctgcaaacttttcattcttgtcgaagactttcttt

SEQ ID NO: 96832 - DNA, 452 bp, Zea Mays
gtggccatgttggtccgcctaatccaaggtatgtgatgtttcttggtctggtacatctatgcctgctgactccttaatcatacatctgtgactgctactttatgcgcagatacaggttgctcatcacaacatgagatgagacaggcgagactgattttatactatttggacgtatggcacaactcattgttaagaaatcacttgacatcttgatcacagataatccaaccggatttattctcgatgaaataactaggctgatggaaaaggtgtacacattcaacgtaagcttcacagacagcaccattgctttaggcaatgtgtgtttccaggttaacacggttgtcaccgagattggtgattgaggtcaggttccaatttcacccagtggatcccaaccttcatcaattccgtctgcgtgggctgcatccaagtctacatcagcagactct

SEQ ID NO: 96833 - DNA, 638 bp, Zea Mays
agccaaggatgatacagccgaagagccaaaagtggaaaaatcagtgaaaatgccagaaattctgagcccaccagcataagcagaattgccgaaagtgcaaaaagctcctgccgcaactcccaagaggaggaggatggccagtgtgctagacgctgttatggagaccacaaagtcctagacccctgctcctattaagaaagttgccgaagttgccaaggtccaggccgaggccgaagatgggactacagtggccattaaaacgaaggctgtcgcacctgaagataaagctgagcaacgaacttcatatactggcatgtcagcagggcaagatatgatggaaaaagcaaaatctcctgcccccgaagctccggccgaagatgttgattacattattcgacatgcttcggggaaaaaattatccaatgaagaaatcttagaagctagacaatatgcccagaaactaaaatatccaaaaggggccttagtgttcaatggcactaacgaagatgatttcctgtactgtctcccggacaacaaagaaatatctgtttgtcaggagatagctaaaagtatgggatttccgaagcttgaggaaggcctttcggccatgtcgaaggatgatcttgctgatagccttg

SEQ ID NO: 96834 - DNA, 364 bp, Zea Mays
atttttttgtggaaaataaacgtgccataaaatcatactgtaggtaatgttaggtgatttttgttacattatgaactgcaacattgcttggcaatcacaattgccttctgtagttaatcatttccagtaaaatatcaaatttggtttaaatagtatttttctcttctttccattccatgttttctcaaacaacatattgcaggcaggtcacatccttgcttcttctcacagccatgcaacttcagctgagcatgagctagatgaaaacatatatgacaatggaatacatgagggaaatgcctatctgctcgaacaggtctgattttagccctgattcataatgttaacactattacattgcctg

SEQ ID NO: 96835 - DNA, 499 bp, Zea Mays
tgcaatccgagacgtgccactacagcttcacttaggaatgtgtgagtggatcatgaatccactagtgcagttaaattgatgccattgattgtgactgggagcctgagagtatttgtgacgcctatcccagtaatggcctgaagagaaattcccaagtcgactggtgatggaggttctgtggttgtatcctcttcttccagttcaagcaagaatataccatgacctgaacacttgtgctctggtgaatatttttccttacaatggtagcattctccaatggcgcgtttggcggctaattcatccggagacaggcgcctaaaacgtggtcgattggctgtagttgctgtcggtcgtgccattgttggtgctgcaggtttggagggtacttctagagctgctgttgactgtccagtggagcttcccgtgagcatcaaacaccgttcatacaccctggccagatgcatagcacactgcagcgtctttagagtttgtaattcca

SEQ ID NO: 96836 - DNA, 744 bp, Zea Mays
cggtaatatcaacagttaatcagttgtgttgtgaaattcgagcaatggttgacaataaggctaccgacaacctaatatatgagttttcaaatggccaggtgcttcatacctccttttgagccgttacgttgcatgtcacaagaacatacctcctagtgtaactgatcgatggcacagctaggtcgatctggcatgcgaggtggccggatcttcttgaacgaacgtgcatacatacatacctcaccgattatcatcgtaccgccctccttaactctctgctaagtaagagccctgttcacgccacatggaaattgttcatcctagtcctagaggcggaagcaatggtcgatcgtcggtgcaaggctccctgccttcttcctccaatggtagatgtggatgcgagcgaaacccatgctgacaaccgattagatcggagggagagatcatctgcctgctcctcattcagccaaaacagtttgacctcattcagaagacaaaaccaagttccaagatttgtacaaaaccttttgagccaaaacagtttgtccccctgatcctggttgagttctcattaaagaatgagaaagatgagtacaaaatggattttgattatactgaaagttgtgaaaggggagaagaacagcctaaacttaaaggtatttgttccggaaggagtctagaaatacacaaaagagcttcatttttgtattaataaagagagagaaacaaaaaataatctcgtac

SEQ ID NO: 96837 - DNA, 445 bp, Zea Mays
cccccagcgttgaagtggccatgtgtgggaaattagcttggtgaactgcgaagggttgcccgagcggggagaaaacttctggcaggcttcgcacgacctcgtgactcgattcgcggcgcagattatatcgggccagtagaacccttgacggatcaccttggcagcgagggccctaggccccgagtgagagccacaagttccgctgtggacttcgcacaggatctggatgccttcggtttcggtgacgcatttaaggatgggttgactgacccccttcttgtatagctggccttcaataagtgcgaagtcctggctttggtgcttgaggcacttggcctcgttgacgtcacttggatggtaatatccttgcaggaacagggttattggggcccgccaatcttcggtcatgatgaggttgacgatgcgatggccctcgacgtcgttg

SEQ ID NO: 96838 - DNA, 837 bp, Zea Mays
gtgaaggcctagtactaatgctaatggctagagaagatcatgtatggagacatcatgtcccattagagtcataaagcgctctaggccttgtaggttgaagagacagggcggtaggaaagacaaaggtggtttcacctcttcttcactggtttctctactagcttagtcttcgaaggtctagccacaacgtaggcaggagaagcgcttgcagcagcagcttctcccaattcttcaattttgtcctcggaaaccttactggaagcaggagtagacaccttcgaaggtttcaggacagcgtccagaaaactggccattctcctccctatccaaggagttgcagctgaagcagttactacctttgataacccagtcattgttgtaggactctgcagcttcagtcgcccctcggccctagaactttctggctctgatttctctagctaagcagtggcaggtttggcagcctcaacagaaattatctccaaagccaaggttgtagcttcggcatactcaacaacttccatcttttctgtagcaggcagtgcaacaaccctctctaaggaatgcaacttcggcagatgagtcaaaactttagtctttttcagcttcggtgcagcggaagaggtcatagttgcgattttcatctttgatccttgtttctgtgcgggaaaacagtagtcagaataggctaatccaattacatcaaaaactctattcaaccttctcttcctatgagcaccgaaggcagtactcatggctttgtcccctaccttcgaataagcccccaacaattcatcactggtcacctcaacggcttcaagccactcatcatttggc

SEQ ID NO: 96839 - DNA, 347 bp, Zea Mays
cgacacttatgcgtaagaggaatgggctcttttggttcagcagctgaagaagtctccccgccaaactcaggcaccacagctggttcaatatagtgtggcctttgggtaaggaccttcatctttttgcttgtagccttcggcacaggttcggccgaggcggccgcagcagcagctttccttttcttcccttgtccccgcagcgggtaacggtagtcgggatagacgaagccaatagcgtcaaaaactctgttcaatctcttttttcctcgacctccgaaggatgtggacaatgcattatcttccgccttggaatatgatccaagcagttcatcacttgtcacttcaat

SEQ ID NO: 96840 - DNA, 449 bp, Zea Mays
gcaattcgtcggcccctatcccatcattggcagagtgggacccatagcataccgtcttgaattaccagaatccatgtctgacatccacaatgtgtttcacgtgtcccagctccacaaatgcctgcaagcaccagaaagtcacgtcgaagaagaggcaatacagattcagaaagatcttcagtaccgtgagaagccagtaaagatccttgattcagcagtccggaagacccgcacctcagaagtgaaactctgtaaagttcagtggagcagagaaggagaagaggaagctacctgggagagtgaggactccttgaggagggaatacccttatcttttctcaaatcccgtctaaatctcgagggcgagattcctttaagtggggtaggtttgtaacatcccaaaatctcaacccaaggtttcgaaccctaatctgctaaaccccccttatt

SEQ ID NO: 96841 - DNA, 624 bp, Zea Mays
aagcaggtgcaccctggtattggaatcccctgcgaggtcatgtctgtcatgaactcgctcatcaacgacaacttgccggcgaggctgccaagttcatccgccacaataagatgggcaccatcacatcccaggacatccaagggcatcaaggccgtcaccaagttcacctcgtctttgtcttcttctcccgtgtgactgtcttcgtgtgagtaacatgttggttggtcggaggcttggctgttgtggtctcgcgtaattgccgcggtggctttttggcagaatggaatgctatggttatgtgaatgttgatctctcagcactccgtacacctgcttgccacactgttttggccattgtgtcggggtctagattgggactgacttgagagtgtttcaggtctgttcagttgggtgttctggggccatgcagtctgattcagttcagcgtttcctttatcgtacctgctcaatgaatctaataccagatccgaaagagtgatcgcttcttcctcattgagtaaagggttaaccaagcatatgattgtttgctgtacctcaagttttcagtcggatatcagtgcatagttcctcgaagggccttccgttcaaaatcgtaactacatgt

SEQ ID NO: 96842 - DNA, 348 bp, Zea Mays
attttgcacatctagttgataaagagaccatccactagatacaacaaaagaaatggtaattttgatagtagttgctttaacaacaagactaaaggtatcctcataattaatgtcatatatttgtttaaagtccttagcaacttttcatcttattttcttttgattttgtataccaatttgcaatcaataacatcgcgacccttctgaggtggaactaggcaccgttttttcccgtggtgcacagaattcaatatccatagtgtttttccaatgtttatcatgcacaacttctaaattttgcggttcaccagtggtcatcagatttccatactagacggtaccatctat

SEQ ID NO: 96843 - DNA, 317 bp, Zea Mays
acactatacagaaggggcgcatcaggcatcttcatgaaatgcattctctcatctactgggaagcaacttctggaggaggttcatgttggacaatgtggaatacacgcaacgtccaagacactagtcgggaaggtcttcaggtcggggttctattggccaacagcgaaaagtgatgcagccgagttagtttggaggtgcgaagcttgccaatacttgtcaaagcaacaacatctaccagcacagcaactgcagaccataccggtgacttggcccttcgcatgctggggactagatatgattggacctttcaagaaagc

SEQ ID NO: 96844 - DNA, 354 bp, Zea Mays
ataccaatgaaagagacactacctcttggctatgcatcacgtgatcacatagtcccatttgtttttatttataatccgactatcttttttcaaaattgagaatcccgctagaggtaactattcttcagaccggttttagggacattctaaagttgcagcaattatcctgtccctacccctaaatctactgtgttctttttttctctcttaactttttaaatataaattacgaattaatatgtacttatcattttagaatacgacaaatatatatgtagaaaaaatctaatctaaaacacaatagaaatacggtgaactatgtatatgtggtggattaagagggaaccaccatgg

SEQ ID NO: 96845 - DNA, 604 bp, Zea Mays
gtcgcacagtcaatttcagggccagtggacatctcccttgtttggaccacctagacaacaggcatgcaggcagccaaaggtaagcataccggcctgcatggtgagcttggtacctttcctgttcagctctcgaaggttcttctgatctgagtttggggtctcatacattttcttaccttaatttgcttaccacgtgttctttttgataaaaaattaccaccgcatcgcaataaccaaaagaaaagtgtggtttgtggtttttgtttttcttgcaacaacttcactttacaagttctgaaagctgaaatttttcatcaccgatgaaactgaacagaacaaaccaaacaaaccgaatacccagctctaattccaggcatccttgattcataatagctactcttttgcacttccatttaccatgagttttgacacgacccattagtgtgggggtggggtgtgcagttgtgatgccacccagggcaagggcttgtcactcagtttttttaaaaaaccaatgaaaaatcactgttccacaaagtgcttggcctgcagactgtaatggtactgaccctgggtcagttccgatctagctcttccctgacac

SEQ ID NO: 96846 - DNA, 279 bp, Zea Mays
taattaaatgcgtagtgtaaccttattttatgtatagtggaattgttaaattaatatggttatgtttagacaagtattttaatccatagctgcttaatgtaatcgcctttcgaccgtagcctcgaccgtcgtattttctttctcgtatagacataggtacgagccctacgccaagcgcctgcttatttgttgcattctattgtgtggtgcattgtttctttttatactaagattgtggaatgtatgtttgaactcgtatagataacgatccgttggcag

SEQ ID NO: 96847 - DNA, 312 bp, Zea Mays
tgtagactcatttttcaagagatatggaataaaatgctaaggcatatgagatgagtttaatgtgaagttctactttatcgctttcattttatttcatcatggttctctctaaaaccctttgtcctagattctaacacttcggaagtgttagatcaagaggacgaaggtctttacatctaacttgtgttgccttggttttcaatacctttaggggaattgaaattaagtaccaacattggtgcctacctccggtgatctcacgaccacaactcacaccataccgaagaaggcaacaactagctccgtcctccg

SEQ ID NO: 96848 - DNA, 640 bp, Zea Mays
ggagggggcggcgtggaaggatctagggtgagggagaagaggctggggcggtggatgaagaaaaccagctatttttctctcccaattcttgtaacaaataaatatggaggctgtttgtttccacgtttttagccattcatctattcacaacggaaatggataacatcgtttgctgttcggtacagccagaatgttagaactaatcttgttatttaggtgttaatgtttaagtaagtgtgttaggtactgaccgagctgccaagtggtgtggcatgctggtagagcagtgatgcgtgtgtgcgttttgtgcggaaacggctgtttatggaggacagtaaattgaatttttcctctatttcatttcttttcaagagtataaatatagatatgaatataatcaatgttctaggggtacgttttgtggcgggatgtaaatagattggactaaaatgatttctgctttgatattttagacagttcagacagaggaagacagatacaatgccaacaatgtgataagcgaaaataattgggacaatttagacagatggagacatacacgatatcaaaatcgtgataaacgaggatgattaaaatttagtgatctttacattcacagctatcacgtgttaaagtccgc

SEQ ID NO: 96849 - DNA, 839 bp, Zea Mays
aaaaaataatattataatttagcttgttttaaacagttccatatattttgaatattatgatggatgaggtgcactgcaatgcttgctaaagaacatgaacttactcaatgacagacaccagttgtttaactattgaagctggaggaaaggttagttttgttgaacaagttgattcagttggtatgcttgaggaatcctcgttctctgaggggcttatttctaggacctaggaccatgaagttttgagtagcatacgtgaagatctagctgattaaatagccaattgtgcttataacaagaaatgaaatgaaatagagaatttaagcatccaacaaagatgccttttgtgtacttaacaaaaaaggggtttcgacactaactgcagaactatgaatattgtccctaaaaactcccgcaaactcaatatccagtccaattcaccagaaccgattgctccatttggttgtgtttaacacacccaactgccccagttcgtcataaaaaattgctcaggggaggctcagcacacacagccatatgcttccatggaatctacaccctggagcattgacaaagcccaacaaagaagtgacagggtaactactactaactgaaaggcctcgattttctaataagcctccgcaaagcttgaatccagagcttcacaattctgctgagccacactgtgagaacagagaagcacacaggccaatagcagttcagctgcctagaacaacaaccacttccaccacaagtcaacatcaattcaccaatctctccgtcacaatcagctcaattgatcggattcaacaccattaccaccaacccgcgcgagcacc

SEQ ID NO: 96850 - DNA, 417 bp, Zea Mays
tagccatagccgacgtggagagcgggaggccattggcagccaacgtgcggtgggaccggagctagaagagcgtgcgttgggagtggagctagaagagcgagcgtgggtgtggtcgttaggaagaagacaactgaccggttgtggcggtaatggtaatagttgggggcggagctggtggtggcatgctacccgtgcatgttcagctttggggactcgctggctgacaccggaaacaactctagcgagcccacactcttgtaaccatatggcgatacctttcgtcgtgccacagggcgcttctccaactaccgcatcatcctctacttcatcagtaaactacatacacctgtcactcgatcgtggcacaatcgtgcatgtggacactcgcggcgctagagctagggcaggagggaagag

SEQ ID NO: 96851 - DNA, 490 bp, Zea Mays
cattggacatgaaatattcacatctaatttttcgttgcatttttcttaattcttacatgaaggtgttgattttttttgtcacttggagtaaataaattttgagcatattgcatgtgacaaattatatggaagatcataaaaataactaaatggtctttagtgggacatatggaaggatagggttacatcattgttaacatcagctcatttctataggctgcacgcctcaatacagtaactggtgagtgaggagggaatgctgaacaagatctgtttggcgcctgcttccccaagattggcccttaagactcagggatctagtatactgtagagttgggcccaactgtttggcacttgcttcccaaaggtcgggcctctcagatcgaatggctgtggttgtggaaaaccagtgaggaccgatcatgattgtgtttggaatccctagttcagcctcaagtgagagccatgtttcccatttcagtaatctccc

SEQ ID NO: 96852 - DNA, 1763 bp, Zea Mays
gggaagtatctcctctcccagtgatcaagttaaaaaaacttacagccatgacatgccccatgtgcaaccaaaacatcaaacaatgttttttttgaactttaaatacagcaggggagatccccacggtaaggattttattaacaaatgaaaagaacaccactgcacaaagagggagaggggaaaataggagccagggagctacaagtctacaactaagagaactgcacaagctgtacaagcagaaacaagaccaacaaagttaagctaggacagtaagaagggagaagaaactaggttttttagaggagccggtcagacaatgttgttgaccaaatttctaagacgtgctgcagatttcgacttacattaactccagagaagtgatatttccgacctccttaggtatggtcccgccaatcgaattccacataaaatcccttcaaaagaaataaatactcagcatctttgtgcatgtacgattaaataagtgggcagttcaaatgacaagctaaacttagctcagcaatcaatcaattgccagctgaaattaaatccactcacataattttcatttgagaaagctgaccaagctcaggagccaaaattccagatagattcaaacttaggagctgtctgcaatcaaatttgtgttatacacgtaaatgctttaatagctatggaattaactggcgggtggggtggggtgggcttttttgcggttgtaaattattctcttctttattgaaatgacatgttgctctcctatgcttttgagaggaaactggtggatggaagatgtggtcaagtgaaacaagtgcacagaatcacagtaattacatctgattgtaaaaatagctaacttcagtcataacagaatagtattaacacattatgttccaaacaaaatattgtctattttccaacaatgcaaatcaggaagagtataatgaatgctccaacatatttctgctttggagagagaatgtgtgatagcagttaataggtaatcaatttttatcttcccaaaaatgttggaaaaaagatccaggtgcaaacttttggcctactaaggcagtaaacaaatttataacaaaactaagttcaggtttagtcactcatcaccaaaagtaactcataaccaaatgttaaggtgtagtgtggaatataacaagcacttgattgacaaagagatcgcttatgctcatacaattcttttacatggaagtatccatcactgcctgttgcattgtaacagataacatgggaccaatttcccatgcatggatctcctcggttccagctgctaagatttccgtgtggatctatcaagctgcccctaatagccttgagggcatcaactgcagagcagatgaattagtttgagaataatgttgcaaagaaaaaattgaaggcatgaaaaacaattgtgataatataagtagtactgctgaattgtatacacctctccaccaaagtaaggggctaagggccatgtttacaaggtaaaagtgaaatgggcacaaatgacgattatgcagagatcaagtcgagtaatgggtatgcatgcaaagtgcagtgaataagaaggattttaccttcccatggtgcagtgatctgtgcagcggtcggttgcaaaagggtaaaaaataacgtgaggataatggagcacaggcagagcacttgtggctgtaacatattttgccccatttgtccagaatatatagatttcacacttgcaggatccctctgatagcagaatccat

SEQ ID NO: 96853 - DNA, 576 bp, Zea Mays
ggcaaactctgttctatagcttcttcctctgccgccttctcttcaaactccgagggttgtttatcagcaggctccgaaggcccagcttcggcgctagcctggcccactgcagcctcaacttcagccggttttgtttcaaccttggcaattttccctcaaggaatagaacttgaagcttttactgactctagaacatctaatacacttgccatcctttttcttttgggagtcgccgtaagacctttttgtgccttcggcaccgccacttctgccgaagggcttaaaacttctaatgttttttgtcccttcgattcttgggtcctcaatgttatcagtcttcggctcagctaacttggccgaaggtgccttcggcattgcagccggctcttcaaccttctgcgtaggaggagcagggccttttgcttcaatagctgaagaagtttccccgctaaacttaggcactatggccggttcaatatagcggggccggtgggtgaggacttttaactttttactcttcggcgcaggctcgcttggagcagccgaagcagcaacctttacagaggttacaccctt

SEQ ID NO: 96854 - DNA, 405 bp, Zea Mays
ttaagccattgccgacttaagctgattgctccgttagtagggtatagtggtcaccccgagttaagtaggcgtgagcatgtcgcaccgccttaagtcactgccgacttaagccgattgctccgttagtagggtatagtggtcaccctgggttaagtaagcatgagcatgtagcaccgccttaagccattgccgacttaagccgattgctccattagtagggtatagtggtcaccccgagttaagtaagcgtgagcatgtcgcaccgccttaagtcattgccgacttaagccgattgctccgttagtagggtatagtggtcaccctgagttaagtaagcatgcaggttgacagtgaacaatttgagtgcctttgaagtctttttattgatgatatatttcccagttt

SEQ ID NO: 96855 - DNA, 279 bp, Zea Mays
aggagaaggtgtcagcagcagcacacaggtggggaagagagtggtcgagcggggagtgtcagcagcagcacgaggttggtgatgacgtcccgcgaaaagaggtgaacttaccacaggtcgagcggaggaagcagcacgaggaagatgaactatcgccggggtggatgggtggcggcgacagagaatacgcgagacgagaggaggaaacaaatcaggataaccgcccgaccttcggacatcggatgtgattccacacggaaattgggctgacaccgggtc

SEQ ID NO: 96856 - DNA, 685 bp, Zea Mays
ggaaaccacacagaccgtccgatctagcgtaagcggtctagattaggagcgcgggcaacgtcttggccgtggggaaagatgaatgctgtgagccattgaatggttgatctgcggctccaattaagtgctggatgctccctccacgtaattaaatcgggatcgttggtctccgaatggactgatccagagcgatctcgggtatttaaaagctggaccgtaggatcgtgatctggtggtcgagggtgtatactggttcgatcggagggatttctaatcgtggccgtgaatctttaatctcgcgacctgaatcgctccataccccttcgccatgccatttcgctaaagagcccctgcagattttagaattcaacccgccatccattctaagtcaaaaataatcgcacagaggtcctgtttttagcactttagcccctggctttttcagaaattgtgttgcaggctgagacctcggtttatttataaactaaatagagaaaatgagttattagtaaacaaacaattccagatcttagttaattcataattaatccatcgtaacacctttttgagctatctcagtagcattaagctcacattaatattgtttatcagccagtaactctgtttagacatgaaacctagattaaaattgtctacttagtttattccataccaagcacttaat

SEQ ID NO: 96857 - DNA, 622 bp, Zea Mays
ctcaattgcctttatcttctctgggtttgcttcgatgccccagtgcgaaaccaggaatcccagcaacttccctacggagacaccaaagacgcacttgtccgggttcagcttcgtgcgtgttgcgcgcagcttgtcgaagaccagggttaagtcttccactagggtcgaccctctcttagtcttgaccatgatgtcatcaacgtatacctctactctgtccctaatcaggtccccaaaagtcttactcattgcccgtacaaatgttggcaaggcatttttcagaccgtaaggcattacgacataacagtaaagcccatccactgttacaaaagcggtatgtttcctatcatgtctagacatctggatcttatggaaaccagagtaagcatctaggaaagacaggaggtcgcacccggaggtggaatccacaatttgatctattcatggaagtggatatgggtccttgggacatgccttattgaggctagtgtagtcgatgcacatccgaagcttcccgttagccatggggacgatgactggattggccagccatactgggtgatggacctctttgatgaagccagcgtccagcagcttccggacctccttacggatgaagtcc

SEQ ID NO: 96858 - DNA, 641 bp, Zea Mays
tcggtaatgaattttttaccttaacccacctgttggaaccttacctatcttacccttgattgttttctccacttcgccacttcatgagtcttgccttaactatatcctttgttatgcttttcattattatcatctttacctttgacacctctatatcttacattgatgtttatcttatatctgcccatgtcaatctgagagttgaattttatccattttcccttggtcatatcctcttcttgctgcttgcgagttttaactccatccttcgttgtgcttatgtttgttgctgcctttacctttcccatctctcgatctgaccttggtgattacactatgtctgctatctaaaatctccaatctctcatctcagttcgagagtggtgttttacttctcccgcctttggtcgtaacctcatctttgccacgtgtcaatctggccttagctccattcttcattgtactcatgcccttggttctcctgtacctttacctcttacattgttgtctattatcacctttaaccattgtaatatctatatcttcaccttgacgcttactttgaacctaacttttaaagccttctcttttccaacctagttcaagagtggtgctttacctatctcacacttgattgtttc

SEQ ID NO: 96859 - DNA, 756 bp, Zea Mays
ttgttcacaaccctcttagtcctacttaggaaacacatcctacaaaatagaggccaatgaaatacctaagggaaagcatgaacaaagtgacaaacaaaataaggattagtgttagcgtagtgttagcatcccagttagtgttctagtgggactaaaagggtatccacaaatatttcttccgtctcatagtattgagagagagaaaaataaaatatatatagtaacagagtttagttcttaaccttagctaaattagagcattaaagagagggattagcttgaagcatggtgtgagccatccaaaaggggagaatgggtatttatggagttagaaaggggatgggttggtgggatgagtggccatcccttcatggtggagggccaagctcccatgtgcaattaggtagagattggacataaaaatgtccacttttaggagtggagtggctgggtgacctatgtggggccaggcgtccaaaccttgtgatttgtttagcaatacacatatatgtgaaaatatgcatacatgtatgaacgcaaaagtatatgatgaactttgaaaagtaaagttgtagtggatggaattcaaactggaaatcgtaatttgggtgaaaacaaataagcagtgggggataatgtcagtttacctgctgacaagggcattctcaaaccttagtattgtccttaaataggtcaagatgtcgaggatgctgactttggggctatagtcttgatgtgccaagcttgatatgtttt

SEQ ID NO: 96860 - DNA, 297 bp, Zea Mays
tgttgagtctaaactacatgcaacgattgtaattgaactgatttcttaccttgcagcgtctagaatcccaactatcaagaaccattaaaattttatcaacaaattgaggcacacagtaccagtaggttagactgtttgctatatgttttggctaatttacaagaatgatttgtgatgaaccctgcaagttaaggcttgctgtgacaatgttttaagttgggctttggttcagatgaaacacatggcattgttcccttctctttggaaaatatgaagcactatgtataaatctgaaca

SEQ ID NO: 96861 - DNA, 524 bp, Zea Mays
caccaccctgagaggtgccagctatatcagatagtcgaacacgtctaggcatttgaaatgaaatagaactcataaatgggtgtccacaactaggaatatattatcaaaaacaaaatacatgatccttagtggttacaataccaaaatttccagactactgctggtactaatattacaacagaggatgcactaatagacctagtgcctattctaatcctctgcatcagtgtctatctctgacacatcactaccccctggagaatttccacctggtgcaaacacagacgctacttcttcctctgagtctgcattcggttcacccccatcagctaacacaacaccaccctctgcctctgcggctctgggtgcatcatcggggtgcagctggtaatacagctggtgaacttcctcatgcagtacattagagtagtcctccagatcattgtaggccataaccaaatcctgaaaacgacccctcaaatgattctcacgggcaaacactgcctccctagatcgcattgtcg

SEQ ID NO: 96862 - DNA, 1039 bp, Zea Mays
ttgagcagttgaatgggttagacaataatgtcctatgtgatcatttctctgagaaagagattaaagaggccctctttcagatggagaaaaataaagctgctggtcctgacagtattcctgctgaattttatcagatttgttgggacattgttaaaaatgatattgttagtctttttcaggactttcatgctgggcatttggatgttagtagacttaattatggcatcattactctgcttcctaagatcaaagaagctaccaaaattcaacagtatagacctatatgtcttcttaactgcttatataagttgattaccaaggtcttgaccataagaatcgaaccttatgcttagaagttgattagtgagcatcagactgcatttatcaaagggagaaatataatgactggtgttatgattcttcatgaaatcatgcatgagactaaaaaaaggaaagagactggtattattttgaaattggattttgagaaggcttatgataaagtcaattgggattttttattccttagccttcaacatcggggctttggcaataaatggatgatgtggatgcatatggttgtcgagggtggcactgttagtgtgaaaataaataatcagattggtaaatatattaagagttacaaaggagtgcgtcagggtgatcctctctcgcctatcctctttaattttgtggcggatagcctcgctagaatgatggacaaagcttgtgctaatggggtcttgaatggtttgggtaggcatttgatccccaatggtgtgattttgttacaatatgccgatgatactatcatttgtatggaaaatgatttgtccaaagctagaaatttgaaaatgctcttgtacatttatgaaatgatggcaggattaaaaatcaattttatgaaaagtgaaatttttgtgatcaatggggatgatgatactaagatgcattatgtgaatctctttgattgccaattgggctctttccccatgatgtatcttggggtccctgttagtccttcccgtctgcgaattgc

SEQ ID NO: 96863 - DNA, 581 bp, Zea Mays
attttagttaataatgcttatcatgtttctcttactgatgacaagccacacatcctgcttcaacaaccccataacaatgcatctagacatgggtgttaacacagttcctctcatgtcctcgataacatggtctacctctaactgcattgaacattgaatgttgcgaagtcatttaatacagtggtaccttcaatgtgatcgcaagtcagggcactctctactcacctcaaacgccttcaccattttgttgtgtcgcccatgtctatcacttcgctggccatatatggtactcactatcttgcattgctcgacatcttgtttgagcaatccatcgcatgaggaagcctggtactcttgtttcggcaaacacgtgtgttgcctctacctccttggatgacgtattatataatatgcatgcacctgtcatcatgccatccctaccaacactctctgcgtcaagtacacgcactttgtcacacaaagaagtccacaaccaccactctgaccattgtgttgaccacctctaacctgttgatcacctatccaaggaggcactcgtgtttgctgccacgactttctcc

SEQ ID NO: 96864 - DNA, 287 bp, Zea Mays
gggaagtagaatgatatgcagttggtcgtagttgtataagatcagtagcgtgcagaactgcatgaccccaacacgacgaaggcaatttgcaattcatcaataatggccttgcaatgagtttaatcctcttgattagtgactcagccaaaccgtttttgttgtggacatacggtaccgagtgttgtacttgaatacccagcgccatacaataatcattgaatgcctgagatgtgaattcagcagcattgtccatccagattgaattaatccgatgttcagggaaattt

SEQ ID NO: 96865 - DNA, 412 bp, Zea Mays
gaaatacaggtgcttccgtcaggatagcaagggaattctgtggtttggagatcgattggttgttcccaaggaccctgagcttagaaagaagatactggatgaagctcacctttcaaaattctccatgcacccgggcagcaacaagatgtatcatgatctcagatccttatactggtggaccaggatgaagagggaaattgcccagtacatctccgagtgcgatacctgccagagaatcaaagccagtcatttgaaggcagcaggccctttgcaaccccttcgcataccatcatggaaatgggaggacgtttgcatggactttatagtgggattgcccaatacctccaggcaccatgattccatttgggttattgtggacagattgaccaagactgctcatttcttaccagtg

SEQ ID NO: 96866 - DNA, 776 bp, Zea Mays
ctcgtgtcagcttggaattctcattgttgtgctaaagctattatcttttgaacaaagggtgatcttgcgttgtgaacattagttcaaagtagtctttgttgtgtctaatctctaatgtttgtttgatgcacacctctcagatcgtgccgctaaaacatggtactaaaataggtgataaaaggcgctctttgctgtttttctaggctcgtgggtaagcatggtattttataactgtgtttgattctcaatagttttagctgcagatcatctatagtttttcttcctttcaatctttaacatggggccatgggcagccattcccctgtcagttcaggaatgcatcggtctttgaggaagactgaatgtagtcttcattgtatggaaggttgtcctttaaggttgcacacattgtcttataccctgataattgtacattttttatgttttctggttgcaaatcacagctagttgatataggcacttctgtgattaatgggtgagaaagcagtttgtttatcttccatgccagttttcttcccattttatttgattattttccacattggacaagagattatcattcatttatcttttaaaatattttttgttttgctggaatttgtctgaagggtctggttgtgttaatataagggcgcatctttagtgaatgtggaaaaactttgaaaaatggttaactttcatccgaaagcgtactttgaagttctggaaaaaaaacttggcatattgatagaccatagtcattcatagatgtactt

SEQ ID NO: 96867 - DNA, 438 bp, Zea Mays
caaagtttctatccatctcccaaaatggtacgtcagacagtccgcacaaaggcccagacagtccgccaaccaatatttaggtcacctaaattttttcatgtttttgttcaccaccaaaatagattgttagacattctaggccctagggctggacagtccactgttctatgtttgactcaggacagaaactcagtttgtagccattctttagtaccttggtaaacaatctaggccctagatttagacagtccatcgttctatgtttgacccaggacagaaactcatagtttctagccattctttggtatcttggtagacaactgttcctctgagccagacaatatgtcgtacacagattagccctttttaaagaagccaattgaagtgttccactaacttgagtatgtgggctatatttttcatctaaactttcaattg

SEQ ID NO: 96868 - DNA, 354 bp, Zea Mays
ccatttggccgggagccttcgcgatcgtcgattggtaaatggagggatgggatgggatttcatttaaacttactctccaccatagatcttcagatcaacgaccccaaacgcataccgatttggtgtagacaattttgaatccgtgccatcaaaatctgatcggatggccttggttcacccgtaccccttcgacgtggttggtttgctaaagagcccctacctattttagttatcaacccgccatccagattagttcaaaagaaattatgactatgtcctggaatttacaaaatagaccctgaacttatttaaaatagtggtcggagtccattgatccctgttcattgataaaat

SEQ ID NO: 96869 - DNA, 297 bp, Zea Mays
ctactatgaagtctgccaaaacctgggatttgattgttgtcctaggttcgaaggtgttgttataaccagaaagttcagcgacccatttggctattctggcgaactcctccagatttctgaataaatctccaagaccccgatctgaagtgactcgtactttgtgtgcctcaaaataatgtcttagcttacgcgaagccatgatgacggcgtacgcaattttttctaactctgacatgttgcacttggaggcggtgagtacttcggagacagaatataccgggcattggtgggtctttc

SEQ ID NO: 96870 - DNA, 351 bp, Zea Mays
tataaacttaagatcttggattagttgactggtgcttacaataaacaccttcggttaactcagtgcctgcatatctcttttaagatgcgtgtacaaacattctttacctcagtcgtgaagtcaactattggtgtatctatgacacatgtggtgttaatttcttttcagttggttttctccctgctgacatacatgcttataaagaaaatcaaacaattcttttttcacttatttttaaacttttcgcgagagcaacttttaatgaacaaaaccatagtaatttaccatgaaatagagtatttttatgtgaaatcgttcacgagagaagtgtcgcttcacatacaaaacagt

SEQ ID NO: 96871 - DNA, 339 bp, Zea Mays
aggaatccgaaggcatttcttcaaatgagatatatgtaacacattatgcaccgcagacaatgattctggtaattgaagtctttacgccatttgtccacatcgctcaagaatgaggaatgggccaatatatcggtgtgccaattttcctttaaccccaaaccggcgaacacccttcatcggtgatactttcaggtatacataatcgtcggcttgaaaaaccaaaggttgacatcgtttatccgcatagtttttctgtcgagcttaagcttctttcagattgtgccttatacgttggactttttcttccgtttctttaaccaagtcaggcctgaaaaacca

SEQ ID NO: 96872 - DNA, 396 bp, Zea Mays
gaggcccccagtgtgatatgccaacgccggaataggcgctgcaacatacggcgtcaccatgaagccgggaatgggatccttcgtagcccttctcccgggacgaagcctctgaagtaggagaaacccctgacgacagagcactccgcgagcgccgcaactcccatcgtcgcgatcgtcactacgcctaggaatgaaaacgagaacaagctgagcaagatgccaggctccgacacgagaacctatgtctcccttggaacatgttgcctgacttcgctcaggcattgaatgcaccgagtgaagtcaaggagtcctagctcaaattgccaacgacttgtcgcgcaccccaaacgcggaaggctatcggtagatcctcacccaggcggcgaaccatcttct

SEQ ID NO: 96873 - DNA, 564 bp, Zea Mays
aaaggggtattttatgttctgtgccgcacgattctgatcctaccgcccagattagaactcgcataaggtgaatcggtacgcatatctgatcacgagatctcgatccatcggtccaaattttgaataatgtgattgatccctatgcgcacaatttgaattggacgatcgagatcaaagacacaaactggtatgcaacctatgatctcagccgtccgctctatgatcaacgactatcgagtcttcatcttccctaccccgacgccgtacagcgggcggcggtgccgccccgtgccacgtcggtagaacccgtcggagacaactgaactcgaaacccaggaccctaattctttaccaaacggggctacacgattctgggaacttagcggacataaataaagacatacctgaggtggatgcgacttctgtagcggtgcacacgagcaatgcagattacacggcttggttgaactccgatgagaaattacaaggccccagtggttatactcgcatggtgagttcactaattctcacgatgtgccttggtgacacccacgacgatcctac

SEQ ID NO: 96874 - DNA, 380 bp, Zea Mays
aaccccgtggacctcccttgtctggaaagaagcccagcccatgaaaaaacgtgcattcggttaacccccgtatggaccgtatcccggtatttcctcttcgttccagactgggaaccacgcccggtccctgcggggtggaaaatatcccacgcgaaggagctgaggcatcacaaatgaagggcacgaggcggcggtggcggcgacggctctccggcgttgctctaccctgcgtccgtgttcttataggtctgcttcttcctccctaggctattgaatctcgcaatacgctgggtggtccttgcagcacagttggagctttccgttcgcactgttagctccgtccgatgaggtcgctctgttggcctccaacgagggagctt

SEQ ID NO: 96875 - DNA, 346 bp, Zea Mays
tctagttttgcaggccccttagacaatcgaagctacctcacaggggatcaaggtacctagggccagtctacataaacctgatttctggcaccatctgtcgtccaaccgggtaggggccacccttgtaaaccctgtgtctagtggttttcgtgcaagaccttacacatccagaaatgaagaaaggtttttcccttggtacgatccttacgtatcggctctatcatttttaacctacgcatgtttctctttctaccccagctcgagattatcatttttgttgttatcacgaaatctgagttatgcaactagcaatgccgcttattttgtgatcccctcatatgctaaa

SEQ ID NO: 96876 - DNA, 363 bp, Zea Mays
gagaaagaataagagaaaaaagataattagtctccaaccttcctcataccatggattctggatccgtcaatgtgaagggacatggaaaaaaaggaagacaaatcaaaccaacatatggtcaaggttctagctcaagcaaagtacctaaagcaaactctacggatcagaagttcggggaagacgatagcaccaccgctgtgttgtcatgctttatgtcaccgtgtcctgtgcagtcacatagttgtgccgtgagccgacgtctcgtcgtgttgtcgtgccctgcactgccatgccccatgcctgtattactaccttctccgagcgtgtggaacaaggttgatagttggttgcaaactagatgcg

SEQ ID NO: 96877 - DNA, 628 bp, Zea Mays
aagacaagtaactgtgcgcgcgccacagaaagataatatggatgggaaaaggtataaagtaagtcgtaagtttatcacaagacattacaaagtatccattgtatactacaaataaatcaaacgaagagatggagcaaacgtaggtaaataaacttattttgttgtaggtactaaattaaacaagaacgtctaatgcctatgttactaataatcttgtagcgcaagagcatggatgatatgaggtgatctcataatgtgatgggtcaggacacgtccagctggtgcatgagaagcccaaaagcctagtatagtagttgcaccacacatgataactctaagaagaacccgacaagattgtcttagatgatatgaggtgatcatggacgcccatgggccttgtgtcttgcctgactgctcaccagctaccctttctattccatctcagtgctgtcttctctacgtccatcttatcagtgtaatatccaagtatatggcacaagcactgttagctcaggatgggattcatctgatttttttgtactcttgctgtcttggaactctatgtatgagtgacctcaacgtccagctttggatttttggcacccatgagtatatccctcaaagaatc

SEQ ID NO: 96878 - DNA, 1287 bp, Zea Mays
gggaggcagagcactccttcagatggatcacaacttatgcactaagcaaatagaaattttacagcataacagtatacttacaacaaggacacgtatgattatgcaagggttcctatacttcaacactactttacttctaccttgcccttgaatgtgtgtggatgggagtgggatggtatgtcatggcaagaggggggcacatccttatataggcacctaggagctatggatgagtgacacctcaccatgcatatgtcatctaccactttaatggggggacacttcaccatgcatgtgtcacctccacctttcatggggggacacttcaccatgcatgtgtcatttaccactttaatgggggaacacttcaccatgcatgtgtcacatccaccttacatgggggacacttcaccatgacacatcaccataattctagagaggtccaaaaatatataggcttcgtgacttaccatgattagtgtagggaattctagaaggctatgtacatcatggttatccatggttgttcctagaaagttgtcttgcttatgattaaggtttatcatgaatattgtataatcttctagaaacttggttattcttattatatgataattgtttaagcgaggttttccttgcatattttcaatgggcaaatgatggccatgggaaaagctgtcttaattgatgctaaggtcataacttctatagtttaagaatgacttcggggggaggaagaggtcaaagatcatggcatgctcacctatggctcaaatcgacggtgagggcttgtcctctggtttgaagagtaaggcacgcgttgttcggatgtgagggtgacaatgagatggtggctggactgtgaggttctgcggcaagggcatcgatatttataggcagaggaacgacagtttataatggagggagtctcgaccggcgtactgtgattggcgacgttgccacagtgcagtcgcaacatcccgaggttggtagggtaacttggctcatggtggggcattcatttagttgtgattatgacaagtgactggcgtgtgctcagacgggtgcacgaggtcttgtcgtagtgactttctgcactgaggtatcacttcaaggtctgcaacccggccctttaatatagcagtttggcgtgcatgacaaggctgtctcagggcagagggtgtaggtggggcttgccaggacgcacaaatgccaaggcagctagaggcaggcttatgatttatttacgcatgtgttttgccataggtggttgtgggctccctctgt

SEQ ID NO: 96879 - DNA, 836 bp, Zea Mays
ccgaggcatatttgatctgaatgctcttttgctcgcagaaatcgaagaactctgagcttgtgaaattggatcccaggtcggttatgatgttattcggtattccaaacctgaatattatgtcttgtatgaattccactaccttagctaaagttagagaagcaatgggtttgaactctatccatttagtgaatttatcgatagcaaccagtacatgagtgtatcctccttgagccttcttgaaaggtccaatcatatccaatccccagcatgcaaacggccaagttacgggtatggtttgcagttgttgcgctggtagatgttgctgttttgataagtactggcaggcttagcacctctggactaactcggctgcatcactctttgttgttggccagtagaaacccgacatgaagaccttcccaaccagggtcctggatgctgcgtgtatcccgcattgcctagcatgaacctcttctagcagttgctttccggtggctgagagaatgcaattcatgaggactcctgatgcgccccttctatacagtgtttccccaatgagagtataatgagctgattgccttgcaattctttctgctgcatttttgtcgtctggttcctcctcattttttatgtacctgatgatcggctccctccagtcaccagaatttgactctggttggctcagagcgttgcattcctccacccgatctagtgagatgctcaggtgcagtatttcctatacgaaaactccaggtgggacctgagtccgactggacccgagctaggacaatgtgttagctgccgtgttgcgatctctctccacatgatgaaattcc

SEQ ID NO: 96880 - DNA, 605 bp, Zea Mays
taggttcaaaagtgagttgggatcagttggcgatagtaacccacccactcggatggtcggggaactggactctggagccctatgtgatctacaaagggggattgattgcgggattggtgggtggcgttgacgaggaagtttccattccgtcttcaatggatcttcgtcttcctagtgtcaaaggcatgctgacagggaagtcggtgatgcccaagttctgctcgagtcaacgagcttcttttgcagctgtatgcccccgactccacagttgccaatccttagttgttgcaacttctgctgaacttttgagcctcaaaaccttgcagtccgcagtcgtatggccactgttgcttattagtcacttgatctgaaccaaatcacaaggatgtcacaattcttagaattctgatttcatttctgcgaaatttgagcctcagaatttggtttcaacggggtggagagattaattgtggatgtctcgcttattatgcttgcaatttcaatgcttttcacccagatggagcagaagggcgccggtccgggagcacggagctcccacgccatcacgctgctcgggggcacggcctactcgttcggcggcgagc

SEQ ID NO: 96881 - DNA, 355 bp, Zea Mays
aaattattcatgtagcctgcttccctcttaagggatgtcttcacgcccccttcatcacgaaaatgattgaagtggtgactcaatttcgctatgagaaaggcacaagacatctatcttacacccccttctggattgatccaaacaacccagcagggcgtctgaggaaagcgctctctagctctcatcgacctgctgctgccggaccctcgcgtccatctcctggtcacggatctcccacaccacgtggtcgtggtcgaggtcgtggtcgcgggatgggtgctcgtctggcccatggtattgcagcattcttttccatgtgcagaagtatatcttcagatgtgcatgagctggctcg

SEQ ID NO: 96882 - DNA, 1485 bp, Zea Mays
caaataactaatgacgccgaaggccatcgcattgtcaacctcatcatggctgaagattggcgggccctaataactttgtatctgcaaggccatttccacccaagtgatatcaatgaggccaaatgcctcaagcatcgaagccgagatttcgcactagtcgggggctagctgtacaagaaagggatcagtcagcccatgctaaagtgcgtgactgaaaccgaaggcattcaaatccttcgcgaagtccacagcgaaacttgcggcacctactcaggacctagggccctcactgccaaggtgatccgtcaaggattttactggcccgcaataatctgtactgcgaatcaagtcacgaggtcttgcgaagcatgccaaaagttttccctcgctcaagcaacccttcgcaattcaccaagctaatcgcccatacatggccacttcaacgctaggggctggatattgtcggaccactgtctacggctcaagggaacctcaaattcaccttcgttaccgtcgagtacttcaccaagtggatcggggccagagcagtatccacaataacgtcgaagaccgcccaaaagttcttctggcaaaacattgtctgctgcttcggagtcccatccgaactcacagtcgacaatgtcaaacagtttgatagccaaaacttcagggatttttgtttctccatcggcaccaagcctgtcttcgccttggtataccacccgcaatccaacagcgtcattgagtgtgccaatggcaagattttcactgccatcaagaaaagacttctcgactacaaaaagggcaaatgggccgaccaactaccttaagtggtctgggccctaaacacgacagaatggcgggcaaccggattcacaccatttcatctattgtatgaatccgaggccatgacaccgcaagagataaagcatgggtcgccccgaacaagcacatcagcagttcccgatgtcgacgaaccaacatccaaagatctcatcgacggagaccacgtcctcgcccaataggccctcaacaaatatcaggctcaaaccaaggcctagcgcgacaacgcggttgtcccaagagagttcaacataggagacctcgtactcgtccggaccacccggacagaatgacggggcaagctggagccgaaatgggagggtccattcatcgtcaagtcgaaggcatcccccagcgcgtacaggctagtaacgcctttcggcgaagacttagagaactcctggaacattgacaacctcctaattttttgtttaaccctcagggcccatgcgcccttgtaattcagcaaacaatattattccggcccgcactcttttcctcccggggggtgaggtttttaacgaggcggagccatgtaatataccagcaaaagcccataaactcaggtgcaacatgtcgaaaaagaccgcttcgatggtcttcggcattcgaccaattcgaaatcaccgcgacaggtagcat

SEQ ID NO: 96883 - DNA, 411 bp, Zea Mays
ctacgcgccggatgacgtcaacacctaagtcaagaagatggcccgctttttgtaggggctcagaccagaactcaagaccatcctagccagccaagatttcctcagcttctcgcacctctccaacaaagccatgcaagtggaaagggcaagggaagaagaaaaaggtcacctcaagaggaaattccatgtcctccgagctcagcagcaaaaccggcaccaaagaactcgatcctttgggtttccacccaagggacaaagcttcattagactagctggacccactccgtcacggttcagtcagtagagttagagctcctttcatgccccctcggttgcaagcaaccaaccaccagcaaatgtgtgttggtactgcagagaccccattcactttaagaacaactgcccctagtt

SEQ ID NO: 96884 - DNA, 1109 bp, Zea Mays
ctagtgtcttgggaattgtacttatatagttcacctttagaaaattcaagggaacacaattaaaaattcctaaggtagctatctagagagctagattattctgtgaggaggcttaactatagaaacaagacatacattagatgcaaagtacttgacatcgagttagtttattaattaggtgaatatcagatcacaagattgttaatcccaagcgtgctgcagatacataccgcattgagattcgcacaatgggaccctacgtgagttacaataggtgacacttttaaaacttctataagtatctgcagtttagtgcacacaagggtgcaaaacgttagccaaatggtaggaagggaaaccctacaaagtaaccaaccaagagagctaagactacgagtctgcaacttaaagctgcttcttccttctctgagattttgtgctagcttttctccaaatttagttagtctttgataagagcagagccagtgcttagtgacccaccttgtttggccccaaagaaatatatggtagtcccacactgagtggaagaaagggttcgttttagctccagtaatcagcagaaaccagaatcttttagctacttcctaccgagtgaagtttgaccatacagattaaccgttaggttttgtagctggtaacttcttgtaactagaagcaggtgagcactgcttgagatatacagcatctaaccagtagtttgttgtactgtgtaaacatatggatgccatcagaagtgatgacatagagaagcaagatgaagttatgttacctggattcaggtttcatccaacagatgaagagcttgtcaggttttaccttaaaagaaaaatccagcagaagtctctccccattgagctcatcaggcagctagacatctacaaatatgatccatgggatctcccaagtaagcttctgtgcacctcttccccttgttaactatattctatttctctgcacaaatctgtaaagagctaataaagaaaattgtttgttttaagataagcttagttcgctacatgatgctccttttctgtacaagtaacgtgggacatgttttgatactatgaatcttagtaaatcttcaaaaa

SEQ ID NO: 96885 - DNA, 921 bp, Zea Mays
tctcttcttcttcttcctcttcatcctcgtcaaacacaccgccagcagcctacaaatcatcacaaccttcaatgttaacctcgagaatggagtctaccgggacatcatcagggatcgacacaaaagaaccagcatcttgatccaagcatgatagtcaccgaagtcacctctttttcttcttctccttgacaggtgcagtcgggcggttcactcggcgtgaacactttgggctagcacctttagatttccggatctccacctcttcgccaaattcttgtccagtcgcgatggccaacggctcggtgcgggtagagtcggacgattccccagctagcaggctaagcacggtgtccatctcagcatcatcggtgctagctggcatttcgaagtgagttgcctctcagccttaggaagactccaaagtggagcaatcaaggcctcaatgtcctcgggagagggtcgcactctatgacctggactaccatcacaagcaggagggttggagacaaactcagagaatggcctatttggcggcaggttccatgtagagtaagctacaggagcaccagcattcgagactctgcccctcagaatcatatccagttggctcaacaaatcctcattaggaatctttctgtttgtaacccgtgtggaatcactgatgccagtatataagtaagcggggtaaattctgtccttcaaatgttgaatgttttcgaagacgaagtcagcaaccacagcttcagcagtcagacccccattccttagcaagcagatctcaacaagtaatactttggccttggttatctttggaaaggtgggagattctacccagctaggtgcgcgaacatctggttgcctccctgaccgagggggagagatttgcaatgattttccacaatgaaccactcaagacgccat

SEQ ID NO: 96886 - DNA, 478 bp, Zea Mays
ggagaggtcaacgacatggagggcagagcaggaggtggagacggaagcgaggtgagcgattctcggggccaagcctatgggggatagatatcccctaggcccgtgcaaccaggattcagtttgtgggccattaaaggtcctccatggtacagatagaataaaccacgcaggatgaccagttgtacgtggccagagagagacgcgggaatccaaacacgtggacctgaagcatcgcaaccaacccccatgcatgcagggataagataaaccccacagaggatcacacactaccatgtgagtcggagtcggtttcacgcatctaggcattacgacagtagtcagtttagtctcttgtaaccctaacctcgtcggataaataagacgagttagggaccccttacaaaatgattgtatcctctaataggctagctagagcatagacctcatacattatgtaacctttaactcaagagcaatt

SEQ ID NO: 96887 - DNA, 597 bp, Zea Mays
tatgcattggctctcaagtaatttccaggaaatttatgcaatgtctatttcaaccggattcttatttgggagatgaggtaatatattttttggtacgcgtgcacacacaaatttatgtatttgaactaaatatagtttttgtacatgtatttgcagatcataaattcttacatatacttattgatgggagatgaggtaatatattttttggtacgcgtgcacacacaaatttatgtgaactaaatatagtttttgtacatgtatttgcagatcataaattcttacatatacttattgatggcataagaacatatgaagcagcgtcctggtggtacagtccacatagagattacatttgtcagtgaattttttaaacgagatgctggtgatgatcgagaatttgatgatatatactgtgaaactagcgaaagatctcaagttgagcgaagagtattattatatcttcaacatgacatggtaacaaaataatttactatatagtatatatatgagtttagttataaaatcatcgtatgatacttgtgaaactactatatatataagtattttgcaggtgttcatacctataaacattcg

SEQ ID NO: 96888 - DNA, 517 bp, Zea Mays
ttttgattttcttccttcacccttggctcttgtccgatgcttcattttatgctcccctctctagggggttgggaacatcacggtctgtctgccccctcttcctgaagacgccggtatcaaggcggaccagaagcggaagcatgaggtggaggagttagttgtggtggtgcgtttaaagcgtcgtcataagtggaaaagggagaagaagtgggtcgtctcacctgtgccaagcctaggaagagcgttactccatccacggacatggaggatttgacttccatggattctagcggggcagggaatccctcgtccatgggcgtcctcgtttgtcctgacgatgccaaggcaaactctagtgctttcgctcggttgggtggttctatctccacgctcactgctccgacgaccacgtcgttagggcttcaccacggaatgtcgggggcggccgagccatccttcactcccctagtgttggcaggacgtgagatggtgtcgacccctctagcgccgactaacc

SEQ ID NO: 96889 - DNA, 333 bp, Zea Mays
cttcgattatctcgacagtttttgtcttgctagctttagcaactgtcagtgcaggcagttttgatgatctctcaatgtagtacgtctttggccggtgggtcagaattttggctctcttttgctttgacgtggaggaggtctttggtgcactctttcgtttcaccacctttttcatgcaggaaagcggcagtcacgataaataaatccgatgacatcaaacactctatttaatttcctttttcctcgaccaccaaaagcaatatttaaggcttcgtcttcagccttcgtaaaagcacctaacatttcgtcacaagttgattcaatagcttcaag

SEQ ID NO: 96890 - DNA, 509 bp, Zea Mays
cttttgggtagaaggcgtcacagattgtgactcgatggttcgtgttgtagcacgaggagggaaacacacaagcttgagcaggttcgggtcgctttgagaggcgtaataccctacttcatgtggtggtttttctgtgttgtgactactggaatggtgggctgttaatgatatgaaaatggtaggggtgcctcctggccttatatacacaaccaaagagagctcccccacacaagtgttgattacaacctccttgcttatcccctaattagtagcgaacagtcttcctttatcttagggaaatctggtgctcctgcgcccgagttatcgccagtggttcaggatgtcgggtgggcggaacaaacccggcccgacatattcatgcttacgcagcggctaactcggacgtgggcctctttcacatctggactggctcgcttctgctggttccgtttatctggccacagcgagatgcctcagaagggcgcctgctgtggccccggacgtacttt

SEQ ID NO: 96891 - DNA, 496 bp, Zea Mays
tttatttcttaaaaatagtgagaacttaggaaaatcctagaaaaataacccttaggagaaaccaccccaatccttgggataactaatattatgctagtatgaatttaggaaaaatatgagttttattgtttgatatttttgaaatgacaagttagttataagtacatttttgacattaaactttagaaaaacacaactaaataaccattaggtcactttctgtgatttttggcacagagacctattattacccatgaatcttggcaaaaataattttagtccagaagcctcaccaaaatgagagctgtagtgaaaagtgaccttttaccctcacttttgtcgtttcttcccaagggttatctaaattaattccaacctcaaaattttaaaatagactacacagaccaatgtttacccactgtaatttttgcaacatttttagaaaattctaaattaccatgggagttcaaaggcactcaataataagcataaatag

SEQ ID NO: 96892 - DNA, 404 bp, Zea Mays
agtaaagacctctaccggtactttttcagcaacaggagtagaagggccaacatcctggtccaagcacgacaatcaccgaagccgtctctttttcttcttcttttcttcaacaggcgcagccggacgactgacctggcgaagacgctttgggtgagtaccctcaggttttcggatgtccactattctgtcaatttcttgtataacagcaacaatcattgttttagcaggggtcgagtctgaagaatctccagccaacaggtcaagcacaacattcatttctgcatcatctggactcgctggcatctcaaaatgaacttgcttctcatcattgggaagatcacaaagagaagcaaccaagacctcaatatcttcgggagagggtcgcactctaagacccaggccac

SEQ ID NO: 96893 - DNA, 280 bp, Zea Mays
gtcttcgcgtggacgggactggtaagcgagaattgttgtcctcgccgattggggtgagtgtaggtgagggggagctgcgaaatctttttgagggtgaggaattgaggataatgctgttcaactatagggagatgggtatcatcccgaaagttgagccaatgtaatatatgatgccctcactgtgagtatgtaaccataatttgtatgataaggttgcgcgccttcgttgatccggccgcgcccgtaggcgacttctgcacaggaacgacttcaatcttta

SEQ ID NO: 96894 - DNA, 361 bp, Zea Mays
ttgatgccaatagaattcgccagagcttagttgatagaagagacaaagtaccctgtcgagcatgcgtgtcaactcgtcagagaacattttgctgccagtgaggccatcttgaggagcgactggtacactgagactactggcacctccaatacgatactgctggtaaaacttattttaggctactggcacctccagtacgacactgctggtaaaactcatttcaccctcctataggaaagggaagagacaacattctttcgcatacgcagacatagagccaacattctttcgcataaagtcctgaacctatggctatgaactattctaaaatttgacttgctaatttgtgtgtgtgtgtgtg

SEQ ID NO: 96895 - DNA, 566 bp, Zea Mays
caatatacacaataccccaatgcggggatcagacggcggatgcgagagggagagaaaatacaacatgccaccagatctagcgcgcgtacctgagttagatggacctaggacagcaccaccatgactgctacgacatctgctttggatcgggcggcggcagtggtggaaaaccctagatgggggagaagccaggatgggattcagatcgtcgtaatttttctcctcgatagctctcatcaggaatgctctagcctgttgaagagaaaaggaagagatctcgctggaactcggatctagatccactgagggacggggagggggaggagtggatcgggggcagtctcacctatgctgcgctgaatgtgaaacccgaaggaggaattggggatcggagacggagcgaatggtaagtgtttctccctgaacctcggcacgagggcaaatagcgacagcggcactcgctgcaaggggcacaagaggttgttgtcttcgtccggcaccgctgatgacatggccactgtcgatgacgagggccaccagcagctctcccttgttcttggcttcgc

SEQ ID NO: 96896 - DNA, 331 bp, Zea Mays
acttatatatcttttcatcactcacttctcaataacattaattctaaaaaggtagcaacaacctcttccagttaaccatcaaagagtatgtgaaccacgattgccaagaattattccattagcacaacatgctgtatgcaaaaaggtatatttaagtcaacactaaaaaaggcgcaatgccactcaagctaatattcttttgttttctcaaacacactggagggtagacggctgtgtatctttgtagtttgtattaaaaagaaaagaggccaataacccttacaacacaaagccacaaatcctgtattctcaaacctatattctgcctgtc

SEQ ID NO: 96897 - DNA, 360 bp, Zea Mays
gacgatggtccggtgaccgccgattaaccgggcagtgccaccgcaacattttaacaccacgtcgcggatgatctttaccatggccgcagacccatccccaaccgcggtggcgttcttatcgccggcgagatctttctgaagttcgatgaacagtgtgccagtttcgattaaaaaatcgtttgacagcccatctttggatcaaattatctccaaattcctcatggcaccaagacttaacacctgtagcaaagttgttcttctacaatggctctacaactttgttacattgacctaggtcaaattctttgaatttctcgatctacagagctccaaagttagccctgatcaactgttttcaga

SEQ ID NO: 96898 - DNA, 630 bp, Zea Mays
ctgcatcatgccccggggatgatcactgcctttgtggcccgtgcccacgtgcccatgatcgacgacatggagctcataggaatgatcaatggtgatggggatcttatctttgactccctctgctcaaactcagacttagatcttggctcctcgacgagcaacgaggatagtcccctggcgacgaggaggccatgagctatccgtccctcacgatcccaaccacccttgcatgtgacctatgctcctcgaaagaacaaacatcgctagtggcactagggaaatgaggcactatgcacgacaagagctagagggattgccaagcatgaggctttcgctagaaatcctttgtaggtcctggtaggagctagttcctactccgcttgtaacccttaacaatcatcaataaaatgtggtttcaaaactattgtctccacaaggtgtaggaaagatgtggtaagtcttgactcgggggcagttctctccctctccctctctccagtggctaacatgacatatgatgggctaaacaccagggacgcgggtcgaccaacgacgatcggtgggacaataggtggattccttcactagtgaattagctaaattattttacccctcaaatgctaatcattt

SEQ ID NO: 96899 - DNA, 330 bp, Zea Mays
ttcttccccttgccacggacgtcatcacaggcataatgggtacaggctgaggagactaaatcagtttcgatcttgacctctgagcgtctggtgggagccctagcttcatcagagctagaaatttgaatgggtgaggaggcaccggcatgagcatccacatcatctgggctatggtcatctaggtcgtcgtccacggtgatggcgcacggcagaggggtgagctattgtgtcctggacctcacggcggtgctgggcttttagacggatagagagtcaaatcgtgtggtgaggtcgtctaggatgtctagtatgctttcgctgtcatcctag

SEQ ID NO: 96900 - DNA, 753 bp, Zea Mays
ttgcactatactgaccatctgtcgtccatctccatgagatggtatcttccaaattgttgagctcttgcatggtaccgatggcctgccaaagggatacaaaatcttttatttcctcttctcttatgcatgtgaggcatagctgggtccagctattgtttctaagagcttgaaaacccaaaatgttcttcttctttgctttcttgaagagacttggtgcgatattcttcggtgcttggtcgtgtatccaactcgatttcaagaaattggttgttcttccattaccgacattcactaatgtggatgcattgaaaagatcttcgtcggctttgtcacatggcaattgcatagcagcccatgccttagctctgtccttccactgcatccacaaccatctgattcttaattcccttgtaaaatgctctaggcctagaatacccagatccccttgttctttggcaaacgagttgtagactagttgatcaagaagtgacctccgttgcctgattctaggttgcttcctttccagagaaagtttcttcttatcttatcaattttttgcaataaccatttttgagtcggaaaaccgtcaggtgataaataggatgggcagttaacacagatttaaccagggtttctctacatgcctttgtcagaagtctgcctttccacccagctagccttttattgattttttccacaaggggttgaagtgtaatccttttaacgtttctgaagtgaagagggagaccaagg

SEQ ID NO: 96901 - DNA, 1022 bp, Zea Mays
ctgcctttcatttttacttgaatccgcatggtgtcctttgatctaatgtctgtcagagcatgtagagagataactgtttctggctcctcatcaacttcttctatggcagtatcctcttcgaagtcagctacttccaaatagaataaccgagggcatcgatggccgcgaacatattgttcatcacagttgtaacaaagccctagctttcggcgttctgccatctcgccaggtgtgagcttcttgaatggtcgctgcggcgctgcattgcctatggttggcactgttggctgtgttgctgggattggaactgatggtggttggggcggtctcactggcttggtgggtgctgctatgacgttgccatcaagcacttgagaacgtcgttcatatgcacgcgccaagcttagtgcgtgattaaggtcccgtggtgccatcaactcgacatcaattttgatgcattctgggaggcctgcagtgaatagttggactttttgttcctgggtgaggggcgccgtatgggcaagaaggtcccaaaacctctcttggtagtcttgtacggttgtctggaagggaagccgagccaattcaccgagagggttgttgcacagcggaggaccaaaccattgctggcaggactgcttgaaagaattccatgacaatggtggctcgttgcgctggagttgacagtaccaggtttgagcgactctcgtcatgtgatatgaggcaagccacaccttcttctcttctagcgtacgctgtccttcaaagaattgctcgcatgtgttgatctatccaatgggatcttctttaccatcaaacaatgaaaactccagtcgatgaaagcgaggaacacttgtcactagttgcgagaatggtgctcctaaatattctggtggtggtgggagaatgatggtagtggtaatggggaatgaggaaggggtagacgatggatttgaaggggggctgtggaggtaggatgtgtcgtgactagcaaaggatcggtgttcacctgtaccttgggg

SEQ ID NO: 96902 - DNA, 389 bp, Zea Mays
acctgtcgcacgttcctgttgctcgaccaccggcgcatcgcgggtagggcgagggcctctgtccgttcctgtcgtcgccatgtgagctgtgggtgacatcgatgaccggcgaacgctttgtgagggacccgacccatttggtatacgctggcccaactgagaggatatatacaaagagcagcaacagttgaaaggggatagctggaaacaaacgaaatatgttcttattccttaccaagttatcttagttctatactacattcctctatttcttctacctctcgttgtaatcgctaccagttcttctaccttccgttgtaatcgctaccagttcttctacctgctgctataatcgctaccagttttgagttgaagcaatacataccgca

SEQ ID NO: 96903 - DNA, 368 bp, Zea Mays
gccgccaccatgggaatcgagctccatcacccgatgaaccttggaatatggctccatggatccttcttaggtgcactgggtgtgggagtggtcgcttcggacaaaggaaactgactggggtcgtacaattcctcaccaggagcaaggtgcaccaccatcatggcgttgccgagcagaaaaggagcagatgccgctttccttggccttcaccgccgtttgaaattcgcggcgtggtcaaggatggctaccaggacacgtgcatgctcgtcgtggcgtcgatgggtggagaagaccaccgtttttacccaatttttcaccggagaactctactcgacgcgaggccgcgcgacatcgaagtctgcatgtca

SEQ ID NO: 96904 - DNA, 592 bp, Zea Mays
gaaaagtcccagtgggtgcattaccatctccaagtgatggtatccgcagaaggtcatcagggtcttcatagttgcggcctcggtggtgtcgtccgccctgaacccaagagtctcggagttaaaggggcgccaacctggctacagagggtgagcctccagagtcagccaaaccctacaacgtggcacccgatgctcctcgtatagctgcaccgtatacagaggggtgtagggtaactggcagagcagagcacatcccacaagatgaagggaaagccctcgtgggaaaggtagtcagaactgaaacaagtgtctcctccattgatgggggtaggtgaagtcatctgtgaaagagggttagacgtaaatgttatggtattggaaaggaaaaacatgtgcccgggttgttaaaaagggggtgggttaaattagattcctagtgagatgcatttttccttagtttctagtttctccatattttataatgcatgcatgctagaaagacgtctcctcactgatcagaggggtgcttcttaggcatccttacaattctaagactggcctatatggcctacttatatagccacctggtttc

SEQ ID NO: 96905 - DNA, 501 bp, Zea Mays
gcggtacagaaaattgttgctcagtggttgccatcatgttgatagtgccctgcgaagaggaagtagtcactggctcccatttaagtttcccatttggattcctcctacacaccacatccttgtgatcctgatcagatagagcacctgccactccactgacactcagcacgacgatgcgcttcaccacaacggaaacacaccaaccccaacctaggcttaggaacaacccgatacctctgagtactccctcctgaagtacccgatttggaggacttgccacaataggggtggtggcgctattgttgagactttcccttcttgtgggctagacccccagtgtagtctctcctcccctcttggccacgaggctagtcaacacctagagacttctgggattcaattgtgtactaatgctgcatctccacgcccaaagcctgctccaccgtagttcgaaaatccaccagcggaaaggcgcccagagcatgcctgatagagggtttc

SEQ ID NO: 96906 - DNA, 395 bp, Zea Mays
attgttcacgcaatccaaggatttttcgaagcatctttccttggattcacgaagctcctcaatatttttctctagcctagcttgtgtccattcactgatctctttgctaggttttgcaactgcatagttttcattggccttggcaagctttttccgaagttcttcgacctcggcttttgggcttcagcctgagcattgtatttagcttcgtcttctttcattttactcaccaatgaaatcaaaatcttatctttctctagaccttcgtttctcaactcaattacctctgagcgaaggttgctgagagctattgtgcaactttcatctttggcgcttttttgagccctcaaggcattgctaagaattaagccctgaaagaaaaagaaagaattaag

SEQ ID NO: 96907 - DNA, 276 bp, Zea Mays
gtgaatttccctggagcatctgcaactctagcagtgtgatttctctcgctcctcgcaagttgccactgtttgtggtctgatgtctgaagaaaacacagcagtgggtctcggctctcttgttctctagctaggggccctcttgcctctccagttaaacaattcaacggtagctgtagttgttgcgagcacgggggactgaactgactgtgtgggtgacagcagggtaaagaaagaaatggttgtgactcctctctgctttgcttcaggctttactct

SEQ ID NO: 96908 - DNA, 357 bp, Zea Mays
gccgaaggaaggtggtggtgctggtcgactcggcgagggagttggtgctggtgtacgaccggtcataaacgtagtcgtgcgctgctgccatggtgtagattttcctgcagaaacattagaccttgcactagcacgtcatccctgcacttccctttcagctttgcaagcaagatgaaacaatacgttagcataatctttataagcaaggatgtcctgaatttccctatttaacccgcccaaaaatctagccatagcgattcctcaccctcctctatgttacaacgcaacatacccatttgtaattcctgataatattcttctacacttttagtaccctgtctcaattgttgcaacttg

SEQ ID NO: 96909 - DNA, 627 bp, Zea Mays
attcggtgggggccatgcggtatggtctttttgcgattggcgtggtgccagggattagatcaatgtagaactccacttctctttctagcggcattcctggcaattcttctaggaatacatccataaattcttctactacagatatgctttcttctgctagattaaacaccattgggtcttgggtgggtggctgagcctgacaggaaactgactttccttggtgatctttgagaagaatggtattatctgcgcaacttatgacgccattatgcttggttaaccaatccatccctaagatcacatcaattacgtgggatggcagtacgataagtctaccaagaacactaccccacttaaaagaatcctgacttgggagcatttgaggtggcatagaaggtctgcccctagggttcgggtgaccaagggaatttctagatatgcagtgggaatgccatgcttttccacaaaactagtggctatgaatgaatgagatgctcctaaatcaaaaagtacagcagagggagtaaattcaactaggaactcatcgagcactactcccggggcttgttgagcctcttgagcgttgacgtggttcactcgtgccctgccatgatactgggtcttgct

SEQ ID NO: 96910 - DNA, 496 bp, Zea Mays
tgtcgcagtagaccacggtggcccgagtgagtggggagtgtagttccagtaagagctggcggagccacgatgcctcggcaacaccatttgcaacagcacggtattcagcttcagcactagagcgggacacagtctgttgacgtttggaagaccaagagataaggttgtcaccaaggaagacaccatagccggaggtagatttccgagtgtcagggcagccagcccagtcatcatcggtgtagacgaccaatgctgaggggtccgtgcgatgaaggagtagcccatgatcaagagtgccacggaggtaacgaagaatgcgcttgatcaagactaggtgaggcatccgggggtcatgcatgaaaagacagacctgttgcacgacgtaggcaatgtcggggcgagtgaaggtgagatactgcaaggcacctgcaatgctcccatagtccgtggcatcgtcgacagggtcaccattagcagagagcttggagtggatgtc

SEQ ID NO: 96911 - DNA, 500 bp, Zea Mays
gttggccggtgtcccaaaggtaattgggaggtcgatttgcccgagtgaggtcacccgctttcctaggacaaccccatgaaagggtcctcctgtctgtcaaaggtggccctggtctaatcccatggcgtctagcgtagcagagtaaaggatgttgagcccgcttcctctgtccatcaacaccttcgtaagtcataccaaccccatgatgggactaacaatgagcgggtatcgtctgggccgggggatatgtttcgggtggtaagtgcgatcataggtgatggtttgatcggaccagtcgaggaaaactagagacgcttgtcgagcctagagcatttcacgtcgttccgacttccgatgtcttcttggcgtgtagtaatctaacccccctaaaaatcatctggcatccggtctcatctcggaacgcaactcctgccttctttcgctcatcgccatgcctaggctccaccccaatctcaggcggtgtttctccaccaaggaac

SEQ ID NO: 96912 - DNA, 458 bp, Zea Mays
gataggagaagtcctgaaaaaattcgaaatatatcttcatcagctgacccctaacaccattgttgggcttagcgtcttcatctgggccctccgaagccaagggatgagcctagatgccgaagcattctgtcgagtgcatgagttgcactaccagacgaaggctagggcagacgggctacatgaaagttttggttgctacaattttgcgtatcgcaaggatacgaaggctccagtcctcagttacgcaccaaatggccaaccggctggaaaggtgaatggttttacatcaaggctgatgagaagaagagagggaaactgatgacgatggtcatgtgcccgttgtccttagtttcaaaatgaccaggcccctgtgcaacatgcagctagggtcagtatgccagctggccgaggtggaattctgagtggtggctgaacaaatcagcaccagtgacttggtg

SEQ ID NO: 96913 - DNA, 383 bp, Zea Mays
ggggtttgctctattgagaacacgagaagcaccgatatgtccgatgtgcaccagacatagtatattagacaagacacccaaagagcttacaaattagtattcatcagacttgtttggtgtgccactagatctagcatcagacatggtacttagagaggctacaaactatgtcaagagattgaatactcactgagtgtgtctggtgtgccactatacatgtcactaaataagataccaagaggtttgcaattgtgcacctcaagtgttatagtcactgaacgtgcctagtgcaacatcagtttgagcaccagatcctagtacaataatggctactttctagaaactagtagttgtgaataggactgagcgttcgggttacccga

SEQ ID NO: 96914 - DNA, 602 bp, Zea Mays
gcttgttagaggttgttggtcgagatatcaaggtcttagaggttgttagaggttgttggtcgagatatcaaggtcttagaggatgaccgtaaaaggtgatggacaaggcagtctgggctgaccgcatcttgacgaatagacccgacgttgtggttcctgatgatatcatggctgacgttcttgtcgcatcaggtacttcaagcaaaaatccaacttctggtgaacccgcggatactattcctcctgaaaatgctcttgcataatactttgtaatcatcgaaagccaaatgttggttggttaagtaggaagtggttttcccagacattctttaacaatttggatctgagttttaaaactttgttgatagggcatggtatgtgttggaaccgactgacacgtggttgagtaggcccaaacaatgggaagtaggaatgctcaggtgctcaacaaaacagtgagcaatgaacagaagtgtctcgttaaacgtgtcctgtcaatgtatagtgcggggggtatttgtaggtaaccaagtgggtgggcatgccgttctaagtacgattatgccccctgttacctgttccttgtgacaaaacctcccaag

SEQ ID NO: 96915 - DNA, 592 bp, Zea Mays
ttcttgcattactatatattataatagtcaagtgctatttgtctgactaaagatcgaatatttcatgaaagaacaaagcatattgatgtaagatatcactttattcgaggtgtcattgctaaaagttatgctaagatatgcaagataagtactcgtgataattctgttaatgtattggcaaagcatgttcctcaagctaattttaatctatgctcaagcctagttggttctacaagttgaagtcctagtggattttggtgtcggtgattatttattatgtaagtaagttgattgatgatactttatttgctataagatggaatttgtctcaatgtcgagtttgttggaatatgatctgaattctaatgtgagtcttgtagataacttggagagtccatagttttggttatgctagtcaacagatttgtttccgtattatttcatgagaaaaatgtgttatttagatttttctcgcattgtaaaggttgacaattgacactcatagttttttcttgtgtttgatctatatttgcattttttgccaccgcaaaccctccaaagagcagtagcacctgctagtgtgcagttggcc

SEQ ID NO: 96916 - DNA, 699 bp, Zea Mays
gttcggaatcgggatttgaccctggattctgttggaactcaaatcaagaaattccaaatgactattagggagaatatatgaagtgagctgcaaatttgtgaatgcgttgtttgaaagattcaaattcctaaggctatggtcccatgtgtgccatatccaatttggaatagtcccaagtatcttgttgcaagaaaggtccaatatagtgatatgatcaaggtgtaccaagaaactaggaatttcagttaagccacatgatttcagatctaattcagtgagctttggtaataaccggaatgtggagttacttctttttccctccttgatatacagcttgttgttggataaactcatttgagcgagcttccgtagtttccaaaaatcatcaaggtctacaaaacctgttatgttatttgagctaagatccaaaataaccaaatttatgaggtggaagagtgctgaaggaatatttccgctgattttattatcatttaaagtaacaacttcgatgcacgaagatagtgtatggaactcttgtataggtccagagagttgattcgatgaaagatccaattgtaataatgatggtaaagtgaatagaaatgtcggtacgccccctacaacgaaatcatgggtaggctatgttaagttcgtgtttagagagcaaagtgcatattctgtgaaaaaaggtagtaaata

SEQ ID NO: 96917 - DNA, 662 bp, Zea Mays
tgtgcttatactataagggaatggctaagtagtgggttgctctttgatgactgacttttattctcttgagtcttcacaaaagttggcatactctgcatttacaaagaagcaataacagggtcactgatagctttgtctatcaaacaaccttcataaaaactctgtatgctaaagactgttccagagaaccataggttttgtaagaagatttgcttaacaaagactctaaaagctatagatttctagtgcacgggtcctacaaaaaatagactatgatatttacttacatttcagaaagagaaaacactaaaaaatagaactcgaagaaggggtcctaaattagttagttgttaaagcaattaacaaaccataattgctcttcaagccgaggaaaacatttgttttttgaaattctaagggaatggcaaaacatcggactgttcatgatggggaaattctttttcttttgaaataagtgtatataccctacaatctaaaaaaagtcaaagccaaggacaattttatttagcagacaaatggaggtaataatttgatggcaggtcgattcactactggatgaaattgcattttcacaaattgtagcctccctaagctcttggcacgaacaaatcatacgaagtcaaaaaatctgaactcccttg

SEQ ID NO: 96918 - DNA, 425 bp, Zea Mays
ggagacgtaatgtccagcatgcatgcattataaaacatgaaaagtttagaaattaaaggaaaatgcatctaagtaggaatgtgacaaatagggttaataaggaattgtgaaatgggtagatgaatcggatttaacccacctccttttaacaacccgaacacatgttttttcctttccactaccataatgtttacgtctaaccttctttcacagatgacttcacccacccccatcaatggaggagacactcgtttcagttctgactacatttcccacgagggtttcccctccatcttgtgggaggtgctcagctccgccggttaccctacaccccctctgtacacggtacagttgtatgaggagcatcgggtgcattgttgctgggtgtggctgactcgggaggctcaccctctgcagccgggttg

SEQ ID NO: 96919 - DNA, 1137 bp, Zea Mays
actgacgtcgaacaaacattataatcaagaaaatcttattgatctcggtcaaaatactgaaccaagtagtagcaagaggctaagaacttaggaaaatgattttctaaggaatcttcagactcctaggtagcttcttcttctgtgtgtgttggttccattgtactttgtaaaacttgagagtcctttttcgagtaactcggtctttctaatccaaaacttggatgggatattccgaataggttaagtctggttccaaattaacatcagacacatccatagtttgatcagggatccgaagacacttcttcaattgggatacgtggaacacattatgtacagcagacagtgattctagcaactgaagtatgtacgcaacctgcccacatcgttcaagaatagggaacgggccaatgtatcggggtgctaactttcctttaaccccgaatcgactaataccctttatcggtgatactttcaagtacacatgaggttggacggacggtctcttatgcattgactgtaaagtatgcctacgcgaaggccgctgattgtatagtggatggcaattttgtcatcaatcagggcagttgcgacttcaggaggaggaactttttataatagtcatgaaggctttccttttcttgttgtatgcagagggacaattctgccaatgtggttgtttcaggtctatagccttggaagttgagtaggaacttatgtaaagggtcttccaagaatccattgatagaggggataatcttgaataccatgtgagggtggtgccttcaagggcaatgatgaatgacttgtccatagtggtgtcgtctcccctatggatgaaacggtgacttggtagctcataatgtactgtgttgggtttgtgcagtctttgtattttggataagtgctcgctctataattttgtggccacagagaggcctacaactatggtgacaggggcttcgtttgtcaggatagttcaatccttggaaggcaacttatgcgatggctggcctatggaaatgataaatgttttgattggcggctccagcaggctgttggtgggggaggtcttcgcgttgcatctcagcaatttcttgctccagtgctctggctttttcttcctcatccatgatc

SEQ ID NO: 96920 - DNA, 466 bp, Zea Mays
cgacaatggatgggtagctacaagagctgtgggaggttcgaaggtggcagcgtggttgctggcaggctcatacggtagcttggaggccagatctacggcggcagcaggcaagccatgaaagagatgttgccatggcgacaaccaagcgaacagagagaggaagggcgagggatagttattaggtcactcggctagaaaatggatagaggcggacccaagataaaatatgagtggggacatacttacaagaacgagcaccataaaaggcttctaagttgggttgagcaggggggcttatggagttatggtgaaaatccaggctctactacttgcaatagagaaatgagtgggagcctggatcctcactcagccaaacctaaccagaggtctcccgacttgatcacctcgactaagtcggacccaaccaaaatgaccatgactagaattttgtcgacctagtttcccg

SEQ ID NO: 96921 - DNA, 520 bp, Zea Mays
ctcaaccttggtaagccctaactgactccccaaccaaagacgagcctagcaagattggaccaaactatgataggccccaccaaattccccccaatcggagtcgtcccaaccaagagaaatatgttcatgacccaaattgccaattaggtcagatgtgaccccaaaaacatcagaaatagtcatttcggtcgctctgtctcgacctcgagtatgtctagacaagttagttcagacaatacatccctgatagaactcaacaaccccagagaagtgtaagatcgaaggaaggggtggtgcatttataactctctaaccactcggtgcatgcctctaaccgagacggacaacacctggaaaatagctaggtaccatgcagataactccagactcactcctatctgattgcctcgaaaatacaagggaagggaagacaggctataacgagatgtataaggcaaaagatctagaggaaatcgttcgtacgctcctcaacatactctgtagggccttggacatcttc

SEQ ID NO: 96922 - DNA, 510 bp, Zea Mays
agacctcagcgagctagcctgcagcctcccgcacctcagcttcccgcttgccggtgagtgggaccgacgaactaactctaccataatagtttagtggatggattgtacttagcctggtgctgtcaatgcctgctaccgacttacagacttacaaggaaataatcaacttgacttcaaagtctcatgcgacaagactattctaataagaaaagcatttagtgagcaagattttgtagactattcatgacgagtatcacaactatcaccttttttgtgcatctctaggtctgttgttcttgtccatgcaaaaccaatgaatgatccattggcacaactgtacaacgcttcaacaatggtcctaattcctcaagacgctagttatcctaaacctaaaaatttgagccaaacaactacagtgataaaagcaatacaagtatctacaagtttcaaaaccacacataagggatctctaaagactttatgtcaaatacacagattcagaaaatccac

SEQ ID NO: 96923 - DNA, 388 bp, Zea Mays
tcaagacagatcaaagatatgtgttttcttccttgattcttgtcttgtcatgtctacaggactcagaggcagattgcaaaccctcacaaagtgcacactgcgcaggtgcagggaccctcactgagctagccttatcaagcaaagctatcctaccatctctctctgctagctcagactgcaagccaggacaaacggtacacgcacccaacaggatagacctagatctcaactcgtcgcgctcatctagcaaggtggagtacttggtctgcaaagtggtgatgttcgacatgtgtagagcacattcatcacattcagtcttgtcggacacctcaactgaagctctagcagactcaagttccctaagcgtgctctcgtacttggatctaaa

SEQ ID NO: 96924 - DNA, 567 bp, Zea Mays
tcgagcgcaacaagaacgaagaggtcgatgtgttggccaaggcagcagccaagggcgaggccttgccctctgacgtgttctaccacgtcatcgacacaccagccatccgtaaccctgaaggcttgcaaataactcaagataccgaaggccaccgaatcgtcaacctcataatggccgaagactggcgggccccaataatactatatctccagggccactaccatccaaccgatcgcaatgaggccaaacgactaaaacataggagcagggatttcacaatagtcgaaggtcagctttacaaaaagggcatcaggcagcccatgctaaaattcataaccgaaaccgaaggcctagaaatcctccgcgaagtccacggcggaacctgtgggtcacacttaggacccagggccctcgcagccaaggtgattcatcagggattttactggaccgcgataatttgcacggccaaccgagtcaccaggtcatgcaaagcatgccaaaagttctctcctcgctcaggcaacccttcgcaattcaccaagctcatcgcccacacatggccgcttc

SEQ ID NO: 96925 - DNA, 516 bp, Zea Mays
caaaatcgatggcaccactggagcgtgaagcggaggaggtggagcagactgaaccggaggtgctgagataccagaatgctgaagcataagggccatgaatgccctactctcagcccgatcctgaagtaactgctgctgaagagcatcctgcctgtcctgcatgctctgaaacatcgagagcatcgtctcggataaccgtgcctgctcggctgccaggttggccagaatagtcgcaagagcagggtccatagccggaggaggagcaggggcagcacgagaactcccagcctcatgatcatgtgagcgtggaggcataggaggcggaggcggaggaggaaccccaaaatcatcatcatcatcatcatcagctgttgtaccctgagtgtcaaactgtcgaagggctgcatcctcggcttgagagtcaaacacagaagcagtagctggcacaggaatctcaggagtagggcggtaagatccaaaaacaaggcgtgaggcctcaagggtgctctgaaatcg

SEQ ID NO: 96926 - DNA, 687 bp, Zea Mays
ctctggtgaggggataatcatggcggagtaagaatcttggcaccagataggcttgggctcggtcgcggatgagtttcactgtacccacttgctcgccgatcagccgggatagacctctccgccgttggccgcttaccgctatgcgccacgtgctcaagcgttgtaccacgtcgctgtgaatcgcgtcttgcatgtccggtggtcgccggggagcttgccacggtgaaagccactaatcccaagcgccagtaaccttcttcctctccggccgccagcgcatcttcgcgaaattggacaccaccgctgtgggagcctataaattgccaaccctgcctgctccgctaagtaattgtgcacccagtaaaccaaccctcacctcagatcggccaccagagctccccaatttgggatttcccccaaatcaaccaagaacatcgagcggtttgacctcgccgtggccatcgagtttcaggtccgttcatgcccactgtcctcttgtttcagcacacttacttgctcctgatactcgctgacccattcaatttagctaggcggtcctagatcactgggaacacgtttgattgtccgtcgtgcccgctgtcaccgtggacagagcgtgttagagctctgatagtgaaattagttgaggggaaacgcttgttagggattgaattaggtctgcgccga

SEQ ID NO: 96927 - DNA, 549 bp, Zea Mays
cagtgcccactgagacagatcctaccatagttgaagaaaaggcgatagagcaaattgcatctgaaaaggtcaaaactcatgctcccgaagcttcaaaagaaagcactaagtacatcattcgtcatgcttcgagaaaggaactatctcaagaagaaatgctagaagcacggcactatgcccaaaaattgaaatatctgaagggggcattagtgtttaatggaagcaatgaagatgatttcctatactgtctcccagacaacaaagaaatatccgtctgccgggagataggtaaaagcatgggattcccgaagctggaagatggcctttcaattttatcgaaggatgaacttgctgacagcttagcatataatagcataaaggtataagagttacatttgaatttaaaaatggggtaatttatttgccatacttattctttcctccacttgcagggcttgattcttagtaatgccctcaaggcacagaaaaatatagaggatgaaggctatacaatggccctgaataaccttcgttcagaggtaattgaac

SEQ ID NO: 96928 - DNA, 499 bp, Zea Mays
gaagtgtttcttgaacttaaaatgatagggcagtcgaacaagttcattctttttcttctctcctttaagcttcggcatactccattcctttaacgttggaaatactctattggctaagtattcctaaaccaaatccctagtaccaatatgctcagacacaactctaaattcgcccacaacatttaggcatgatgaccccggcgtcatgcagcactggggcctagttaacccgaaggttagctccagtgggctctgaactagcttctcctttctcatcaaccttaacataaaaccattcagttttccagccggttggccatttggtgcggtagctaaccaccggtgtcttcatgtctttgcggtaggcaaaattattgcagccgaaattctcgtgcagtccgtcttctctagccttcatccgatagtgaagttcgtgcacccgacagaaggcttcggcaagcggctccactccttggcttcgaagagcccggataaagac

SEQ ID NO: 96929 - DNA, 658 bp, Zea Mays
caaagccagatattggtggaaagggatgaagaaggaaatagcacaatatgtggcctggtgtgacacctgtcagcgaacaaaagccaagcaccagaagcctgcaggtctgctgcaacccctcccagtgcctgaatggaagtgggaagaaataggcatggatttcgtgaccggactgccccgaacgtagaaagggaatgattctatctgggtaataatcgatcgtctcaccaaggtggcccacttcgttccagtaaaaaccacttttggaggagccgcccttgcccggatatatcttaaggagatagtcaggctccatggcattccgcagaagatagtgtcagacagagggacgcagttcacctccaaattttggaaaggccttcagcaagcaatgggcaccaagttagatttcagcaccgcttatcacccctagtcagatggccaaacggaaagagtcaacaaaatcctcgaagattaactaagagcctgtgtgttaacattcgacagggattgggagtccagtttgtcgtacgccgaattctcatacaacaacagccatcaggccagcatcaaaatgtcaccgttcgaagcactgtatggaagaagatgccatacccccctaatgtggtccaatgtaggggaaaggacacttgaagga

SEQ ID NO: 96930 - DNA, 712 bp, Zea Mays
caaatcaagacagtctcaggcagtcctttcaagagcttttggagatcagagctgtttgtgtggacccctgcattgtggctggggactttaatcagatctacagtttggaggacaaaaacaattctaatatcaatagggtgttgatgggtcacttcagaagccttatcaataatttggacctcaaagttgtccctctgaaagggagaaaattcacatggtcaaaccaatgaaatacacctactttggttaaattatatcatgtcttttgttcttccagctgggaggagctgtttcctgaccacacattgcttagtaatgcttctgagacttcggatcactgccctctaattctcaaatcgtatgacgaattcagggggaagcgtggattccattacgaatgtttctggggaaaaatgccaggttttttggaagtagttgcggcatcctggaatcaaccaattcaggccacgtgtcccttggaaaggctgtctacaaagttaagaagattggccagaaagttgcaatcttgggggcataagaaggttggcaatgtcaggaaccagttgggatggctagggaggttttgcatagacaggaaatggctcagaacagcagattattatcttgggaggagtcctggcttgtgcggaaactgaagcaacactgcttggttctcgcttctttggagagaactattgcacgactaagatcc

SEQ ID NO: 96931 - DNA, 647 bp, Zea Mays
tgacagtgagttctgatgaactttggagttgattcaagcttgatcgagtgagcaaatgaccaaggttcctatggtcgaattggagctggtatataggagattaactttgttacaaatggattagggagttgccacataaaaatttgtgaaaaacacccctgaagatgctctatcagacaggctgatgaaggtcctgatggtacaatagcctgacaaagatcgtcagatacatcgcacctcgccgccggtgatccccactcgtggattcgcgccggctgtcacgattcgtgctcggcacaaagtggataactacaggggataaaagatctcgcggggagatggattgggtcgtggacagtagcttatcggagggcttgggggctgtgcgacgtggccaaacggtcgtggttgtcagaggtcgccagtggtcctttaccacatagtcgtaaccgtggcatgctcagaattactctccctgcgtttgtaggccgtcgagcgccacggcgtgctcgccagtgcaatgccttgtcaccaccgccctccaaatcccttccaaattcggagtaaccatggccaacctctataaattcagcacctcccttgcttcgactcatcataacgaacccaatgcaactctaacctcgccc

SEQ ID NO: 96932 - DNA, 306 bp, Zea Mays
gtcaaagtacaaagacctggagttcaagcagcaatttcattagacatatatatcttgaggttcctagctagtcttgcaaggaaggctgccaagttgaacacagaccttccagtaagtctgactgctgttagtgtccatgtaacgaactgaagaatttgtttactctaaagaggtcaaaacagaaaaataacccaacattaagggaaatcctttaaaaaaacaactatatgattctgtatcagttatgttgggcatcttatattttacttgttttctaatcacatgtatttgcttcttgtatgtgca

SEQ ID NO: 96933 - DNA, 408 bp, Zea Mays
aattgtattttcttcatttactacaaccgaaagatgaaagctaggttccaaaaactacgccagaagaaggggaaaaactttgatccattggttcatgaggacttcaactcggataaggaatgggttgattctttgcatgtagtccttgaaggtgggcgtgagtgtgaccttacatgggaccttgtggataatgccattggagcatcagaagcacttcgtggccgaaacttaccaagaagagcccataatgtgtattcaaggagaaattctgttgctgcacaaaataagccagaggctgaagaggaagatgaagatgaagtaaatgttccacatgaggatgcagaaatcacagattgtgaagatgaacctaatggtggcaatgatggtggagaaggggaggcacccaat

SEQ ID NO: 96934 - DNA, 305 bp, Zea Mays
aaaaaacaagtgaccgaaaagtcccctttctctttctcaagtgagaccgagtttcataaggctctccacaacttggaggcttttgctcgctttacaactcaatagaaacttagctcttaggcacaatatcacaacaaaactcacaaatgttacacacacaagtgctctctcgctcaatgctcaaagcaaggctattgctaagctcactactttgattttgttgatgcttgggattgttgttgtagtgtatatgacttgttgctcggctcttggattctcaacacactagttggggttgtattttt

SEQ ID NO: 96935 - DNA, 434 bp, Zea Mays
aagaggagcgagcttgtggtttggcctatgctggccaaactaactcatcagcgtatacttctggagactcgtcatttgagctactctcatcatagtcaactctatgaacattatgacgagtcgttttagacgtgcctttactctggttttcgcaagccaaagccctctggtacaattgatctactgtaataacttggatgccttctaatttttctttaagtatgaacgcttcccattaagtatgagcgcttcccattaaatgctagccctgtcggttgcttgtttggtacaagaatttggaaacattgatttcttgtgtcccagaacctccagatataatcgttaaccgactcataccacccctattgtagagttgctaaatcgatcaaatctaactcatattcctcgaagaaaaaaatgctcatggacttttt

SEQ ID NO: 96936 - DNA, 472 bp, Zea Mays
ctcaccacgccgagatgttccacggcggcgcggagaaccgaattgggggaaacttgaaattcgttagctacagtggctaatcgaaggcaagggctggtgcactgggcgtgtaacaacctgacggagctcactggggcatcaatttatatagtccatgaacgatggctccgaagttaagaagagaagcagacggccgaggagaggggatgagtcaccgtggtgctctaccgtggcattcactgaggcactgtcaccggcgatggataggctacctactatggtctattgcgacgtggtaacaccacagattacatggcgcacgagcggcaagcagccaacaccgacgaggatcattttggtcagccgtagagcaagtgggtacggcggccagcacccgacctcatccgtggtaagatctttttcaccccaagtcattatcagagcgcccatgggcacgaatcgcatcgccggc

SEQ ID NO: 96937 - DNA, 412 bp, Zea Mays
acttggttgtcacctaattcaacacctaataatcgtttcccctcactcaattgcaaaatccgagccctaaatcgccctgtccacggagatagtgcgaactacggatgaacagaagtgttcccggcgatctagcgcagtctagcttaattgaatgggtcgaggagcattagtggtatgtaagagtgctgaaacaagagaacagagggcaagatcggacctgaagtgcactggccacggtgagagcttgttcacggtggtggaaaactaatttgggggaactgagcaattcgggggctctggtgagtaattggaggcacgagtgggtgtgttgagtgcacaattacatagtggagtcgagggtgtgctcaatttatagggcccttgagcggtggcccgtgaatttgcgattgtg

SEQ ID NO: 96938 - DNA, 536 bp, Zea Mays
ccgatatattgtgaagtgtgatagaaatttttcctttgtcgcttcatgagccctgttcatgaggtctttaatctcctgttgcttgacggctgacaaactttccatagtcaacctaagatattgtttggggagacactcgtgtgatctttgggaccggccatcgtagctgatctaatagatcaatcatttctcccaagtggaatcatcaaaaagtgtgttggcgccttttttagaccaaagaacaacaaaccctagggcttgtgcgaggcaagcaggacctcagtgtcctctctaaaagagcacagctcatcctcgtggggaaccgaaccatccgtgactatgtagagacctccgctcttcacagtagatgcgcaagtcattcgcacgtaggcaccagaccatccacgatgtgtctagagaactctgagaagaaccaagatcttgcctccctagagggaccccattgggaaggatcaaccttgggttgctttggcatgacggtccacccaaagctcctctcgatgatgtagagccaa

SEQ ID NO: 96939 - DNA, 761 bp, Zea Mays
cggcactgtaccagcctccacttatgttggaaaccctaaccctaaacaagctagactgttgtatatatataatggagataaatatgggctgggccaaagcccattacaacaacaaacacaattaatctaacacccccctcgcaatcgaaactgtagctgtggtaaatgttgagactggagcaaaactttgagaacaatgaggaggtaagacccttggtgaagatgacgacaacctacgagcttgccgggacgtgataaacatgggcgtctttgacagcaacacacggatgaagtggaggtcaatctcaacatgcttcgtgcgttgatgttggataggtttgacggggaggtagatagcgctggcgttgtcacattataccgggtgcttgtgggaggctgttgtgaagctcctagagaagctgtcgcaaccaactcgccttaaccaccccattagcgacaactcgatactcagcctcagcactggagcaggagaccatcggctaacacttggaggaccaagagattggcccaagaaacatcgcatagtcagaggttgaccgatggatgtctgggcacctgaccgagtcagtgtcggtgtaaacgatcactcgatcaattcatgggtggagtagcgtcgtaggttgaggctgtagtcgataatgcctcaaagacaccgaaggattcgcttgaccgcactcaagtgcggttcacagggatcatgcatataaaggcaaacatgcggaacaacatatgtgatgtta

SEQ ID NO: 96940 - DNA, 352 bp, Zea Mays
acattaaccttttttgacttcggcgcgctagaagtcgccgaagtagcagtttttctcttctttccttgcttccacgaaggataataatagtctggatatacaaatatgatgacatcgaataccctgtttaacctccttttgccccgagctccgaaggcagttgtcatggtgtcatcttcggccttcaaatatgctccaagcaattcatcactagctgcctctatggcatctagccagtcgtcatttggtttatcaaattggctcctgtacctaaaggtatacttcaggtagactaaaccaccttggttagagccagcagcagtctccttcagcattttccacccatctgcaa

SEQ ID NO: 96941 - DNA, 531 bp, Zea Mays
caacattccaggcggtggttgtttcatcacattctggaagaagttttggatctcctaggtcttgtcttcatgagagagtgcccatccattgccgacctttagtcgttgaatgaaattttttcgcctcctggagctagcttttcggtgaaagaatttggtgttggcatcaccgaatctaaggcttgacatacgggaattatgccttttctgtgcccattcaataacagcatagccaaggatacgcatcttcagtctgcttcggagacttgactcgaagtctgacaaccgcctattttcttgtgctaggtctagcctaaggagaacttccatggccatatgcacgaacaacctagaatcaggaacaagcctgaagctccatcccctgagcgcccgggctgtgctctggagtttatagaacagcctatggaaaggttcatgatgttgggtcggcttcgaccaagcgtgctccaccacctgcttgaaacccggtaaaaccgtccagaaattctcaaatttgaaggagcgcggatg

SEQ ID NO: 96942 - DNA, 583 bp, Zea Mays
atgattttgagactgtttgtcataaccagattttttttcttcctgtagcaggcggctatacctatctctaccatcatgaatagagagagagagatagatagagagagaggaattccattgagagcttaatgattgttatcaaagaaatcgggtttgtctaagtgctgaaagtgcaaactctgatttccatcagcacttgaccatgtcaccaaggtttcattgttatagagctaccaggcggccttctccttttgtgcaacacacagttgccatatttgaggatgatcttggctgctcctgcaaattgattctagaactagaacaacttgcccaaatgaaggatggcaaggcctttgctgaatctttggagtctctgtcaaatgttatgtgtaatgttcatgactatctaatccatgtggcattaaggtaaatcttacacataatggatgataaccatcatagctacttgtctgctgggaatgctaagttcacaaatcaacttcttcaaacttgtctgctgggaatgctaagttcactcacagtctcctttcccagagttgctagcttatgtccatcgttttaa

SEQ ID NO: 96943 - DNA, 457 bp, Zea Mays
cattccttccagttaatatgaaggatattcagcgggagagtaccatataaatgtgtaaccctaaaaggcacaccagatccgtggagttctttgaaccggggataaatcgggtgttctcggatgtaatcaattatggttcacaggattagtcgattggtgtagtaattagttcatcacagatgtgcgcatgaagaacagaaacaataggagtcgaagggcgtacctgaagatccgaagatttgggcagaaagaagaggaatcgaagcgaagatttccggatccgaggaacgcgtcgatgctcggagcgggaaacgaagcaagcggtcgcgaggaacctcgacggagtcggatttgcggccgcttcgtcttcggtcgcgaccggagctggttgctcaccacctccacttcgtcttccacagacccgacagggaccggcgcggacgctaccttcccgcgg

SEQ ID NO: 96944 - DNA, 1145 bp, Zea Mays
aaaatcatgaaattatttttaataaatactatggaaaatcaggaatctaggaaaattggttggacatttttaggatttttctacaattttctacaaatttccaaagcttgacagaaaaagaaaagggaaaagatttgaacagtactgggccgattccagcccaagatggcccaaccctagcagaagcgcgcccgcgcccgcgaggtcaggtttgcacagaggccctcgcagctttggatatccgttaagaacccctggctactgttcaacatctcactgacagctacaaaaacacccccgagcttctatcctttctccgttcgaagtccacggcggcgaaccgcacagggacacactccggcaagcatgtatcgactgattcatgtgatgactagcgttctactttggcagagatcaaatccaagacctaacgagggtttcccctcaaccaatttcaagaatgggcaactggttgactctggccacggcgaccgtagaccatgcagacagatgaacgtgttcccggcgattggtggactcctagttcaattgggtgggtcggcgagcatcacggggttatgaaagcactcaaacgagaaagcagagaggatgaactgaccgggattgtgctggccgcagtaaggtcgttttcacggtggcggagactgtaattgggggaaatgagcgattctcggtcccaggtggataatctggggcaaggtttggtgcaatcgatgcgtgattatcctacggagccgtgggggcactcaatttatagtgaggttaagcggtggcgtctaatttttcgcagagagaccagcggccgagacgaagggtgagtcatcggcgcggtctatcatggcgcgccctggggtgattcctccggtgaggaactaaccttctcaggatgtctttggtgacgtggtagatcgccaaagcacgtggcgttcacctggtaaacggcgagctccggtgaggataaactcggccggtcgcgcagcaagtggataggatggccggaccagctagcaattgtaatccatcccgcgctagatctttttacccatccccggtgttatccattcctccccgagcacgaatcggaatgacggtggcatgaatcgcggcggagaggttgtcggcgg

SEQ ID NO: 96945 - DNA, 449 bp, Zea Mays
agataaagtttggcgcaaacggtctggtcgtatcttcggacggtccacgtggatgctataaaccatttcattgaacctgacacctttgggttagtccgaatttcaatgggcggaaggtccgcgtatgaggtcggatggtccgtacatggtgtcggatggtactccttttcttatcggacagtctgcaattcaagtggtattttgagatatttcgtgtctgagatatttttcgatatcccggatggtccgtgcttgtaccccggacagtccataacccactgagttgagagttgatcatccttaaaattatttcttgagtaccagattctatatcttagcaaactagttagctgaaatggttgtgatggttgttaatccccaaaacaagtgtagaaatggttttaccacccatttccctttcacctatgagtctttgatcgagcgacatt

SEQ ID NO: 96946 - DNA, 548 bp, Zea Mays
ccgctatagtacaaacagtgataggagagggggaaacaagtagcaaccagtgaagagagtccactggtgtcctctataattttcccctatatctcattattctgccatatcagcaatctctcttcccctatatctccacccctacagttgttccctctaaattctctccctatatcccactacctccataaaatatcactttccatatttattcaccatctattacgcatcagttttttctacactaacaaacacttcgcaagagcatcgacgctaggggctagctatcacacccccacatttggcagtgtactgtgctagaagctatcactgtcacaggttgtggaggaggtaggggtgtcgatgaaccaattggcgtgatgatgtagcctctacaggcgtgaagagggcaggttgcgagaaatattgaagatagttctagcctgtcttcaatggtctcctctatatttctccccctatatcccgccaagtcagcattctctcttattttatatctccactctctatagtggttcccctaaattctt

SEQ ID NO: 96947 - DNA, 393 bp, Zea Mays
gttaacgcatgttcacatccagtcatggtgttatgctcatcctacaaaataaaatttgcttattacattgattttatatattcattatatacaatacttcatgcaagcttatatatttatcttttacatacctttttatggcatgtaattgtattgtcatcttccatcccatcgccagcattatttttattcaattctacttcctggtacaaataacatgttactatgcataatttatgttacaaatagtataacacttaaaacatttggaatattattatcttgtcttcctcatcatcactaatatttgttgactcattacatccaatatctggctctaatcggcatagaacgacatcgagctcatccaacacatccatcgccttatcgtac

SEQ ID NO: 96948 - DNA, 1003 bp, Zea Mays
ctgtacatggacggggcacgcataacaagacactacagttccctacctactgttttgttgtgcacctgagctctccacttcccgagtgattgggcccacacgaccacgtgttcgtcagttccaaaactatgtttaccataattcatctaagaggatggtgtacatgaggcataggtgattcttcaccacaaagcacaattatcgatatagtttgttgaataagtatacttcaataatacggagtcgattttcatgtatagtggtttaaggaaacaagaaagaagagtgtagtacaacatggaacaaaagcatgaaacatggaggaacctgttatcatcattctttaaagaagaagacaattttcttcaagcactatcatactataaggataagtatataccccatgctatcaattgcatgcacgtggaaaacaatgtatttgagaggacaagttgggctcctattagatatcaagggaaagatgaaggatattttgaattaactgatgggtcttgtcaatcaacacactagaccaaaccttcatctgtgataaccatagaataaggaactcaaccttttggtactagctacaatatgaagaaagacaagaaaaggacttatgtggtgtcaaggtgccaatcgattcctcttccaacatcaagagccgagtctcagtgcaagacatcacactgaccaactactactcacatgagttccatgtgatattcactttttgtactatcactattgctactatcatcatcattatgtaccttttgttcacctttagctatcatgcatatgtgtctaggggatgatgaagatagtggtagagaagagaaatctaatgcaagtgtgactgtattctcatcttcatcatcactatcacatgaatatgaaccgcttgtgtagtcagtgtcggtgagccaataatcaacaatatatgaatttccaccttttctattatgtaatcttcttcttcccatctcgcttcttaaataca

SEQ ID NO: 96949 - DNA, 352 bp, Zea Mays
gaatgagcatgcagatttattagctaaatcagcggcacaggggcaccctttgccttcgaaagtatttttgaaacaataaaagcaccttcagtcgagctcatggaaagagcagtgctcacaatttcacctgtgcatagtgaagactggaggactgaaatagtatcctttctccagggcaactgtttcttagatgacgaagcttataacaagagaatggaagcaaggacaagaccttatgtaataataaaaggggagttatacaagcatggagtttgctcacaattgctcaaacgcttgtctagaactgaaggacaagaattaatgaaggagatacatgcaggcttatgtggag

SEQ ID NO: 96950 - DNA, 558 bp, Zea Mays
gaggcaggaaagcaagaactagggcacggaaagcagaggcagctgaaagcacagtatatgcgggatattcccgagccagataccgtctccaaaagcgcccagtcagcacccgacagttacttctaaaacaccggcgtgccacgtcggcatccggcggccacttctaaaaccccggtgtgccatatcatcactcggctattatcctcaaagtgaccgacacggcccgttttaactctgctgtcatttctaagacgctgacgttatcaccagtcgctcggcatttgtctctaaagcgccgacgatatcttcagtcgctcggcggttacctctaaagcgccgacgatgtcttcagtcgctcggcagctatctctaaagcaccgacgatgtcttcagtcgctcggcggttacctctaaagcgccaacgatgtcttcagtcgctcggcagctatctctaaagcgccgacgatgtcttcagtcgctcggcagctatctctaaaagcaccgacgatgtcctcagtcgctcggcggttatctctaaaaaacgctggcgttgtcaca

SEQ ID NO: 96951 - DNA, 610 bp, Zea Mays
gggcggttgcgggctcgtatcattgggcttaggtttccatcttatgggcgtagggacttggtcgaccactctgtctcgatggcttgcttggcggagacttggtcgaccgctccaccttgctggcttgctcggcgaggagttgatcgatcgctctgcctcgctggttgctcgactgggaggccgttatggccaaaacgtttataggcttcacttcaggtaccccgttcctaggtacccgacaatagtcttatctaaatatagggtagatgacgatttacatgttatggactttggtttgagtgaacttgcactaacattcatgttttaatggtacaagttcctacaaaccaattattttaaaagtctcaaatctttcttccacataattgaggatgtgttctgatcaatcatcataagggtgagatttaaagcatataggcccctagttggttaaagcatataggcccctagttgggttttggagaaaatttaatccttgtcggggaatggcttcccatccctgtcgtttgtgaagaaaaattcttcgctctcgtctccgcgaatgctcacaagggagatttttctcccattcatgtccctatcatggaat

SEQ ID NO: 96952 - DNA, 410 bp, Zea Mays
cacaattcgcgcccgcctgggagattcgtgccacgggaggagtagataaagtcggggcagggtgaaaatatcgggtgggggtgaatctagtcgctggccggaccggtcgtcgtgtgccaccacggtcagtcacgctggcatcaccggagctcgttgttttttcggccgtgactcgtagtaaccacccctccgtgtcataagggtcgtgtcaagccactggttatccaccacagaccagttcccccttgtgcgtcacggtgagtaggccacggtgaaatattctagccggataaccatgatctcaatcccaaaattcttgtccagttcgatcgggacctataaattgaggatgccctctgctccgcttcttagttacgcttccaacccatccccaatttcgctcctatcgt

SEQ ID NO: 96953 - DNA, 378 bp, Zea Mays
caaaaagaggccaagcgacaaggagatgggacgagcggacgatagagataaaagatggtcaggtcgtatagattaggattgagaggcattaggaactccattgtatctgcgttgtcgcttcataccaattaattcaccaagatagcgttggtgaagggtccaaaaattccttgttcatttggacacggaatacaatatcatccaacacagataatatttatcctacctaatgtaatgtcagatgtgactaacgccgtgttaccgcaagttaattacctaatttaatgataattattccttcctatttccgttccatacaagccatttgcttaacatctttatcagtatgaaatcaataagttgtcaaataacttctac

SEQ ID NO: 96954 - DNA, 467 bp, Zea Mays
agctgctacctgaatctattctacttcttcttatttgtcttatctatatcaagttggaagtatgcttttatgtctggaggaacagagggacatttcttgacattcttccctctgcgggagatgctccttcaatcaggtaccacccccttccgctctcgtttctttacaatacttgcacttaaaacctgtgccaaccttctcttcgtgctgccacactagttctgtcatgttttctataaaatataaacatataattgattgagcatacacatttaacaataactaatacataaactattgggcattcacatttaacaataactaaatcaaaacatatttaacaataactaatccataaaccataaaccatcacatatgtaacaatattaacatacaacatatataaatctgaaatcctaattccgaaaacatattatcgagactaaatctgaaaccctaaacaccgc

SEQ ID NO: 96955 - DNA, 491 bp, Zea Mays
cacggtgaggacccacctcctcgtattgtatcggaatttcagtcacatgaagagggggactacgataggatggaagagatgcttgacgatgtacgccatgagattctaaccatcgattcggagaaccccggtcaacccaccgattatgaggatccagctacacctgaggttcagaagttttttgagctccttaaagctgccgaagagccgttgcatgagcacacgaaagtgaccgtccttgtatttgtgactagacttatgtctattaagtctaagtttgcattctcaaacaactgctacaaggagcttttgaacttgatcagtgatgtacttctggagaatcacaagatgccaaaggacatgtatcagttcaaaaagttgctctctgggctcggtatggactacgaaaaaatcgatgtctgtgacaataactgcatgcttttctggaaggagaccgcgagtgagaagaagtgtactgtatgtggtgagcg

SEQ ID NO: 96956 - DNA, 430 bp, Zea Mays
gcatgagcgtggaccatgccgagctctcgacggtcgcttgtcggagaatgccctctaggtctgccgtatggcaagaatacaatgctagactcgtcagtctcaacggagcagttaggatgacgacgtggttgagttgggaggatgagcctcaaagcatcttaagaagcatcaaagcaaaatcaagaagactcaaaacttttaaaatagtgatagtccgtctacaagagccaaagactcaacacaactagtaaaaaacaagctatcctttgaaaacacattctcccctttctttaaaaagccgaaggcaagctcaaatgcaactcccctccacttgtgcactccccatatgaatacgctctccccacatatgccaactctttgtgtaaacaatctcccccttgtcgcaatatgcatgtgtcatgctatctaa

SEQ ID NO: 96957 - DNA, 664 bp, Zea Mays
aagtctcccattctgtcttgcggtcttccaccattcggccgttgattttccagatttcgagtgaggacctcgatgagtcgggtctgattggctagaacttgggctaggtctaagggtaggggtggaggtgcggggaggtgggtttcactttcttctctaatgacttcccctttagctcttcggggaaaacctgctccaatccttgaggcggtaggcgtggttttatccgaagccatctgccagggaagagagtcactattatgcacatgcaaattgtttttaaccaagttattttattcattacaccatcacattacaagcataagactactacaggtgggactacacgagagcgttcttcgaggtactagcgagctccttgtctaaggtgtccccaaatgccttgagaagatcatcgaggctggctagggatacatcttcttcgttggactagtcatctattctggggggaggtagggctagaggggccttcttcttcttcttctctgtctagcatccctggttagtggtcttcttctagatcttctttctgggggcgagtgtctttagcttcttgtcaaagtctatcttcaaggtccgataggcctcacgggtgttggcttcctcgccttccactatgctgagactctcctggagagatgcc

SEQ ID NO: 96958 - DNA, 487 bp, Zea Mays
acgaaatgttgtcttgtatagagaaactccagttcaaatcaacgtaaagacacaactttgcagcatgatatgtgtacatgatgcgattgtttcacctcttgttgggcccttaatgattagtcgatgtatgtgttgatgtcgtgttggatttttctccatttcaaaggtccacccttttaagcatgtggaatttggatacatatgtactttcaaggttggagtctaacttgaacaaggctaataatggatacatcagctgcaaaaatgttgcatggaatctacttcctcacactgtagtacacagcatgcatggcatttcgtattccgtggagaggacacatgcatggacgctttcataccaagtagctttccccgacttcagagtattggtatatgtctttttcccttgttgatgtgtacgccaaaacatgtagttgtaacctcctctcggcccccctcatggtcatagtgagccccacaaatagaa

SEQ ID NO: 96959 - DNA, 309 bp, Zea Mays
gtatagtcggcccatgttataggatcccgaccattggccgccatgctggtagggctgatggtgggttagcccatgtttgtaattgattacgctataatgacctgccataaccccctagggggaatattccgaggataacataggtaactgagggtgtaatcgtctttggcgaggcagggccgaccctcggttaactataaataccccctactgtaccattgtgggggatggagaaaaaacattgtcgcccttaatacattgcgtttattggcatcaaaccatttcccattctcccaccgtttgaacttg

SEQ ID NO: 96960 - DNA, 595 bp, Zea Mays
taatgtaaccattctcttagcacaagatattactccatcatacttggttaggtaatctattccaagtatcacatcgattctacttgattccaaaattactagctccactagaaagcttattcctctaatctcaagcttagtttgagggcatgaatgagtggctctaagttcacctcctggtgatctaattaatagtttactcttcaaaggatagtttgatatattatgcttttccacaaatgagtttgttacgaaagagtgagatgctccagaatcaaataaaattgatgcaggtatggaattaataaggaacataccatacaccacgtcggcatcctctagaactgtttctgctgtcacatgatttattcttcccttactttggttctatggagtcatgttctatgaagtaccatgaacatgtgtattctaatcaactctttgactgttgttcctttggggtgtctgtgggttgctctttgggcagttgttggcataatgaccaatttctccacacttaaaacatccactaggctgaactggggtagttgtattgttatttctagccggtgtgttcacgacgcttccttgatga

SEQ ID NO: 96961 - DNA, 665 bp, Zea Mays
atgattcacaaaggaaaagattactagatctaggtgaaaagagaggtcatcatcgcagatggcttctaggttgagcataagagaatttaatgagaattttggacaaggcttccaagaagaatttgggactggatattgttttgcgcaacagacaccaaccaaagttttattattttttttaacataaacaagttcataaggaagctttaggttgaactagcggtctagttatggggttctataagctgtgcaggtgtaaattcaagggtaaacacacgagggctagaaaacaccaacacaagcatgatttttttaagaggtttcacttgctaaactcaaggttgtttggagaagggggtcttttatgggcaaaacaagcaataatttttattagcaaaaagggttgaacaattataataccacctagatagaaagacaagagaaacacataacacgacctaacaagacttaccaatctgacacgaggtaagacatttcttatatttcataacatagcaatacaacacattattcaaatttttttattggaataaagatgagagaagcatgttgatgcacaagagaaaaagatgcggcaatcatgatgcatgctcattctagtcgtcttcttcgacctaactagattttcgggtgcttgctatagc

SEQ ID NO: 96962 - DNA, 577 bp, Zea Mays
cagctacataaacagcatccacacgaacaccatagctaagcacacatgaaactgaaacaaggggaaaccacacagggcttcaaagacatcaaaaagctagagattaatgcgattggagaaacgccatccattatgcgcaaacaccatcatcaccactttctccagatgtctgcaagcctggactagcttctcctttgcagcttcatgcctttgaagcagcgcccaggaacggcaccagtaggttcccctgtagattacctgcatataagttttcgggatatcgtgatcaaaaaccacctcattcctgctaagccataaagcccaaattattgccgccacccccgtcataatcagggatttgtcatgtttactgaaacccatcaaccaattcccagcaacatgctccatatcccgaggggtcggcaaaccgaaagcggctaacagcgccctccaaatgaaacgagcgaagtgacactcaaagaacaagtgtctaatcgtttcgctattagagcaaaacacacaaagcttattccccttccagttcctacgcgtcaagttatctttagtcagaatgacc

SEQ ID NO: 96963 - DNA, 498 bp, Zea Mays
ggaccataaacccagtgagccaccagcaatcaccattcctttcctgcaattgaaccgagaccgaaaactgcttgataactgaagccactgatgaaaaaactccaacacgccaagatatcaacactcctcctctggtaccaaccgctgggctataaacaaaattactaaatcaagaccccagaatagaaagaatatcaaagtctgaaatagaacacaatttggtttcccgtagacaaacaattgaaggcctaatatcgatcaccagagatttaacaaagtctcttttcacacggtcattcagccctctcacattccagattagaaaacaattggactccataaaaaacaaatagaacactaccagcaaatcactgaaacatcacctaaacaggtaaacagagctgccaatgcatcaatatgaacgctagagagcctagtatcaaataacttcgcatactttctggcatcctggatgaaaataacttcgttaacatcgca

SEQ ID NO: 96964 - DNA, 456 bp, Zea Mays
caacaagggaaatagttgaggcggcacccctggtgctcggacgacggagtattcgagacaagcagccgaatagctggttttctgtcccggaatgggttctggaagagaagcaatgacagaaaccagaacaattaccgtattccagttctcctccacgtctactctcttcttctctatgcatcccttccttctagttacatgttgtcacatggaatcatgatattaaggggggttaaagatgggggtttgatggcagcagtgatgtcctcatcatcccagtgaaacgagtccgtgcacgtaaatggtgaagggggtcgctggtgtggttgtattgatggcagcagtgatgtcctcatcagggttcaatcgggtggtgttgggttcagtttctggcatttgaaacgtaatttagactctccaaaatggaaaagatctcaaccccaatgctatgcccca

SEQ ID NO: 96965 - DNA, 604 bp, Zea Mays
ggtgtggttgaatgggcgcaagggcacacagtaggcatgcacaagccaagtgagtgggtgcagttaccgagggcgcatgcacaaggccatcgaggtcacagacgatggcgaggcgaatgatagcctaaggtaggggcatgggtcatgacgggtggcactagccactagcgtggctcatagcgttggtagtgggtataggggtgacaccgatgggtagccacggacgcaagtgttgtcattgggggtagctgtgcctgagggagatatcgaggtgaccataggaacgagagatggcatctagggcggtagtaggaacaagggcaacactagaggtggatgtggatgcagggcaacgtgaggaggctatgggcccgagggacgatgttgaggtggccgtgggcacgacatcggaggtagccaaaagcatgaggcaaccctagaggtgtctgcgaaagcagggcaacaccaaggaggcagtgggcccaagggacgatgtcaggtggccgtgggcatgagagacgacatcgagggcacccgcttgcattggcatgacactagaggtggatgtggacttgggatgatgccggccagtccacggtcatga

SEQ ID NO: 96966 - DNA, 473 bp, Zea Mays
gggcaatgtgggccgtgtaatagaaatatgagttgttattgctggccttagtcgtgtatcaagaaacactataagtgaagttaggctcgaggacagaggcacgcaagacaacaatcagcagatattgcgtagcgattcttctcttcttcccaattcctggctgcattctagtggctactctctattactcaagtagcctaacagcagtatccaccgtgcccgagatcgccgccttccccgcgctgtaccaacggctaggcgaaaatcccgcaaggcggggtgaaatggccggcatgggcttgagatgaccccggacagttccttccctgcgaacgatgatcataggatggtggcgatgatgtgccccttcattccaagcaccgttgcggaatcgtggcggccgcgaatgcagccgcgaatgggaatgacatggtcattaggtcctgaatatgtcaaacgatattcaattcaca

SEQ ID NO: 96967 - DNA, 660 bp, Zea Mays
ctgccatccacagtgggtagcacataagctccagaaatacccgcagaagaggaagctcccggagtgaaattaacagaagaaccccactgagcaaccggatgaggcaggcgcggagctccaaactgagacaacataggagtagccggtgcaggagtaggcgcggcctgatactgaggaaaaccctgcatcggcacgaactgagaagtcccaggcacatagagctgctgcagaggaagaggaactgaaaactgctgctcagcacttgacatcatgttgatagtgccctgagaagaggaggaagtcaccggctcccatctgagcttcccattaggattcctcctacataccacatccttatggacctgacttcagatagaacacctgccactccactggcactctgcacggcgatgcgcatcaccacagcggaaacacaccagccccagcccgggcttaggaacagcccgaaacctctgagtacttcctcctgaagtacccgagtcaaaagatttgccacggtaaggatggtggtgctggtgttgagacttgcccctcttgtgggctggacctcccatgttgcccctcctcgcgtcctggctacgaggctgatcaacacccgaagacttctgcgactccattgtgtactagtgttgcatttcc

SEQ ID NO: 96968 - DNA, 435 bp, Zea Mays
cacatagtatctctgaagcttgtctgcattccaggatcttcgaatatcattctcatccatgtctcttaacctatacaatcctggtcttgatgaagataccaccaagaaagagccctcccacttgagttgtaacttccccactgtttctgggttggctattttttgaagcaccaaatgacctggcttaatattctttaatctcactttcgtgtcccgccactttactgttttgacttggtatttattgatatgatctattgcttgaagtctgattccttctatggtgtcttttgatactttgcaagtgtcttcgtccttcaccgaagctagagtccttattgatcctgttcctccttcttccggtgttattgctttgtctccaaacaacagtgttatggttccacactacttttactaactcatctagccactttc

SEQ ID NO: 96969 - DNA, 307 bp, Zea Mays
acaggtgagagaagctgtggaagtcttggctggcaagtatggtcttaagctcgggtcttaaccctctcagaaaacgggccattttcctggcctcggtgctgacatcctcgggcgcgtagcgggccagctctgtgaacttgtgcacatattcactgacggttctcccgccttgggttagctcccggaactcatcctccttgagttgaactatcccctgggtacgtggtgctcgcggaaggctgcttcgaaatctgcccatgtagcatctctgacggcttcactgaaagtgtcccaccatgctaaagcc

SEQ ID NO: 96970 - DNA, 360 bp, Zea Mays
cggactagcacaacaagtgcgcaaaatcgaagtcttcctcaaaagaccatccgtgcaaaagtcgcctaagggtgcagccggactagcacaacaagtgcgcagaatcgaagtcttcctcaaaagactatccgtgcaaaagtcgcctaagggtgcagccggactagcacaacaaatgcgcaaaaccaaagtcttcctcaaaagactatccgtgcaaaagtctacaccaagaaactgtccgcgcaaagaccgactacaggcgcagccggaccgacataataaacgtgctagaccaagtgcgcaacgcccctatggacatagccggatgcgcgaaggcacacagcctcatcatacaaactatag

SEQ ID NO: 96971 - DNA, 519 bp, Zea Mays
gttggagatgcttttaggcgctacaatcaaactaggcacgtgtggatagaacggactacggagtccatattcgaggtggaccagatcgagaagatacctctaaagagacaacatacaatacgaggtagggatccatgccatgtggcaatgtgagtggccccttaccactcaagtcttctctaggctcccttatgcaacgacctctagtggggtccggttgcaccatgtagccatactggcctcttgccctttgtggactcgggtgttgccacgtgtccctggtgtcccattggatagctcaaactcccttgagaggactccgagctcctctaggaagagtcccttaagcattcgctctgtcgactactatgccgactactatacaagctgagagccctatgctctcgggctccggaaggctccaactagttgcggggtatgagcacgtcgtgtgtccttcgggctccacgaggaccctggttaaaggtggctcccgacgaccctaatcgggaaggtttc

SEQ ID NO: 96972 - DNA, 469 bp, Zea Mays
agccttttctgctgatggagcaatctggcagtctgctgtacaagcatgaaattgtcctgtataaatctcgcttttatgaaagcactctgtcttagagaaaccaaactctgcagttttcaagccaatctatttgctagtatctttgtgattaacttagcaatgctgtgaactaggctgataggccgaaaattcttaacctcattagcccccctccatcttaggtatgacagtaacaaaggctgagttgagcttattaaaatgagagaatttcctgcaccatattgctgaaattacagccataatatcctccttaatcagctgccagctactaggtcaacttgttcctagcttgaataagtggaggattttgcagggttcctacgtcaaaaaaggatgatcagtattagtatattgttcaagctgatttaggaaatatagattgtgttctgctacatggattttcttaaac

SEQ ID NO: 96973 - DNA, 353 bp, Zea Mays
tccatggtctatacttgtgcatgaagatatcagggcctcgtggagtcatcacagtcttcggagactagcaagtggctcgcaacatagaaatgaacttcatcctagggcaacgaaatgttcactgctgggtgccagcacgtagaaaagtacccagagccaccaaccaaggttgacaagcacctgaaccccattcaaagtgatgagggggccaagaaagtacccctcgacatcgctctccctaatcatgcagtactaatcggtgaaggcctagctattcaagaggagtccagcttgctcgattacttggtcgaagttagccgaagtgtcattgagcatagcatacaaatcaaccg

SEQ ID NO: 96974 - DNA, 559 bp, Zea Mays
gttgtctctgtccaaattggtgcaagcaccatagccctagtaggtcacttcttctttctgagtcgttggattgaacgctaccagcttgtataacccaggttgccggcgatcttgctccgctgttgtggtggacagatatgatagtggaggactggtcgaattaatcatagggatgtgttctgatagaatcggtgatggagtctgtacactctacaccaccggaacaggtcatcgtcggcaagtacacgcgatttcggccaggtgttcgacttgtgcacggtcgggacctgagtcgtgaagaaatataaataggagggcttatatgcaattgtcagagagacacatgaatagtacttagggactctttactggatgttcgaaacaccagggacgtcggcgcaaatccaccagcgcgggcacggacgcgcgtggtttctgcgtaggtttgggtcgtctgggtcgaattcagcccaatactattcatagtttatctttttcttttttctattagtttaggaaattcattagaaatagtataaaattggtaaaattatgagac

SEQ ID NO: 96975 - DNA, 834 bp, Zea Mays
aggtacgatttcagttgattcgtttgtggcccatgctctttttgactctggcgctagctattcgtttgtttcggagaattttgtgtcacgggctggtctttcggtgcagaggttgggtcacccaattttggttagttctgctaatggctccattagtagttgttcagtttgtcaggggtgttccgtcattcttgctaatgaggtcttttcggccaatcttgttgtgatttccttggggcattcgatgttatcttgggtatggattggttatctcagtatcgcgcagttatatcctatttttggaagacagtgttattgcaggcgccgtcgggtagggaggtggtattcttgggaagttccccaaagttcacgttatccttgttggcgcaattgctttcggatcgctggtcaaggaagtcgggaatctttttctccatggtggtggagggtgaggctgccttgcgggtgcaggacatttgggtggtgtgtgactttgccgacgtgtttctggtagagcttccaggcattcctccggagcgcgatgcagcttttgagatcaagctaattccgggtacacagcctattcataaggccccgtatcggatggccccaaaggagcaggttgaattgaagcggcaattggatgatctgctggctaagggttttattaggcctagcaggtctccatgggcttccccagtattgtctgttgagaagaaggataaaagcaagaggctatgtgtggattatcgcgctttgaatcaagtgacaatcaagaataaatattcgctaccccgtattgaggttctctttgaacagttgaggggtgcccag

SEQ ID NO: 96976 - DNA, 434 bp, Zea Mays
gtatagacaggggctacaaagctccaactaatttcaagtggctggcctttatcctctgacaggtgtcacattctgatacatattgggctatctccctcttcattctggtcctccaatataagggcttcagatcatggtacattttggtgcttcttggatgcatagaaaatttggagagatgggcctcgtccaagattttcttcttgagatccttgttcttaggaaccaccaatctgctttcaaaccataatataccctttccatcttggcagaaacatttatacttctcggtcttctgatggagattctccttaatgatttgcactcccttgtcactgagctgggccatgatgatctggttttgcaaagctggctcaacgaaaatgtgagacaaagcaccagaaggaatcactttaatctgcatcttgctcaac

SEQ ID NO: 96977 - DNA, 543 bp, Zea Mays
gttgaagaatttcggcaccagtcatcattgcaggtgggcggtgtgtcactacgacacctttcgtaaagttcttgatgtctaggcggaatggatggtcagtagggagaaattgtcgatgtttatcgaatgatgaatatttgccaccctttttcaaccaaatgaacctgagagcttccttgcaaactgggcatgggaacttaccgtgaacacaccaggcacagaatagcccatacgccggtaagtcatgcatggagtactggtaccaaacatgcattctgaagtttgtcttcgtagctcgatcatacgtccataccccttcctcccaggcacgtaccaattcatcgatcaaaggctccatgtacacgcccattttattccccgggtgtccgggaattatcaacgacacgaatatattctgcctttgaaagcacacactagggggagattgattgggataacaaacatgggccaacttgtgtacagggcagcgctcattccatagggattgaacccatatgtggccaacgcaacacgtacattacg

SEQ ID NO: 96978 - DNA, 343 bp, Zea Mays
tacacaaggttccatgcaaagttcttcgctattttccaataaaaagaaggcttcagaggttatttctatcatctaagacagcaagtgacacgaggtggcatgatgaggagcgtatacaagatggattactaaggcatcctgcagattcacctctctggaaggattttgaccaaaagcacccagtgtttgcttctgacagtcgcaacattagacttgctttagctatagatggttttaatccgttcaggtccatgaatgttagctatagcatttggcctgttattctcatcccatataactttgcaccatggttgtgtatgaagcaaacaaatttcattatctc

SEQ ID NO: 96979 - DNA, 321 bp, Zea Mays
tccacatctccatatttaaatttcactctgcaaacaatatagtatacattataaaaacattataaaacagtattttgaattactacattacattagtgaaccgtttagcatggtctatattataccagccgcgccacttctcgtcaggggttgccgccgtactagctatccgatggtggtggggttggggagttgggttacggcaattattgaagtcatggtgcaatcaaacagctctcatgtcgatcgatgcatcgatgagacacttggacggacgtgcattgagagagggcagcagtcacggaccggaccagaccagag

SEQ ID NO: 96980 - DNA, 285 bp, Zea Mays
gtccagacgagtacgaggtctccttcgttgaattctctcgggacgactgtgtggtcgcgccatgcttttgtttgagcttggtatttgttgagggcctgtagggtgaagacacggtctccgtcgatgaggtccttcgaagttggttcgtctacgttggggacggctgaagtgcttgtccgtggtgaaccatgttttatttcttgtggggtcatggcctccgatccatatagcaggcggaaaggagtgaacccagtcgcccgtcactcggtcgtgttcagcacccag

SEQ ID NO: 96981 - DNA, 360 bp, Zea Mays
tcgtttagctaggtgacccagtgagttccttttcactgattttaagacctaatctattaagcaaccgagcttttctactctcttttttagagctaacatcaccgacccaactatcatggagcaattgacatgaatggtttggaatgccttgttgtagccaagctattcaatgtcccgttggccagtttcttctcggattgccagatatataagaccttttcttgttgtccccatctgggatctaagcaggagggaagtggaaccttcctcgaattccagttctgataatttagggcaagaaagtgttaaaactggatagctgttgagccaatatgttagttaacaatttttgcaataata

SEQ ID NO: 96982 - DNA, 1133 bp, Zea Mays
ttccaaacctttggttgaaattttgggacgttacaaacctaccccacttaaaggaatctcgccctcgagatttagactggatttgagaaaaagataagggtattccctcctcaaagagtcctcactctcccaggtagcttcctcttccccttctttgctccactgaactttacagagtctcacttctgagttgcgggtcttccggactgctgagtcaagaatctttattggcttctcacgatactgaagatctttctaaatctgtattgcctcttcttcgatgtgactttctggtacttgcaggcatttgcggagctgggacacgtgaaacacattgtggatatcatacatggattctggtaattcaagacgatacgctgcgggtcccactctgccaatgatggggtaggggccgacgaatcgcggtgctagctttcccttcacttggaaccttctgacaccatgcatcggagagaccttgaggtagatgaagtctcctttctcaaatctgagttctctctgcctgttgtccgcataactcttctgccgactctgagcttcaagtaatcttctgcggattagggcaactttctcctcagtctctttgacaaaagcaggcccttccagtgccttttcccctatgttggaccacatgagaggggtctggcattttcgtccatacaatgcttcgaacggtgacatcttgatactggcctaatggctgttgttatacaagaactccgcataaggcaaactggattcctagcttttatcaaatgttaacacacaggctctaaataaatcttcgaggaccttgttgaccctttctgtctgaccatctgtttgagggtgataggcggtgctgaagtctagcttggtgcccatagctttctgaaggctcgtccaaaatttggaggtgaactgagttcgtctgtctgacactatcttccttgggatgccatagagcctgactatctctttaagataaatccgggcaagggtggctcctccaaaggtagttttcactaggatgaagtgggctaccatggtaagacggtctattattacccagatagagtcattccctttttgcgtccggggtagtccggttacaaaatccatgcctatttcct

SEQ ID NO: 96983 - DNA, 336 bp, Zea Mays
gaaagaaaaagggaaaatgagagcaaaggggaaagtaactcgtggactcatcggcagccacgaaggaagacgaatgacactaggatgaaggaggcagacgggaagaatacgaggacaccacatacgaatgaggatgaaaatgaacttgtgagagagttatccatccaattataatggacgactaaggacaatatctaatgagaatatccttcttgggaacaacctaatttaagtaatcgctctgtcttgtcgtatcccgacccacaaccaaatacatccttagccatctctaacatatcttctattcaataccctatttcatccactatttcgaac

SEQ ID NO: 96984 - DNA, 759 bp, Zea Mays
cttgtgtgaggatttgtgtaacatcccaattttcaactatggaataaagcttatttaaaattattgattgctatgttagcttaatccaaactatgcaaaccaaggcctttatcggttgttcctcgatattattctaaattatagcctaagcttgtctttcaccatggtaaattcttgaaaacgtctgatgcccgcccgccataaggcacgctagacagagggagcccacaaccacctgtggcaaaacacatgcataaagaaatcgtaagcctgcctctagctgccttggcgtttgtgcatcctggcaagccccacctacaccctctgccctaagatagcctagtcgtgcacgccgagctgctatattaaagtgttgggttgtagaccttgaagtgatacctcagtgcagaaatccactccggcaagacctcgtgcacttgcctgagcacacgtcagtcacttgtcacaatcacaactaaatgaatgcccccaccataagccaagttaccctgccaacctcaggatgttgcgactacactgtggcaacgttgccactcacagtacgccggtcaagactccctccattataaatcgtcgttcctctgcctataaatattgatgcccttgccgtggaacctcatagtccagccaccatctcacactcacccccacatccgaacaatgtgtgccttactcttcaaaccaaagaacaagccatcaccgtcaatttgagtcgtaggtgagcacgccatgatcttc

SEQ ID NO: 96985 - DNA, 577 bp, Zea Mays
ggtgcctgcatgacaccatgccccatcatagtggatggtccagagggtttctgcacgacattgcggtggttccaaaggccctgtccagtctatgatgaaatcggccaaaacatatgatttaattgttgttgtgggctcgaaggtgatgttgtaaccggagagttttgctgcccatttggctattctggcggatgcctccggattcctgagcaactctccaagaccccgatcggaagtgactagtacttcgtgtgtctcgaaatagtgtctcagcttgcgtgaagccatgatgactgtgtatgctattttttctagctctatcatgttgcacttggagcttgtaagtacttcagagacaaaatatactgggcattggtgagtcttgccctctctggtcttctcttggaccaaggctgcgctgaccatgctgggtgaagctgcgatgtagagtagcaggggtagccctgggtctggacttgttaatgttgcaatgtcagacagatattgcttcagagactcgaaggcggcagcttgtcctgggccccaagtgaagtcctttgcaccgcgtaacgttttg

SEQ ID NO: 96986 - DNA, 393 bp, Zea Mays
gtgccatctgacaagggatggcttattgactccaagagcaagcttcttgtggcaagaggatggcaaagggtacaggcctcggtgacaatttcctttaagcagagtggtcctcgtgtcccgatcctttacaagaaagaaccaaggatgaatctcaaaaaatacattattatctaaggaaaatcgatgagtggatatcagattctttgttgcatgtgggacatgaaggacattgcgtaattcaagatttcgtgaaggggtatgaataatagattttccaacgtgactaattttcatacctgctccatttgccatgtgaacttgttccgcgccatggtacttgtcacgaacagccaatttgtcaagttctcctgttatatgatcagtggctcccga

SEQ ID NO: 96987 - DNA, 653 bp, Zea Mays
gccagatatttttttggtggcggaaatatttaacatctattttttcttaatatgtgcatctagttcactcgtgaaccaaacaccacttatgtcttatccgtggactatcatctctcattcaacaaaccaaaatcacccttatttccacctcaacgcatgttgtgtaccagatggatcctagatccatatcccattggaaaatgtgtataccatgcactagcatatttatcaagttcaaccaagatagcatgcgagtaaaagattatgaatcgtaaccactagacacgtagtacaactgaagaacatgttgatataatggaagcaattggacctcctcgcgtacaagtagcatcaacatgttcacctgtcctcctcaagttctttcctgcacgagaccgatgtgctagcaccacacacacaactagagaaacaacgacaatgtcctaggggaagagaggcaacgacggttaagctaatctctcaagcatgctagccccttcatacatatagacctctgctaatgggcttttaccctaaaagttcattaccattttcatggatcatggttacctcttggatatatattcaacaatctcccacttgtactagagtcaatcatctatacaataatttcaatcctataagtgtaagac

SEQ ID NO: 96988 - DNA, 608 bp, Zea Mays
gtgatgtttcctttttggaaaacctggcaattcatcgtctgatagtgcatctgctattagtcgttcttggggagaccattgactttttatgccaggaaacaaaatccggttcttctgttttgtagtttcactttcgtttgtactgatctggagacaaggaattccatagtactcacaacaacaacatgttctaaagtcacttgtctgttggtttggttgtgcatccttttgtgtcttgaatgtctgttcatcagctattttatttatagtgttgttttgatttgccaacacaccacattctttgcatttagggacctcacttgtagttgacattccaaggtctgacatctgtatgggtatggaagaacgggagggacgaaagggttgagtaaagacagattatagagagcagagaaaacccatctatctaaggtttttcctagctaattgatgccattgtggacaaaattcacacaatacaccaacaatcatttcaaagaagcaaatcaaacatgaacatagaggacaatgaactcaagcataccagcacaacacaatccaattctactcattcaaccaaaacaaaaggtgagacaaggtttggaata

SEQ ID NO: 96989 - DNA, 488 bp, Zea Mays
cacttttaaccgtgagcactactgattaactagtttctacactgtacataggtttgaaaaggctagcttgatagataaggctcatccccgccttatatgttatgctcatatgccatcaaattctaatatgggactaaacctaacaatctctctggtaacacataaacctaacgcttcacgtcatataacctctcgtagaagtaaggaccgtctcactgtatatgatgtgctcccccaccatcaatttccaatatagaactaaacctaataatctctttcaccatgtacataactcttcacatcacatactcccacgtgtgatctttggtaggtgtttttggggtagaatccaaagctccatgtcccatacaacctgtgcgacctctaagaggttaacgagctccccctatctcctgaccatgggctccagttccactttttatagtatgcaacaaattcggttgactcattatacatatgagtcattg

SEQ ID NO: 96990 - DNA, 409 bp, Zea Mays
aagaaagctaataattctatttcctgacgcattattgatcaacgtgtcgactatgggcatgggatatttatctttagaagttgctctatttaaattgcgaaaataaatgcatactctgagcttacctgattctttcttctccaccagcacaatattggagacccactctgtgtatctacaaggtctaataaaattagcttctagtagccggtgaattttgtcctttattcgtggaagtaggtctggacgaaatgttctagctttctgcttgaaaggtctgaaaccggacttaataggcagctgatgctctactatctctcggcttaatcctggcatctcagtgtaattccaagcaaagcaatcagaatattctttcaatagaccgatcatttcatctctaggatcggtc

SEQ ID NO: 96991 - DNA, 501 bp, Zea Mays
agaaaccataagggtacataagaaaatgacttcatgtcaactggagaattgtgttatttaaaagctacaagtgtcgacacatacatctcagcaattgtatatgcgctccaagtgatccaaaatactatggccatagcagagcacgagtatgctcaaactggatcttgttgagtgatacaatgttgcagagatagccttgctcaccggaaagaagtgttaacttattttcacttcatggtatcttactgtggatacaagtttgttttcatggacttggaaacaatgaggtggtgagaaagcatggctagtagcaactaggtttatacgcaaacccaagcattatttaatgctataaattctcctctactgtgagtagttaaatttcgatacaataatatgggcagtaaatcatctatctttgcagttggtagatgtagtgacaacatatgcttatgtggtcactggattatggtatttgtggagtcttgaaggattccaaat

SEQ ID NO: 96992 - DNA, 370 bp, Zea Mays
caattttatcgaaaccaaataggtcgtaggcgagtttggttggcctcagaatggcgtcaccaagctcctgtaaaaatttcagattttttggacacccgagcgaaaagttatgcccggtttaaagaaggtacctcaagttatgtttttgggaggcacgactagaaagcggcggttagagcaaaacttctctatctgcaatcacagcggttagggcaagtcgattaatggggtggatcgacttgtgatctgggtaatggtggatgggatagcggcgaaggtgcagttgaactacgacgaagatacaacctaaaccagcaacacgactcgaccacagacacgaactgaccaaagccaaactgaaaacgaaatt

SEQ ID NO: 96993 - DNA, 807 bp, Zea Mays
gacttcgtccggtgagttacaactttcattttctttggtcttggcacggtagagggggtcgttgatgcaattttccttttcgtcccctacttccaagccgaaaagcagtagttaggatagacaaaaccaataacatcaaatactctatttagccttttcttgccacgggcaccaaaagcaatgttcatggcttcatcttcagcttttgtgtatgcccccaacaaatcatcagtagtcatctcaatggcctcaagccattcgtcatctggctcccaagctggcttctgtagcggtatgtatacttcaaataactagaccaccttcgcttgaactgtcagtggtctccttcatcattttccattcattaacaagggtccataccttaaaagctatgtgctcttggaccaagtctctggtgctaatgtaactgcacacagtgttgaacgccaccaggcaggcatgagccttatcactgttcacaatcgagggccttcgaatgccgaagcgtgattgtattagacgctgaattatatctttcacatcctccctctcaatcaaatcattcttaacataaaaccattgcctcatccaagatcctggccatttcttccgaaacgttggcacaaggcgtcttgcatcagagcggtatacgaaggaataatagccaaagttgttatggtactgtcccttccccattgccttcgtctggtaagataattcatgtatattgcagaaacagtcggcgtttggttccagcccctgactcctaattgcccaaataaaaatcccaattttaattaaggcttc

SEQ ID NO: 96994 - DNA, 533 bp, Zea Mays
gggtgagggcgccattcgaggtggcctaatatgcgaatagtaaacaagtgaactagacggtgtttggtttccacctcctaaacatgagtgactaaaatttagtcatttttaatctctaaattatcaaacagtacgagtaaataaggattctcaaatagaaattctagagattaaagtttagtacctcaaatttagaaattaaagtttagtccctcaaattgtacagaaaacatgagtgcgacgtctggtttcagttaagaccgcctaatatgataatgagacagagtaagtccacagtccactcttgatgtgttctacttctgcatcttgtcatgcaattttatgcggaccgcgtgctcccgacggtgacggccacagttactttttattgcctgaacggctgcaccagcttcactcgcgaaggagcgtttgcgtgggaatgtttttattcaccgatcatgtcaccttcgccctccatagcaatttagaggatgtttggtttctaagtaataatttattttatttcattttag

SEQ ID NO: 96995 - DNA, 476 bp, Zea Mays
ctaccatttcctaattccagttcaaaaacttattttccttttcaattagtgcattgtgatctttggacgtcactgcttcctaacttcaccggatataaatactatcttgttatattggatgatttttctcgttatttatggacatttcctttgcgccacaaatccgacaccttctccactatacaaaatttctactcctacgtccagactcaatttcacattcagatacaatccctgcgataacggtactaaatttgacaacaatgcgctacgctccttcctcacacgtcatggcaccacctatcgtctctcatgtccatacacatctcctcaaaacggcaaagttgaacgatccgttcgttccatcaatgatgtcctttgtacccttccttttcaagccaagcttcctcctacattttgggtagaagctctcaacaccgccacatacctcataaaccgtagaccatccacccctc

SEQ ID NO: 96996 - DNA, 413 bp, Zea Mays
aagagtctgatcaaagtttgccagagacaattcttgtagaccaataagggaagacagagcaggagaaggaactccactactttccccactggctacatattgccgactgttctcccctcgttttcatcaacagcacaggcagcacccccactaggatcagcgacagatggatcacacccattagggtcaccgtcggtaaatttaggcacaagcacttcctcaatagcaggaaccgaaggatcagcgacagatggatcacacccattggggtcagcgtcagtaaattcaggcacatgcacttcttcaacagcaggaaccgaaggaccagcatcccgatccaagctagatactcgccgaaagctagacacccattgggactccagtcaactgctcgggcaatatgattacacccg

SEQ ID NO: 96997 - DNA, 296 bp, Zea Mays
attgcgtgtgtgtgtaacgtcgcatgcctccccttttatagctgaagggggcatgcacaaagggactgggccccgacatgtgggcccaggtacataaagaatatagtgcttggatcctctgatatctgttgtcgagacaatcttctctgcccgagatctgcgtatccctggcgtaccgaggaggcttcttgcggaagagaagatgagtatagcgcgccgctcagcacaggcgtactgtttaccagcagacccagcaggcgcgctgtctgctggatgaccttgacgccgcctgccag

SEQ ID NO: 96998 - DNA, 528 bp, Zea Mays
gcagaagataatgcactatccacagcctttggaggtcggggaaagaagagattgaacagagtttttgatgccattggcttcgtttaccccgactaccgctacccgctgcggggacaagggaaaaagacgaaagctgctacttcggccaccccagacgaacctgtgccgaagggaaaaaagttgaagatcctgactcaccggccgcgatacattgaaccggctgcgatacctgaatttggtgaagggacctcctcggctgccaaaacaaaagatactattcctctcgtgcagaggattgaagagccggctataatgccgaaggtgccttcagtcaaggtagttgaaacgaaggttgataaggttgaaaagccagaaactgaagaaataacgaagatgctagaggttttgagccctccaagtaaaggcaacagtaccgaaggtacaaatgggttctatcgtgactcctaagaggaggagaatggtaaatgtactggatgtgctagaaacaaccgaaaccttgaatcccgc

SEQ ID NO: 96999 - DNA, 609 bp, Zea Mays
aactcagtctgtgatatacatccaaagctctactgaatctgagtttctgtgaggaatcggcaatgttgtgcattgacccaaggttactgagcgatgataaaaaatagctataaggattaaatgagggttagcgatgcccaaaatcagggtagcattcccaaaggtttggcagagagtctaaattttgtggaattgccaaaaaaatgtaccgactagaggaccactccactccagattgtacaaatcaaggaggacttaccggacctaacagcaggtcgtggagcctcgtgcgccttgctccgcggcacgtcctggcgacaaggcgtcttctgactctggtgtccacgcacactcctctctcttgtggttaggcaacgggaactcttctgactccgcgtccgcgcccgctcgagcacagaggcagggagtgaactaatctgatttgacaagaacaaaagagatactatgtttggaaagaaaatgttacctgtgcaatgctatacaatcttattattttgaaacaatttcatgaccgaactttcatatactcaaacaaaagaaaagaagcaagtgatacaaattgtttcttggtacggacaacacttagga

SEQ ID NO: 97000 - DNA, 284 bp, Zea Mays
aaatgcaacagtaaggcgggcgagcctatctgcaaggaccccgcgaaacttcatatttggatttctcagaaatgcgtcccccgctatttgtcaaggctgaagatccccttgaagcagatgagtggatccgggttatcgagcaaaagtttgggcttctccgatgcacggagactcaaaagcccttatttgcggcgcaacagttgcgaggcctgccagcacctggtggggaaattatgtggctattcagccggctggccatcaagttacctgggacgaattcaaac

SEQ ID NO: 97001 - DNA, 348 bp, Zea Mays
acccaatcactggacgttgggtacgtccgattggctaggtattcctgcaccaagtccctggtgctgatctgttcagccactaccctgaattctaccttggccagctgacatgctgaccctagctgcatgttgcataggggtctggtcatttcgaagcttaaagtcagcgggtacatgaccatcgccatcagtttccccctcttcttctcatcggccttgatataaaatcattcacctttccagcccggttggccacttggtgcgttagctaagaactggagccttcgtatccttgcgatacgcaaaattgtagcagccaaaattttcatgcagactatctgccctggc

SEQ ID NO: 97002 - DNA, 503 bp, Zea Mays
gaggtgtctagggtgatttctagcaggaggtcgttgcggacaacgtgaaaggaggaggaacaacaccgtgcacttgatgaagcttgagatggtcgtgcttcttattcaggccttggagaaggttgaggacgtgagcacgatcggaaacatccttgccgaggttgtgcagggtgttggccatgttcttcatcttgcgacagtagttgttgacattgagctcgccttgctggaagacctggaactaggcgtcgaggtggagaacacaagtctagtgtgttgctgaggaactgggactcgatggtgagccatgcatggtgtgccgtcttcctgagctcgcggacgatctcctgaagctcgacggtgacagtgccgaagaggcaggacatgacgatgctgttgtgcctgtaccgggacaaggtgttggagaagacctctgtcgagggcgtagcgacgaagcgtcaataacatgaggtcgcaccagtgcgtgtagtaggtggagaggg

SEQ ID NO: 97003 - DNA, 406 bp, Zea Mays
gccaaaagagaccctcagcaaccctagcgaaggtgatttggttcgattgaaatataccttcaggtttagagaccaatttatcgaaccagacgatgactggctgaaatgtgttgaaaatactagtgatgaaatacttggagcatactccaagtctgaagataatgcattatccgcggccttcgggagctgaaaaaagaaaagactaaataaggtttttgacgctattggatttgtgtaccctaactatcggtacccgccgcgggggcagaaaagaaagggtgcaactactgggaaggatgttgcttcagctactccaagcgagcccgcgccgaagaggaaaaaggtgaaggttcttactcaccgaccgcgctacattgaaccggccacagtgcctgaatttggcggt

SEQ ID NO: 97004 - DNA, 395 bp, Zea Mays
tgcgaccatcagggctacgacaacacaacaagccttcgtaataagcgcaacaggcacaattatggctcggtaatcggggtacacgataagtccacgcaacgtgcgcaacaggagcaattgtggctcaatgatcacggcagacagacagtgcctacagggcatacgaaaaatacgcgactcagcgatggcggttcgactcaaggggagctgtccgattaaacgagagtgctacatagcaatcacatgacacagccaagttcgtacgacgcaaatattgcgtcgtgttgccagggcgcatccaatgccataactcagtcgattaacaatgtagcatgatcacgcctgtccgagtacccactatacaatttaatcgctcagcgtgagcctaaaagctc

SEQ ID NO: 97005 - DNA, 619 bp, Zea Mays
cttttcttcctgacgacactttccttttcttctgttcgctcgtcgcacatcagctgcggccgcaggtctagttgctttctcctctacttccctaatcttcgaacctgcacacacaaaccagccagcgtagccaccgccgctagcctactcatcttctcacgctcttcgcctcctgggtcatggagcacccgcgacggccgtccgtctccctcctctactgcgacgattctccttactggcggcaaccgttccagcgccctgcatttcttcagcaattcctttcgtcgttatggccatcacaatttcagtttcctctgtaaattcaagagagcatcaattggtcataaaatcctggcgttatttctctctcgcgttggctataaaatggagccgcaatgttgagtcatcatccctgctcgctccctcctccacagtttaatcctctgtgcacttgtctcctccgtgtgcacaccctgttcagctcgtcgttgctgctctctcctcctcgccaagtgttgcgtcgcgctgtgtctcctcaactctgcaaatggaacgcatgcgtcgtcgacctctctactgctgcttcgtcgtgccgccgtatcgttgctgttgctccctg

SEQ ID NO: 97006 - DNA, 476 bp, Zea Mays
tgtgattataaatcgacaataaacaaggtatatttctcacccccttcatgattttatttagaattacgagttcgtgggtggttagaggtatttgaagttacgaaggccgtgacatgtgcacatattggtgttttttagctttgtttcttggcagctatgtggcatagggtatattggtatcaagaaattttctgtgatgagcggacagggaaaacgtgttggtttaataaatccacaacaatgcataatgcttgttttttcttgcaatacttgacttggtccgtatttgttgtttcctcgacagccgttgctcttgaaggttgaagccgtgttgatgacaatgatttttttttcttctcattttctgggtgccattccaacctttctatttcacattttctgggtgccagtccaacctttctatgcatgcgtgaaaaagtggaaaacatatatgaattttgtagaataggtatttg

SEQ ID NO: 97007 - DNA, 591 bp, Zea Mays
ctctgatgaatcgttcaacggggacaagtttctagcacaaaattcaggttgcgtggggggaaaagatcatgtctttgtggttgtactggtagcttccggtacagttgtttgtttgtgcattgccctgtttgcgctgtacttttgattccgtgacgaatttgtggtacctgtgatatacgcatgtgatgtactggtctgccaagtcttttcatttcgaccgagcagtagtactcggtacgccaaagttcacgtggtactgctgcgtccttcgtttactaaggatcaaagtcaaacgtcgagaaatatagattttcctggatgttgctgataatccaccatttagtcggtaagcatgtatggcaaagttcagttggtgttcacttgttcctcaatggaggccaagaacaagaaaaaagggtcaaaggtcatggtatttcttctcttgttgattgggcaatccggacaagtctttagtgatccatgttctttatagcactctatctagaatatcatctggtagcccgtggtgcccttcctttagaccttaatggggtagctttgttcctttacctgctactgctagcgatgttg

SEQ ID NO: 97008 - DNA, 476 bp, Zea Mays
gttgaactgatgtgggtggttgaggtaaggtccatctgaccggagaatgacttgttgatgcaactaaggctgaaggctgctgaattggttgttggttgcgcacatactctaggacatatggagagtagtacgaagcagtatgaagaacctgcttcagctgattctgccttgcatcagcttcggcaagttccttctgcttttggattgtgacttggcacatccttgttgtgtgccccttatcttctccacacaataagcagaatagtcttcttggctgagtgttgtatcttcctccaaagcttcttcctccccttcctcctcttggagctggcggtctgaaggaactttgctgagttcctattgattgggagtgactctgttgtccctgaacattgttgcttttgtcttcaccatggctttggttttggattgttctaacatgccttggattgaatcttcctccgaagccccttatc

SEQ ID NO: 97009 - DNA, 316 bp, Zea Mays
ccttgccagaagctggagtttgttgcttgccttggacattgcttcgagcgggtgtgttggggatcctcttcggacaatcattggcgtagtgcccaacctcaccacacttgaagcacatggtgaatgtaccctgtcctgcaggtctcgccagggtgccagtgggggcaacctgatgagtatgcggagtctgtggagtcgcctgtggtgtatactaagctggtcgttgccctcctccaggacgagctagtgtaccctggggtggaacatagcgaggacggatgctactgctcccctgcccctgtgtgatagccttcct

SEQ ID NO: 97010 - DNA, 1406 bp, Zea Mays
ccacacctatcgagggaggagatgcaccttaccacactgattgtctttcttaggagagttttcccctcatcttgtgggaagtgctacatgaggcaagatatcacgcacctccacagtatacggtgtagttgttcctcaagcatggagtgcctcgctgtaaggtgtggctagtcttggagccccatcccttgcaccccgggtggcgttcgttggattctgagacccttggtttccaagcccacgacaccaccgaggctgcagccatgcacgcactgactaccttctacacatttgacccttggagatagcgacacaccccttgggttattccccgctgcaacggaagatgatccaatgtggcaagaccgggtggaccacgccaaggaggtgtgggtacttttccctggggccactgctcgactgacggttcggtgcatgaacacactctaccgcctagaggacctataacatgaagccatgtcatagctgatgggcttggctcaggatgcaaaggtcaccatcaccgaccaggaggatctggtggtggatctatccactgagttggtagagaaggaccttcagactgtgcagatgagtgctcgaattcgtgagctcgaagaacaagtggaggaaaggaaccacaccatcgaggttcttgaaaaccagctccagaatatccagcaatagcttgaagaggcaaacgagcacctggacatgcatcaccaggagatgcaacaggacatggaagaagacgaggacgtggatatcgaggggaggatcccgagccagcatctagcttggacaccgctagcacagctcgctctagggggcaccttctccagattctagcttttcctcgcatgcccgctagatgccaggatggggatagatgtgataggaagtagagctccttaggataccttagcttttggggtttcgaggtatactaatctaggagtggattttgtgatgtcaattgtaacaatgggaaaactttattttgggtgatggagaaaccaaatgagattaagttcatgtgtgaaattattatgactagatctgagattgaaatccacgatgtttgtctatattcttgtcacaaatatagaatcgtgggtaacaataggagctcctttaatttcagatggcaggaagagcgtgacgcgggaagaaccagcagattcccccgccacctctgcagcctcctacaatgtaggagttgatggccaaccagaatgaaattctacgatagcttgcacagcgccagcatcagcctcaacactttgggggtgacagacaatatcagcgccctcctgttgtagctacctatcaggagttcctcagcactaagccaccacttttcaccagggtagacgacccacttgacgcagtcgtatggctcaccg

SEQ ID NO: 97011 - DNA, 642 bp, Zea Mays
ctcactgccgagcacagcgagaagatcccgggtttgacctgtccaaggcacgcgtcccgatgccatcttctggtatgaggtagagaggttagttaggcacatttttgtcaatgggagcattaggattagagctaaggatcaaggtgaacgcgctcggttttggttcaaaggctgaaaattcagaaatctgaattgcagatttccccattgaacctccacttgaatggcttgtttggagtttttaataaactattttggccaagctttcataatctttattgtagcttatttagtgtatttcaatttttataattggcctaagccatgatttcatgtttttcatggcctttcaccccttttcttcttttctacttaaatagcttaattagggttggtattagggtttcaacatttttccctcttttgaaaacctcatttgttttgaacatgattctttagatataaacttagtggatcttttattcttaatttgatttggtgcttcatgctcaatttggcttacatgaaatgatgacacttgagttagcactgtgaaaagccctaggtgacactggggtgtcacagccttccccccttaaaggaatcatttcccgagattcgggtcggagtcctctcggggtg

SEQ ID NO: 97012 - DNA, 487 bp, Zea Mays
gtcaaacattagcagaacttagagcattttctacgccttgggattcaagggattgttggatttaattgggtttgtccaatttttattcagaaattaaattaaagaaaattccaagatcaaggttattgttaggtgtaatttttggggtcctttatgtggtataactgatagtgatgaaggttaagtgcatgataaccattatgtattggtggattatgatgacttttatgtggtagtggtttatgatgccttagtggttttcgttacatgcaacaaataatgacatgatgccactatcactttgtgtcctcaccctttgtcttccttgttgcagcataaaatgactaatccctgtcttcgcgtgggagaaaaaaacaaccaagaacaccacctcattgttgttatggcactcgggcatcctcgtcccaaattctacgtgtatgaggagtaggcctctaataaaactagtatcgctcacgagttcatc

SEQ ID NO: 97013 - DNA, 669 bp, Zea Mays
gatttttctttttatgttagattacgcacttccaaagagaaacttattctctacaagtgagactacttgggttacttagttaaaagcattagtttcactattctagttatagagagaaattcccattataagtgtcctaaggatttgaattccttacatgacaccttattcttttaagaatttggaatatctctctatatctagaatcatggcaataataagataattagtgtaaaacatgccatgaggtacttacgataatttaaagcatgtagattgccatagtatagaaaaagatgaatatgcaatctaccatatgagaggaatttcttcaaagaatggtgacataattttaagacatttgaagtgcttcttttctatgtgactacacaagacacatgagaaatggtaatttaagatacatgcacttaaaacataagtgttaccatcctttggctttactccatgttgtaggccttgatctttccgcataggataattctttatttcctacaacatcaatatcttccccgagatgatatgagttttagacatgataatttgaaataactttgggtcaatcttagatatatagatcattgaagattgatagcttgagttaataagaattgaattgactctctcaagcaccccaaagcttcacatcat

SEQ ID NO: 97014 - DNA, 603 bp, Zea Mays
gtctacgggaccaattggagtgcctcggcatcaactggctccccgacatgaaagcagcagcagtggaagtaatgaccccatcggagatcttgaagcccgagtgagtcgacttcaagcagcgctgcaacaccggaccgatgcttggatcgccgacggagatagaatcaatgaactaagaagggacatccgtcacctgcaggatcagcttgctgatcgggacttagcacttgactgggccgtacagtctcgtttgctagtgtgtgctaaggaagcaagggctcaggcccgaattaaagaacttagctcaactgtcgacaacctgcaggtctactgcaatacgttgcatgaggaagtccatatactatactcacaattacaccctagtgtgcctgcacaccctgctgaggcggaagccggaccatctcacgtcgcgggacgcacgctgggtggggagttagacctttttgagccccctccttctttgaggttggttgacgtctggactcccacacctgacgatgaggctgccaaagtaacggaaagcaggactaatggtgtaataaaagtagagtagtgtattgtagggtgtactgttgtataata

SEQ ID NO: 97015 - DNA, 340 bp, Zea Mays
catctaccagcgcagcaactgcaaacgatacctgtaacatggccattcgcgtgctggggactagatatgattggacccttcaagaaagctcaaggaggatacactcatgtactggttgctattgacaaattcactaagtggatagagtacaagcccatcgcttctctaacttcggctaaggcagtggaattcatacaagacataatattcaggttcggaataccgaatagcatcataactgacctgggatccaatttcactagttcagaattctttgatttctgcgaacaaaaaagcatccagatcaagtatgcatcagtggcacacccaagagccaacg

SEQ ID NO: 97016 - DNA, 683 bp, Zea Mays
gcatctccttctctccgaccgctaccgcgcgagctccaattcactggccaccgctcaagggccctataaattgagcacaccctaggctccgttaggtattcaagcatctaatccacctgctcgtgcctccaattactcaccagagcccccgaattgcttagttcccccaaatcagttttccgccaccgtgaacaagctctcactgtggtcagtgcacttcaggtccgatcttgcccactgctctcttgtttcagcattcttacatgccactgatgctcctcgacccattcaattaagctagaccgcgctagatcgccgggaacacttctgttcatccgtagttcgcactgtctccgtggacagggcgatttagagctctaattgtgcaattgatcgaggggaaaaggttattaggggtagaattcggtgtcaaccacacgggagcactggtagttgagttattcgtccggtacaggctcgctggagctcagtctgccaccgtgcgacatcgtggacctgacattgtgaagaattagaactagaagggtgtttttgtaactgtcagtgaaacgtaggaatagtgccacgaccccgtttcaagttattcaaatcatcagggtcttctgcacaaagtcgacagcgcgggcgtgggcgcgcgcgtgttttccccttctgcaggccgg

SEQ ID NO: 97017 - DNA, 714 bp, Zea Mays
gccggagttggccgcctatcgaccgtgcgccacgtgtcttagggcgttaccacgtcatagtataccactgaagcgtgtccggtcattgccgttgaccttgccatggtgaaagccacgaatcctttgcgccagtgctctcccctctctccgaccgctagcgcgccattccaaattcaagagccaccgccctcgggccctataaattaagcatgccatcagctccgctaggtagtcacgcatccagcgcacccactcgtgtctcggattgtccaccagagagctctaatttgggatttcccccaaatctgtcaagaacaccacattgtgtgagctcgccgtggccagctctccacaggtccgatcatgccctcctcgctctttttttagcattcctgtgtgctcttgatgctgctcgacccggccaattgagctagaacacgtaggatcaccaggaacacctcggtttgcccgttgatcgcgctgtcaccgtgggcagataaattaggagctaaaactttgcaattgatcgaggggtaatgatcgttaggagtagaattaggtgtcagccacaccggagcaccggtcgttgcgtatttcggctggtacaggctcaccggagatcggcttgtcgccgtccaccgccgtggggctggcgttgtaaagaaatagaaagggaggggccttaatgcagatgttagtgagacagagaaaagt

SEQ ID NO: 97018 - DNA, 322 bp, Zea Mays
tgataagatgattttggatatggccacggaagaaactactacagctgccgaagagactctggccccaacgcccgggaaagagaagggggaagagaaggaaattgccgaagatacttcggaggaaatggatcttaattttcaaaacatacttggtcaaaaactatctaaggctgagaaggaagagctgagggattatgcaatatcatgcggctatcaaccaggagcattgctcttcggtggcgttgacgaagagagcttaggatgtctccgagaccggactggagcgaagattgttagcactctatcgaagagtgttggcttt

SEQ ID NO: 97019 - DNA, 351 bp, Zea Mays
gattgtgggactcataacctgcagacagattctcatgcgggtatccctttggcatagactacttgcagtaagtttcatgggcatcacatgttcattttggaacatgggcactttgctcatttcattgtcgtgaatttattcttgtatatcggtgcatgttgcaggagagacccctgctcttgtggttgattctatgaccgtggcacgtgtctgcttcggagatggatttattgcctccaatagtcctaaatttaggaatgaagaggagccttatgtctttgctatggccctgactcagatgatgaccgtccggttggtgaactcacagagagtgatattgagatgttgcac

SEQ ID NO: 97020 - DNA, 391 bp, Zea Mays
gacagccctactcgacgcgttcgccgcaacctttatcgagcccaagggcatgctgccaccacgctctagcgaccacgacatgaaagctacttccagggtcgacacctgtgccagtccacccctactgataccctgtcgcgcacaaggacgagctggaatggaatgtcagtgcgccgccatgcttaagcagggcatcatccgcaagagttctttggcgttctctcctatgctgatcgtgcggaaggctgatggcacctggcatttccgcgtcaactatcgcgccctgaacacaataacggtcaaggatgcatacctgattcccgtggtcgacgaactactcgatgagctccatgacacccggttcttctccatgctagatcttcgctccggc

SEQ ID NO: 97021 - DNA, 506 bp, Zea Mays
tttgactcttatcctttgttgatgaggttcatcttatcttctttctccggtcttgatgtctccatgtggggtcttagttttagataggtagatggtcgtgacatatgggatagctcaaacagggtttactttgtttttttggttgggatagatggattaggcaacccatcaggtagaccaggtagttgtgcatggccgagttggtctaagccaccaattttaggattaagtgaaataggtgggaaaagcgtttctgcgtgtaggtttaatctattaactaatctaggttaatttgctctacccttcaaattgttgcaagaaatatgagttgtaacagaacctctcaaggaccttagacagtcatgcagatgcactcaatagctcaacaagacctgcttcctgcatcttcttccacatctcccaagagagtacatcccatatcacagacattacataacatcggagtaaaagcggaaagggttacaataacttaatttacattaaca

SEQ ID NO: 97022 - DNA, 768 bp, Zea Mays
caaaaaaataatcaaggcatttgactaagagaaactcattgtggatatattcaaatttcattgaacttgtagagaaaaaggcttgtgactgtacaataaaataggcatcaattcgcatttaatataaaatcgtatactgaaaaatgcaaccaaacagctgcagcactgtctattaggaaatacagtgcgaatgttatgacaaagaccagcaacaaacaaataatcaacaattaggtaaatgtatttgttgacagaggctctacatgatggtagatagaagtatgcattagcacgaaaggagtggaggatatctgtacaacatattaagagagcaagagtagtctgcctccctggttctgccgttctgccgtccatggatccggaccgtccatatcgcatcgtgtgtctgcgtctcccacactccatccttctccaccacgcgaccacccaatccctaacctccccccgcacgttcctctctgccgcgttgctcgccccctgcctccaccgccgacgcgacctctctccgcctcacctcctccctttgcctccaccgcccctcccccaacattatgatttgcacagttcctcgaggcagcattgacccatcgagtgaagtactctcaatctcatgatctggaacctttagtgcatttaccttcgaagtgccatgctttgaacaactaacaacagtctctttgtccagtgatattgggtcactatacagaccagtagattgttcagccagtttggcaccatggcctgctg

SEQ ID NO: 97023 - DNA, 542 bp, Zea Mays
aggtccactttgactcggaagaagagtcggcaatatgtcgccagtggggaaagtagtggagttccttctcctcctctgtctgccctcattggtctacaagaattgtccctggcgaactttgatcagactcttgaagatatggttccagaggatctgttatcagagctagcggatgatggtacgacggatgtttgtgctgatgtgctcgacgccgggttggggtcatcccgggcagcgtcccacgcctcatcgaccttggagcgcggtcttgagggtcaggaaactgacttggatcgtcttgttcccatgaaagtaactgagggaccttcagccttagaggcggctactgcagagaacttggtcctcaaggatggtgttgacacttacccagcccctgagggtgttgccggggataattcagctcgggtgggaagcgcaagccacgacccagcccccgagggtattgccggagatgatccggctcaagtgggtagcgcaaactatggcccagcccccgagggtgtccgagcggggtctccctc

SEQ ID NO: 97024 - DNA, 986 bp, Zea Mays
gcagtccttgatgaagtgtccagactttccacaattgaagcaaccagtggaagaactggggagagcagagaaacgagtaccagaggcattcagcttattggtaggagcgggggcagtagtgggacgaataaaaataggctgcttgaatgggtatgaaggtgggcgaggcaaagatcgattttgattaaaaggtcgaatcaccaacttggttctcttctcaggcccttgatttgaactttcacctccaaacccctttgattttccatgtcctgcagttttagcttccactgccagtgttgtactgatagccctactgtaggtaaggtccaagcacgttgccattttctgctgaagcatgtcattaagtcccctcataaaacaattcttttttagatctgtattcacttggtcgatggcatactaggacagatggttgaacttattgagatactacattacagtatctcccccttgctttaaccggatgaactcttcttgtttcatatggagcactccctctggaacataatgctctcggaacactaacttgaattcctccgaggtgatctgatgtccagccgattgaattgctacaaaatttgcccaccaagtactggcatgccctcttagctgttgtgcagcaaacagtggcttctgcgtttccgtgcagcgaatcaacccaaacttctgttccataactcttacccactcatcagcttctagaggttcttctactttaataaagagcgggggtcgagtctcagaaaattccaagtatgtagtttcatgcggtccttgaggaggagctctcccaccatgccattggaactgattgcccgccatttcgcgcaagaagcgcgtattaaccgcagtggcattgaccaggacagcgatagcctcggccaaagtctatggtactggtggtgggttaggagtatcttcccgaccgcgggaaggccccgcactgtcatgtgcgtgagtctgtg

SEQ ID NO: 97025 - DNA, 1671 bp, Zea Mays
tacaagagggagaccccgctcggacaccctcgggggctgggtcatagtttgcgctacccatttgagccagatcgtctccggcaataccctcgggggctgggtcgcggcttacgcttcccacccgagccgaatcatccccggcaacaccctcgggggctaggtaagtgtcaacaccatccttgagggccaagttctccgcagcagtcacctctaaggctgaaggtccctcagtcacttccatgggagcaggacaatctaagtcagtttcctgaccctcaagaccgcgctccaaggtcgatgaggcgcgggacgctgcccgggatgaccccaacccggcgtcaaacacatcagcacaaacatccatcgcgtcaccatccaccggctctgataacagatcctctggaaccatatcttcaagagtctgatcaaagttcgccagagaaaattcttgtagaccaatgagggcagacagagcaggagaaggaactccactactttccccactggctacgtatcgccgactgttcttccgagtcagagggatctcatcttcttcctcctcctcattttcatcagcaacacagacaacacacccattgggatcagcgacagatggagcacacccattaggatcagcgacagatggatcacacccattggggtcagcgtcggtaaactcaggcacgggcacttcctcaacagcaggaaccgaaggaccagcatcccgatccaagctagatactcgctgaagacgtctctttttctttttctactcatcagcaggagaatcaagttgattggctcagcaagggcgcttcgggcggacactgacaggcctctgaatatccaaggttttaccagcttccgggagaggcgccaccaccgatgtcccagcaggagcggcatcagaagaatcctcggctaacatatcaagcatggcacttgtctctgcatcactgggatccaaaggcacctcaaaatgaacctgccgttcatcatcaggaatttcttcaagcgaagcaaccaacgcactaacttcttcagcagagggtcgcactctaaggcccaaaccgccatcgccagcaggaggactcgacacgaaatgggtaaaggccttggaaggaggcaagttccaagccgagtaggcaacaggggcaccaacatttgacaccttgcccctaagtatcatttcaagtcggctcaccaagtccacagcaggaattcttctattggtgacccgggtggagtcagcaagacctcggtacaggtagtccgggtatgccctgtccttcaatggctaaatgttcttgaagacaaagtcagcaaccacagcttctgcagtcagacccctctccttcaacaatccaacttcagctagcagaactcctgcctcagccacatcctggtctgtgggggactcagtccagctcggagtgcgaacgtccgactgtctccctgatcgtggggggagagaatttctgtgattctcaacaataaaccactccaagcgccatcctttaatgttatctttgagggggatatcgagataatcagttttcctcccgcggcgcatttctaagctcgcgccccccaccagctgatgctgtcctccggccatcccaggccgacagtgatacaaatatttccacagcccaaagtgcggcaggatgc

SEQ ID NO: 97026 - DNA, 527 bp, Zea Mays
ggtgttccaattagataaatcgggtgatgtggtagttgtcaagcatgatagaggttgagtcacttaggttataaattgatgctcgacatgtgaggtctccaaaaatatggtgttttaagtgacttgtgcgttgtccagtttaagttgagaaagtggttaagaaaaactaattaacctgctgccacctatgtttttgagttgcgaagtctaaaatactttgctaagtgttatactggttaaccaacttgttagatgactttagttaagctcgtggtcacgatgatttgcttgttgtagtctaaatacgtatagttgtggtcgcggatgaaaagtattagtgctcatgtggtgtctaagttaaaatgcggactagtgggtgaaaagcgcttcgatataaatatatgccggatttgatgattgtggtgaatgcgtttgttaaatgaatgtggtaattttagtgcactaaatgatttggataaaatttgtaagtctacttgctagtcctcatttaattaatttaactctaa

SEQ ID NO: 97027 - DNA, 817 bp, Zea Mays
gcctgccagtacttgtcaaaacagcagcatctaccagcacaacaactacaaacgatactcataacttggccgttcgcgtgttggggactggacatgattggacctttcaagaaagctcagggaggatacactcatgtgctggtggctatcgacaaattcactaaatggatagagttcaaacccattgcttccttaacttcagccaaggcggtggagttcatacaagacataatattcagatttggaataccgaatagtatcataactgacttgggatccaacttcacaagttcagagttctttgatttctgcgagcagaaaagcattcagatcaaatacgctttggtggcgcacccaagagccaacgggcaggttgaaagagctaacgggatgatattggaggccctcaggaaaaaggtcttcgataaaaatgaaaagtttgcaggaaaatggataagggagttgccctacgtcgtttggagcttgagaactcaacccagtcgagccctgcatggaaatacccctttcttcatggtctatggttcagaggctgtgttacctgctgatctcaagtttggggcgccaaggttgatcttcgaaaacatagcagaggctgaggctactaagctggaggacattgatgtactcgaagaagaatggctgaacatggtaattcaatcagcacggtaccagcaaaccctgaggcgctatcacaataagaccatgagacatcgatccttcgcagtgggagatctcatcctccgccgaattctaacgggggagggacggcacaagttgtcacctctatgggaaggac

SEQ ID NO: 97028 - DNA, 440 bp, Zea Mays
gtggaaactttgaaatgtctactatcacttgtagcattgtccaggatatggaacagtcaaggtgttacagaagataatgggtggtgattgcacttgtactgtgcttgtcgatagtacatattaggtgcttgttgtcttcttccaccttctagacatttggttttgttgttttcaggttaattacatcttttgatgaagttagagtttaccccattcctgtaatgctttacctggtcaagaacttattgcaggtatgtccagttgcccactcattctgttgtatgattttttaaaaaaacaaaaacaagcaaaacataaccatgtttcccggcttctgtggttgtcagtattatatctttgaatatgtggatgcaccagcttaccagattctgaagaacttgaatattatcagcactggtgtcctgtaccgtataattctc

SEQ ID NO: 97029 - DNA, 622 bp, Zea Mays
ggctcagggtcaatttcatcattaattaatttgttctcatccacaaaagcgcattggacatctatctttggcagaccatagtcatttatgttcccgccactattagcaaaggcatatgagagtttgcgtattaggagggacatgagttgttcctgcggtatgttgtagttaggatttcccaatgtatctctaagttgtcgaccaatgtatctgtaaaagatagccagtatgtatcaaataatgcacgcacgttaccaacagggcaaaacataactagggtcacaaaaagttgtctaagctggtacgacgacgcagatatgatcgccttgtcaaacaacagcttccactcattatcgctctcaagcaacccacgcgcttcgcacgcatcacgaaatgtgtcatacacttgaccattgaatgtcctgatatcaacatagcttgtcgaacccttaactatcatcaatagcatgcgtaagtagtatagttcgccagcagtaggatgtacatagtacatgcgtccaatttttgtgcagcgagaccttgatttccaacatcgggacgaggcatcccatgtccatttctttgggaagtcgcaatacgttaagcatctagcttgttcatg

SEQ ID NO: 97030 - DNA, 331 bp, Zea Mays
caatcgttcttcttctaatatatcaacatcctccagtctagtagcttcagcttcggctatgttttcgaagatcaatcttggcgccccaaacttgagatcagcaggtacactgcctctgaaccatagaccataaagaaaggagtgtttccgtgcaaagctcggctaggttgagttcttaggctccaaaccacatacgacaactctctgatccattttcatgcgaacttttcattcttgccgaagacttttttctgagtgcttccaatatcattccgttggatctttctacttgcccgttggctcttgggtgtgccactgatgcatatttgat

SEQ ID NO: 97031 - DNA, 1237 bp, Zea Mays
gagttccgtgattgcattaatgtgtcctgtcaaaatgtcctcaggttcttacccaatctcagttgttacttgttagagcaatggccattgccataggctttgcttatgtacattgtcagcaatgagtaacactaacgacgtaacataacagggtaagagaaaccataccaagggtagtgtgggtttcctacttaagtacttctgtacgatgaccttgtgctctaacttccttagaatctcaaccatcttgccacccggtctcaagagttgtgatacactgggtttttctggatgtgccttggcattggtttatgctggcagtcaacggctatttgtgtgcaagcatgtgcatgctcagtcagtggttccttgtcaatttgttttcttcatgattgtaatctgtgccttttcttactacactgttattatgtcttttatgtatgcttggtcgaggatagacgtacactaatatggctggatttggtgaaagtggatcgattagtaatataggcagagatagactggactcaccctctgaaaacggtcttagtttttatgtttatttctgcttaaaccaaatgaatctgccctactctgttacatagagtcagccctgacaagattgactaacatactgctgtttcttctcctctcaaataacttatgcgacttacagcaatgaattcaaacaaacttgaacaaactctcaactaggataagctaggccactggtggacgcctgatgctgcttgctgcttgcatcatgttatcatgaataggtcttgttgatgaagacatccacaacgtatatgttgtccatgccagttgtttttcatagcataagctccataggatctggaaaatcacgttgtagcaatgccttcattaactttgaaagttgtaatgtggttgatagttgactttcatgtcaagccctttgtaatcaaatttagtgacttacaagttacaggccatcctgttcaaacaacaccaatttcagtactctcatgtgaatctgacatgcattattttttcctttacattataatccctcatggctcatacagtcatactcttgtcctacaaaatagctagctattaatttttctgtctctctctcttcaccttgtctcgtgaagttgcctcattctcttacatagcagagtaaccttaagtgctgttttgttgtaaaatatagcttcggtaatacatgttcaactgcatggttggctagttg

SEQ ID NO: 97032 - DNA, 394 bp, Zea Mays
tcggacgacggactgttcgacgggattgatgtgctgggtacataaggttgatgagtgactacttcgttcataccccaatttacagcgaagacaccttcaagcgtcggtgagcttcgaaatgaatacattgagttctcaatcatatttcaatcgaacaaacacgagtgtcattttcaggtttaggatgtgcaagcctatgttcttagaaatttgtcacaagctcgctacacgcaatccttacttctagaggagaatgaatgcagctggcactagtagaaaagagcacatagcctgcggcatccataaattatgactggcggtttcagttatcgcgcgccagtaaaaaaacgaggtgggcccgtcttgggaaccgctagtggaaacctatttctac

SEQ ID NO: 97033 - DNA, 559 bp, Zea Mays
aaaccatacaatgccttgatcatctcttctgaaacaattagctttgccgacttctatcttctcatgaatatatctcatacccttatcattcatttgggcaacaataatctctgcagaagaattgactcaagcttcaattggttcaaggttccatgttgaatcattctcaggtttaacttctccatctcttgacataaggtgatgtcagaggtccttattgtacgacaatggcaggaagccttgcgacttagtgcatctgccaccacgttggcctttcctgggtgatagtggatttctaattcataatccttaatcagctcaagccaccttctttgtctcatgtttagttctgactgggtaaaaatgtacttcaaacttttatgatctgtatatatatggcagatatttcctagcagataatgacgccatattttaagggcatgaaccacagcagctaattctaagtcatgagttggatagtgttcctcatgccgacgtaactgtcttgaagcatatgctataactcggccctcttgcatcaagacacatccgagaccgc

SEQ ID NO: 97034 - DNA, 309 bp, Zea Mays
atctgcagagagaaggcaagggtcccgctgggaagcggctttgtaatattttttggtctttgtaagatacttttgagtactatttatcgagcaatattagcacttatctgtatgatatttgtccttgctgtgtgtggtgttactaactcctccctggtacttggcccccctgggatgtaggctcgacgtgtcgaggctgggtaccagtatacctaagaaagagttggcaacggcccccaggaggtagcctcgactgggacctggacctgtacacagcttcggctaggaagtgttagtagcacacccata

SEQ ID NO: 97035 - DNA, 433 bp, Zea Mays
tccctcttgaattggagtcttcgtcgacttaggcggtggccaagggggtggtcgagcaacctaggatgtacaagaccttcaggctaaaaaacaggcatcgctgatttttggcagattctggatgtcattttgttgtgaagatttttgttagatccgactatattttgatgtgggactaattgggttagaaagcttttcttcttagctttccaatggtatctagaacgtcgaaaacgaaatccatatgtggcttgggcatccgttttcgtgagacccaatcttgtagtctgaattgggttcgtgaataaactaaactttaactcctcttgagcttgagattttatgtttgattggacttgaccatatagttgacgtccacgtactcatcattctccccttcttggtgcctgtataaggtattgttgtaggtttt

SEQ ID NO: 97036 - DNA, 438 bp, Zea Mays
gcgagctacagtgactaatcggaggcgagggctggtgttctggcttcgggacaacctaacagagctaacgacacactcaatttatagtgtccgagggcagtggtggctaattttgagaagttgcgctggcggacgaagagaggggaaaggtactggcagaggtgatcgtggctttcaaagtggcaaggcctccggcgatagacggacttactgccatggttcactgcgatgtgttaaagctactaggcatgtggcgcacggtcggtaattggccaacgccgatgagggtcatctcggccggcttatcttcaccgcgtccgagcctatccggtgccaagatctttactccgccgcgactatcttctcaccagagagcatgaatcgtagcaccggagcagatcatggcgcgagggtcatcgacggcgaggcatgatgcat

SEQ ID NO: 97037 - DNA, 646 bp, Zea Mays
tcttctcttgctaccagatggaaggctcctttgtcattaggacatcctactgctcagaggtggaaggattccctcatcttttacagagttgcgcgcttcgcatggggatccgcaagaagccgtagtacgtctggaaggaatacagcgagaatggaaatgaaaaatgctctatggcagtctacctgggagaaagccaaaactacccaaatcaccctcccttccaagtcaccgccactggacaccgcttcccagacacttgccaaaatgtttcccaaaaagccctccgccagctatgccaaaactacagtagggaagtctccgagacatcccttcgttactttccacccagcaacaaaaatacccctacctggaggaaaatacttcaggccttgtcagggagagatcctaatgaggatgaccccaccatagtctacatggtcggatatctccacacccttgacaaccactatgacgaccttttctcccactgcacccacctaaattcctgggtggaaagcctagagcaacaaatcaagaaattaaaagaggaaaaggcgtccctccaagaaagtctcgaaatagcagaaggcgaagaagccaacactcgtgaggcctaccaaaccctgaagatggactacgctaaaaa

SEQ ID NO: 97038 - DNA, 470 bp, Zea Mays
gttacatctggagagtggttcaaaatgctctttatataaatcatgttcccatgaatacagaagaattatttgggagttggattaatagctttgataaaagagacaaacacctagtcattgttggttgttgcgcgatcatgtgggccatttggaggatcagaaatgatttctgctttaacaataaaattatagttgaccccattgatattgtcttcttatgttgttttttgttggactcttggtcgattttacagaccaagacggaaagaaagaagctggttgcaggaagcctcagaatcaaaaagctggccagtgaagtcttcagtcaggatctgggttgggcgccgcttgataggaggatctgtttatcgtctcttcggtatgaagttgtctactttttcagattcgctccagtatgcttctctattttctggcttcagataactcaactcactgagcggttttatctt

SEQ ID NO: 97039 - DNA, 899 bp, Zea Mays
tttactgatttcggtatctcttgtggaccatgactgaatctctaaccatcagcttcctgcagcaacaactctagcaactgcctcgttcgatcacgccgtttatcacagttcatctcagcaccaacaagtcatgatcggttgatcctatatatggtaaaaaaatcggagataatattgccctccaaaaggtgctaccctaaactaatcatcaatgcaaaatgtgtataggcaacactgtcgatgtaaaatatatatttattgtagctaattctttcttgtaagtatctatctgtctcctgtatactactggtatagctttcataaaaggattgggcacttaactattagttcataggcattcatctttgcatgaatgaatatatttgaaattttggccaccatgcatggcctttcctttattgtactggttcacttgaatctctctttttaatataatgatgatatgcagttctcctgcatgttcgagaaacaattaccatggttaaaaatgatattgtggttttctaactcatttctatacgtatggaaactaatcattgtattcatttgtcagaacagtcagttgcatcttggaaaaaaaggagaccaactagaatataatgctactatagtatactatgaggttctacggcatagaccaatgcaactcgaatcaaatatcaccaggagtgtgcggtcaacgagttagctagtgtacactgtacactcgtaaacaacaagttccttggatttactacacccgtaggaagctcaaatattcagggacaagagttttttttattattttggttttttattctttttggttgggttgttttcaccattttttgtaaactatagctaagtggttttaggtgtttactagattatgagaaaac

SEQ ID NO: 97040 - DNA, 726 bp, Zea Mays
ctcgattcacgccggccacgatagtgcgtacagtgtaaacgggaacaaacagcagggaaggggaggcagcagtggggaagatgaggcggcggtgtgaagtgaaggaaagggtaaggatggaatgttgtacggtgcggacaggagagatgggctgagtggcgtcaaagtgcatggacaaataaaatgggctaaaacgcctaagtcacgaggacggagggagtacatggtagttgtcacaccataaacaaacacacagttgttgtggtattacaagactacaaatcctttggtgtacaatcatgatacgctgaagtatctaatagcacgaggtatgcaaacctcactaacgttaaagctaaaactagagcaagcatggtttaactagctagcataagtacttcacaaaacaactatattaatcaccacgtgaatcactagacaccacgtacgtggagagctctaatagtattttctttctgaatacatcaacaaaaccagtggcggatccaaagggggggggggggggcaaagtaggccatggccccccctcaattttatacatgcctttatgcctaatgattatttagtattaagtgtagaaaaaaatcgaagttttagatagtataaagtcttgttctaaatctctaaaactaatagctagttgctaaaattacccaagaggtttagaatggatcaactaattgttagttatacccctcaaataag

SEQ ID NO: 97041 - DNA, 1169 bp, Zea Mays
tctgcctaaagccgacgacgtggtagtttataggagcttcatgaaggcagggcttcggttccctctagataaattgatggtcgaagtactgaaaacttttgagatataccttcatcaacttgaccccgaagctcttattaaagtgggagttttcatacgggccatgaggagccaagggttagaaccggacgcatggtgcttctataatattcatgtgttatcttatcagacgaaggcgactgggaaagagcaatatcacaacaacttcgggtgctacaacttcgtgccccgctctgaggttagttacactgtgcctacattttggaagaagtggccaggatcttggatgcaagagtggttttatgtgaagaacgatctggaccagagggaagatataaggggcattattcaacaccctatttggtcgtgcttcggcattagaagaccttcggtcgcgcttgggaatgacgtacaagcgtgtcagatggcttttaacaccatatgcacttacattggcactagggtatggcctcttgccagcggatgggaaatgccgaaggaggccgccgctggctccagccaacatggtctggtgtatcttaagtatacatttcgattcagggatcagtttgacgagccaaatgatgactggttgggtgccatagaggcaacaagcgatgagctacttgggtcctattcgaggactgaagacgaagccatgatagccagcttcggcgctcgagggaaaatgagactaaatagggtttttgatgtcattggattcatgtatccagactactattatcctacgcggaagcaagggaagaagacgaagactgttacttcggtgacttctagcgtgctgaagtcaaataagattaaagttctgacacatcgacctaggcgcattgaaacgaccgaagtgtcgatgttaattgaggagtccacttctatatctgagcctagtcgctctgtgcctgtcgaagctagaacagaaccggttgaggagccaaaactgaagaaggcagcggagcagccgaaagccctgagtccaccacgcgagacggaattgccgaaggcatcaaggattcctataatgactccgaggaagaggagaatggctagcgtgctagacgctgtcatggaatctgtaaaggcatcaactcctg

SEQ ID NO: 97042 - DNA, 564 bp, Zea Mays
tgcttctgcaatatacacgaattatcctaccagacgaaggcagttgggaaggaataatatcataacaacttcggatgtataacttcgtgtaccgatctgatgtgaggtgtcatgtgccaatatttcggaaaaaatggccgggtggatgaagcaatggttttatgttaaaaatgatttgagtgagagggaggatgtgaagggcgtgatacaatgctccatacgatcgcacttcggcattagaagaccttcaaacgcgggtggtaacaaagctcaagcttgtccgctggccttcaacatagtttgcagctacattgacaccagagatttggtccagtagcacattgctttaaatgtatggccccttgttaatgattgggagatgccgaaggaaacctctgctggttccagtgtaggtggcctagtttatctgaagtacacctataactatagaagtcagtttggcgagccaaatgatgaatggcttgaagacgttgacgcgaccagtgatgaattgctggggcttattcgaaggcagaggacgaagccatggatattgcattcggc

SEQ ID NO: 97043 - DNA, 487 bp, Zea Mays
ttaacccatcagcgttcttctcctcatgtctctaacttggttcatttttgttgagtttgtgtctgtccatggcagatgctttgatcctcaagcacctccccatgcccatgtgtttaacagagagggagatccttggttgggtttccccaccactctcaggttgtgttcggcctatggttcacctagcacaactcccacaagatgatgacatcatatgatttatatgcccaccatgttgtagggtccacttcccctttcttgtttttctcgtggcattctttagtactacgggctcaaggtagggcatcttacaactaatgtcacccttgctctctcaacctctggctacctctacaaagctttcattgggtcgacgccttcggtccctctgtcacaccacctctttgttactcatacttgtaccagtgcaaaaccctttaggaaggtattcttctagctgcattctagtctctgacgtcgttccaac

SEQ ID NO: 97044 - DNA, 389 bp, Zea Mays
actctgctcgctcgctcgctcgccctttctctgtccacacttctctcattctctgagttctctctcctctccccaccttctctctcctctccccacgaaccgcgccaccttttctgacgccgcatcatcggcgacttcatcgccgtcgacaagacgcatcaaggcagtgcctgctactcccgcctccgcattcttgccccacggagcgtgctcctgctctcggccgccgtcctggtgctgaacagctgacacagccggagagatccgcccggcctcggatccgtttcttctcctgctggtgccttggtggtgagtgaacctagcttccttctgccggttgattcgatctaggagctccgtttgttcttgggggcatttactttgccgtg

SEQ ID NO: 97045 - DNA, 627 bp, Zea Mays
cgttttagcttccttgttctgtagtgatcatcactgaaatggccaagaataagaaaagtgtggatcccacactcgctggcttctacgaagccatggaaaggaccaacgtagaaaaaatcactaatgaaatgtttgctgggctacctggtgattcaagcgacagcgagagcttcgatgttgagagtgagaatgaagatgccgaagatcggccatagaggccaagtcatgttgtttttggtaagtcaactatcatacaagggcagattgaagtgatgaaaggtaagtattttcatgatgtgtccatagtgagggctgggggagaaaacatcgttccccttcctgaagatgatgaagtggtggtcttcaggagcttcatgaaaactgggcttcgctttccactccataagatgctggtcaaagttttgaagacatttgagatataccttcatcagcttacccccgaagctcttatcagggtaggggttttatatgggccatgaggagccagggtctagagccggatgccagatgcatctgcaacattcatgagctatcttaccagacgaaggcgaccgaaaaagaacaatatcataacaactttggctgctacggcttcgtgccttgctc

SEQ ID NO: 97046 - DNA, 323 bp, Zea Mays
cttcagcctccgaaggccgaaggtagaaattgatgacactgtcaaaacatgtcagagggctttcagcactgttagctccttcattggcacaagagatttgattcaagaacatatagccttcagggtatggccgcttgttgaaagctgggaaatgccgaaggagaccaccactgattctagtgatggtggtctggtccgactgaaatatacctttagatttagggagaagtttgatgagccaaacgacgattggctgaagtgtattgaagctaccagcatgagttgcttggagcttactccaaggccgaagataatgctctgtc

SEQ ID NO: 97047 - DNA, 476 bp, Zea Mays
gaacgacacggaggtatagcagaaggctccaaacggggtgatgaatgttgttttttcctcgtcttcctttgccaagctgatttgatggtatcccgagtagcaatccaagaatgacagcatagagcatccggcgatcgaatctaccacctgatctattctaggaagtccgaaggaatcctacggacagtgtttgttgagatcggtatagtcgacgcacatgcgccaatccactttattcgttttgagtacaagaacagaatttgctaaccactcaggatgcaatacttctctaatgaaccctgctgcgactaagcgagctagctcggtacggatagcttctctcttgtcaggtgtgaaacgatgcaacttttgtcggatcggcctcgcctggggatagacctttagtttgtgctcgactagctctctcgggactcccggcatatccgcaggttgccatgcgaatacgtctcggttat

SEQ ID NO: 97048 - DNA, 406 bp, Zea Mays
gttcaaaacaccccctctgccctaatatttgataattttatctagagagaacccctcactttttaagccccaaattttgagaaagagaattatacaccagtaagaagccattgtaatttttgcaaaatttttggaaatttattaagccacttgtagtgcaaacccaccttaagagcataaaggaaatagaagagaaaaagggggaataataaatatcactctaatgattcagctagaaaccttaataaaacactcactaagacattaaagggaaatcagtaagacagcaaaatggaattaccacttagttaactatgcttgaccctaaattgctaagtataccccaagaatcttcaagtagcaagatcaagccctaccttattaaagtgatcattcaccatccaag

SEQ ID NO: 97049 - DNA, 599 bp, Zea Mays
cttaaatctccataattttcttcttagtcttgtctttaaatacatcacacctagtccaatttcaaatgtgtgcgagttatcacttattctcatcgagttgtgcgaaggtttttcaaaagtagatttgtgtggaggtgtttgcgagatcaaagaaccgaaagtaatgcataaggacatgagaatttagactggtttgggctctcagcttgagataatacctacgtctagtaggtggtgattgttcccccttcctctgacgtcacattccatcttttatagatgaaggggagaggcgattacatggaaactatctagctattttcaaatggaaatacaaacagaaaactactcttcctataaactagaatattcatttctatccttacacatcagtcatcagatcatgcattcatcatgaagagacacttcgtactttcctcatatattctgatgtgcagatctttccctattatgtgggccgagtccttccagaatctaagtatgattctgagtcagtgtccgggttgggcctactgctcaacatttcctttatcagctccttcgggtaccccttaggcttaccctcaatagaagcccta

SEQ ID NO: 97050 - DNA, 759 bp, Zea Mays
cctgccccagccccagcgccaacagactatacattgtcaggttaatgttcttatctgtaactcgttccgtaatgttcttagttggcagtcattgtgagtgataatttaatactgagaaacatatttcaggtagccattacaatttacaactcatctgttgatgttttggtttacatagtcttcccatgattttctggcaatactgtatgctgtattttctaggtaacctttaggcaggctggatgttatattagaataatcagtgacagttatttacaatatgcatattccacattttttgcttattttatttcgattttctttcagttagccactctttttatggtcttgatactatatttctcttccaagtatatcatcattgtaaaatgtcagtttttgttaccaaggattatatacaaccaacattattattattatgataatctaacaaagtatcctctggcatacaactgcagggacaccagattaccattcaagcaaatttccttatggatgggttattggtagcatgggagttgcgcttgctttaattgttattgctgttcttgcacttgtcctatggaaattctttggatataaaccccaagatcgtaacggccagagaaagagcccagaccgacataagtttcaactccttaagagtggtagtttctgttatggttctggaagatatttgtgttgccaatttggaaatgcaaagccaacaagagcggatggtggtgagcatcatatcaa

SEQ ID NO: 97051 - DNA, 862 bp, Zea Mays
taagttctgtaacttcccttaatgaagaatgatttcgtctcctcctatgttgattattttgcctcatggtcagttgatgattgtcgtgatatttattgtccgtaatgctctctgtctgttatgcttgtgtcgtaactaggagttttcaaattattcctccgtttgccttatctgtgaagtcaattcctctagaatagtagctgagtaactcgggcatcatgtcgttgcttttaggggtgatggccgagtcattattgtcaacatttgcgcttctgaagtagtgtccaaatgatgacgaagccacatcagcgtttttagaattaacattggaatgactgatgaccacgtcaacgcttttagaggtaacagccgagtgacttatgacgacgtcggcattttagagataactgtcgagcgactgaagacgacatcggcgttttagagataactgccgagtaactgaagacgacgtcagcgttttagagataactgccgagtgaatgatggtaacgtcggtgttttagaaataacagccgagttagaacgggctgcatcggtcactttgaagataatagtcgagtgatgatgtggcacaccggcgtttttagaagtaaccgctgggtgatgacatggcacgccgatgttttagaagtaaccaccgggtgatgacatgggcgctttttggaaacggtatccgacccgggaaaaccccatatgtaccgcgccttcggccgcctctgctttccgtgccctagttcttgctttcctgcctccagaccctctctgtccttttgcaattcggctcccactctgttcgtcggtggagttgagatggcgcccaagcgaaaggcctcgagttcat

SEQ ID NO: 97052 - DNA, 519 bp, Zea Mays
atcgcacacaagctgctagtgttttgaggccgaagactgcctccaggctccagccatataaagtgataaagagtggggaggaggttgtcctagaaattatgcaagggcaagaatgcgacagcaaagaaggcatgtctgcatcactgctactactagctagtgaataaactgatacaatgcctgaacatgtagcagatgagcaccaaagtccaaaaatacaataagacttgagattgtactcctgcaacttcactgtaatccaaaaataatgagaaatgaaaaaaaaacagaatagctattgagcaaaacccagaaataatgagaaaggaattgttaaccatttatgaagagctgcaattagttcaaacaaaacaatatgcatagagaaaacattcagaaatcagaacaaacagaatagctattgaacaaaacccagaaataatgagaaatgaaaaaaaattgtagaaaagaacaaatactttgaagcagcacacattgctcaaaaggataccggaaggg

SEQ ID NO: 97053 - DNA, 1156 bp, Zea Mays
tgacagtacactgggggcaacgactccgaccgtcattcagccgtgaatctatcgaagggggagctcagggtccacgtccttgctatcacagtaggagtcacatcggatttcctggacgagagtgggccactaccgttcaaccaagtgaggttgtgcgaccaggtaagccccctctccccttctacttctcgtgtttaggtctcaccgatgggtgtttttgctagaggctttgcaacgtcaaggtttctcgccccctctccctgaggatgccgctattatggcagaagcaagaagtgaaagagtcggtcgcggcggcacgcaaaacctagcttggatagcgcatctatggccatgttgcgatttctctccacatggtggaactctagcccttcaaacctttcctcgatcatcctgacagctggacaaaaattcttcatgtagttcgtagaacaatctcaatccttgttgatctaacttattaccaccagacaatccccatatatcattagcctcttatcctgagtgaggtagcaatgttgagcccgtgtatcaaggcttcatattctacagcgacatcgagaatttcttcaagtgtttgtacattgttgtctgtggtgcaccacaagctcgggatgtcggtggtcccgcggtgtgtacttcatctctgggccacttgtctcagtgcttgtccggttggtggttcccttccttcttaggtgctcggggcacgagcttcggctaaccgatgaggtcccaagtccgttcatcggcggtgatgtagatgtccgctttgcagaaaagctgttccaaggtggtcgatgccttttggaagatggcccaaatgaaggccgagtcattagatccacggtagaagtcctcgatcacgactgcctcagccacatcggggatgcagttgctcatggtctggaagcgcttctagaatgagcagaggcactcgtcactctagcctttgatggatttgaggtcccagggttgcaccagtttgtcggagagcgattggaagtttgtgagaaaccggtcacagaagtcgtccccattgtcgatgcaatggcgaggaagatgtatgagccattgaagcgcgtcctacccatgcacgatatgcaggtcctctgttgccccaatagcctaggctgtc

SEQ ID NO: 97054 - DNA, 722 bp, Zea Mays
agagagagagagagagagagagagggtcgatcgagcgagcgggtcagggtatgatcgagcgacatggggctcggtcaggcgtgcatttagggagagagggttgggtggtgcaagacatagctgacacgagcatgaccagggagagagagagaggaagagtgtgaactaggtagagtggttagggtacgaccattgatcagtgtggatgcggtcggccaaggacaagtgaagatgacaaccatgtgtgaagcattagggaaagaagcgaccgaagacgtaaaagaaagaaacaacaaatgtaatgagtgataatggattagcggtaggtaatttatgtccagtctactaaatttgatttggtggattatctcttgaatagttttactaaaatggtaaatctgtctcctatatctaccgatctagtgaatggatctaaaagatggtatacatcgtactcgcgcattcgactccaatccaactctgcttgatcaatggttgctaatgtagactaatgcaccacttgataactctggttggatgagagtcgtacatccgagtcgtacgtatagcaatgttctttttatagatctagagttgatgaagttgtgccaagccgatattttaagtctactttggaatataggattggtaaaagatagagatacgaaaatatagcaatagagttgtatgataattgcaattctatagaaaattttcaagag

SEQ ID NO: 97055 - DNA, 418 bp, Zea Mays
ttctcattgaagtcttgaagcagcttggtttcggacaaatttggagggatattatttgtaggctattggcatcttcttctactcaagtcttactaaatgggtatccagggaggaagattattcacagaagagggcttcggcaaggggaccctctttccccaatgctattcatcttggtaatggacatctttggccttctctttatcaggtcgaagaatatggtttgatgcaacaactgtttggagcatcgaaactccatcggatctctatgtatgctgacgacgtggttctttttctgagtcccttggctgtagaatctccactgctatgggtattttggacttgtttggaaaggcttctggcctccgaaataacgaacataaatctaatgtttatcccatccagtgctctgaggatg

SEQ ID NO: 97056 - DNA, 551 bp, Zea Mays
tcagctcactatactctcattggggaaacactatacagaaggggcgcgacaggagtcctcatgaaatgcattctttcggctactgggaagcaactgttagatgaggtccatgctgggcaatgtgggatacacgcagcatccaggactctggttgggaaggtctttaggtctggtttctactggccaacggcaaagagcgacgcatccgagttagtccagagatgtgaagcttgtcaatacttatcaaaacagcagcatctaccttcacagcaactgcaaaccatacctgtaacatggccattcgcatgctggggactgtatatgattggacccttcaagaaagctcaaggaggatacactcatgtactggttgctattgacaaattcactaagtggatagagtacaagcccattgcttctctaatttcagctaaggcagtggaattcatacaagacataatattcaggttcggaataccaaatagcatcataactgacctgggatccaatttcactagttcagagttctttgatttctgcgaacaaaaaag

SEQ ID NO: 97057 - DNA, 777 bp, Zea Mays
ctgactatatgcatatataataaaccaaatatgtaaacaaatgactcaggtgaatgtgcataaacagaactgaagatatgcatatatattacatacaaacagcatatatatgttacttgggttgtataaaaatactatctgctaactaatcagtaaatacctaatccacagcctttgcctaaatacagaatgtcgggcgataataggaatacagaataaatacacataccctaatatcggggctcctaaacaaaaaacagatgtaatgcgcgatgcaatgacccgattatagtgatgtataagcggatacaaatcacacatttagctggataataagggttaccatcaaatccacttcaaatcgaccgatagggctcaaaaaatcgacggcaaactcggagtatttcaatgttggattacctggaacttcttgaatcggctccaatgttgggagattgaaggatgtaaggagtaatggaatggcgctggattggagcggcggtggattggcgctgcgctggtttggaggcgctgaaatcgcctggggagtcgcctcccacgaaaggaaaatctgcgcggctggggttttcttcaaatggacgctggtttatctccgttgaatgcgcgagtacggttttagaaacatgaaacgtgggagagtggctggttgacgggggtaacggcgccgtgactatgcccagttgactcggtgtggttcaaccaaaatgcccatattgactagcctgggcttcctttattattggaagcccagggctc

SEQ ID NO: 97058 - DNA, 353 bp, Zea Mays
ctgctgcaaagagatactctgatcttgattagaagttgacccaatgccagtctaagctccgccaggttacaacgactttacggcgcccgagaggcaaacatatcattatggtggaagttcgataaggagaagaaaaatcatgaggtaatccgccatgaactccatcttgcatactctatgctgtcgaaacggtacacagagtatttcgatgtgcaggatgaagcacaaagactgggagtaaagattcaaaacctgtcggacgaggtggatcagcagaagaagcatatccacaccctgatggcttcttgcgacagcctggatgagctgtataaggatgttgtcggctctctcac

SEQ ID NO: 97059 - DNA, 386 bp, Zea Mays
tgctggtgggtgagtcgtctgactctgcccgtactgagtcggtgagtgctgcagctggacacagccatggcgaggatgaaggagctcacaatcctggaagtgtccgtcgcaaacaattgcatcaaacgacccatccagccatgcctgtcgaggggaagaaaagaaataaaagacttcggcggtcatctggcttggaacttggtgctgattctactgtctcagtcctcggctgtggcttggcgagcgctaacctcaaggatgatattgaaaattgtgatggtgtctgttggaacctgcctctcaggatagctagatccaatggggaatgggaaaaaggatttgttgcagtaacacggggtgttaaagccacaatgttcctcccggcg

SEQ ID NO: 97060 - DNA, 757 bp, Zea Mays
ttcggctccgtgaaattttctgtttcttggaagtagttctttgcttatctttttcaatagatctaattgcttgtcttttcaaagtacttacaatcctctttttctttaccccaacttctttgtcaagtctctcatagtcagggtattcgaagccaagggcgtccattacccgattcgcccttcgtttctttcgagtaccaaaggcgacaatcataaattgatcctcctttgtatagttaccaaggatctcattgcacattgtttctatcatttccagccattcggcacaagggccaccgaaaatattctgaaatttgaaccggtatagcaaccgaacaagttcaaaaatcttcccttcatccttcctcttcggcattccccacccaccagatgttggaaaagttttgttagccaaatattcctgcaccaagtctcaagtactaatgtgctctgccacaactctgaattctacttcggctaattggcatggggagctgagttgcatgttgcacaatggcctcgtcatgccgaagcttaactttaagggactcattaccatgctcatgagtttctcccttttcttctccctagcctttacataaaaccattcatttttccaaccggtaggccacttggtgcggtatccaatcactggatccttcgtatctttctggtatgcgaagttgtagcatccgatgcagaccatcttctcttgccttggtctgataatggagctcatggaccctgtagaatcctt

SEQ ID NO: 97061 - DNA, 862 bp, Zea Mays
cagttgttcagaggtggcaggtgccttttagagtatagctcggacgaaagccgagtcgttggatccccgatagaagtcttcaatcacggctgcctcgaaaacctcagggacgcggttcctcatcatttgaaatcttctaaggaacgagcagagagtttcgttgttttggtgcttgatgaatttgagatcccatggttgcaccagtttgtcagagagggattggaagttcacgacaaaccggcggctgaaatctccccaatcgtcgatgcagtgtcgagttaaatgtcgaagccattgtagcacgtcctgcctaggacaatgggcaggtacgctgtcaagacatcttctgttgccccagcagcccgggtggcggtcgtgtagaaattcaagcagccccccgggtcttgcttgggttcgtatttgtcgacattggagactttgaagttgggaggccattggatgccccgaagccggggggcgagcgtggagaccctgcacgtttcctcttgtcgatgatcatgccaccagtcctagggaggggagcgagtctcatgtcacctcgaccgtccccagactagagtagttgtggaggctgccacagactcgatcctggttgcacggctacgtgtcggtgccccatgatctcggtcgtattcctcctagcatcttatttcattttcatgtcgacgatcgcgtgaagcactgatgttgctccacgcgtctcttccgctattgatggagtgacacagatcgttcgatgaatgggcgagaggtagaagatgattggccgcttgagtgagcactcgtcgatagccctctgcgtctggagttcgtggaaggccattggctatctgcgctagga

SEQ ID NO: 97062 - DNA, 457 bp, Zea Mays
gaagaacagctaaatgtggtaattcagtcggctagataccaacagaccctgaggcgctaccacgacaaagcggttcggcaccgatccttcatagtgggagacttggtccttcgccgagtattgacgggggatggacgacacaaactgtcaccatcgtgggagggaccgttcatcgttgcagaggtcacacgaccgggatcctaccgtcttactcagatggacggcaccgaagtggggaattcaaggaatattgagcacctcaagaaattctacccctagcaatgcctcaaaactcttgaagacgaattgtactttgtaaacagaagatttcatcatcaataaagcttccattctccaggatatacaagttctcaatcaacaactaacttaggtcgggctcaacttgaaatcaacacagcatgactcagggtgatcactataccctactaacggaaca

SEQ ID NO: 97063 - DNA, 457 bp, Zea Mays
attatccaacatttacgtattcacaagttagacggtcttttatgttactaggtcagacaagtgcttaatatcctatcatataccaaaacagaaagtcgtcattggccaacaacattcgaactgactgttgtgcctcgagctctaattaacccttgaattttactaactggttgcaaccattgcaatgattttgaagtcagctttctaactagatgtcaatgtataccagcttgttatttctccacattcttccgatgtagtagctgttcccttgcctgtagtcatgcaattgtaaaattgtctttatatgtttatgatgatcatatcagtatttaacatttggatgaggaactaggtctgcactttcatgttacattttttgtccattcagttgttctttcagatggtgtctgtgttgtttcttcctccagcatcagcatctgttttgatatgtgct

SEQ ID NO: 97064 - DNA, 286 bp, Zea Mays
atccacgtcgccaaaaattcttcacaccgttggattgtgaatcaatggcttctattcatcgctgtatcggtggcgtgtggaatatgctcttctcgctccttccgcttctcgagacttccatggttggcccgtgcagtgcatgcctctcctcgctccctccgcctcgtctctcttcgagtcccttcgtctctctgtcagctgcttcaccttctgccgctttgatcgtccattgccgccttcatcgtctgctctggtgtttggtgatatccatcgctttcttcgtcag

SEQ ID NO: 97065 - DNA, 448 bp, Zea Mays
cgaggatcttcctggtatgagtactgggtgtaggcggcgtggcaggcgccgtcgcatggggatggagcgtggccgacttcgagtagacggggttggtaggcgagaattgttgtcttcgccgaatggggcgggtataggcgaaggggatcttcgggagctttttgagggtgaggaattgaggataatgttgtttaattacagggagatgggtatcagtccgaaggttgagccgatgtgataggcgattccctcgccgtgtgtgtgtaataggcgatgccctcgccgtgtgtatgtaattgtaatggtgatgtgacctgttggccatattcgtacacttgtattgttccggctgcgtacatgggcggctttgtgcggagtatctttgtaatgatagacttcgattaacattattccgggtgcgcccttaagtaactgttgcgctatcttt

SEQ ID NO: 97066 - DNA, 324 bp, Zea Mays
gccacgatatagacatcgtctcctggtaaggtggaatcttgtcgaatttcgactatcccaagattagaatgtgtctgtctcatcacttgagggtcaaaccaatgacatttgaatatcactagagtaagaggtttggaaccataaaaattgagttcatatatttcttcgattcgtccaaaataatcgacatcgtcaaggctgggcttaaagactccagaacacgttgtattccgattgggccgactttggtcgtagtttgttgtgcgaaaacggtatccattgacgtcatacctagaatatttattgaccctataagcaaagcta

SEQ ID NO: 97067 - DNA, 563 bp, Zea Mays
cgtccaccgtcatcgctgcttgtcctcaacctcatcgttcccgtggtaagttggccatggctcagttccatttctggttcgcaacgcatagcgagatttagatcgggttggggggcagtagggctggaaatcgacttcatcggtggcctctctgccgtgtggggcaagcagcgccgcccaggtcgttgtgggtgtaggtgagggggtcctggccatcggatgcaccaggaacgactgcgattagaacattgaaataccccttcgctagatagatctggcccattggattgtaatcggatgacttagatcagatcgggatgaggacgcgcttcatccgttgatcatcgatctaacggccttgggcgctcgctgagtcacttaaacctaaatctaatgtgatttgtccgttttggatcggacggctcacaggagccaatacctcttcgctggccactttgctaaagagccctcgggaaacttagaaaccaacctgcggtccacaggaacagtccaccgagtctgggaaaaacttatgcgctggcccctgcacttctctgtatttg

SEQ ID NO: 97068 - DNA, 529 bp, Zea Mays
gttgaagtggccatgtgtgggcgatgagcttggtgaattgcgaagggttgcctgagcgaggagagaacttttggcatgccacgcatgacctggtgactcggctggcagtgcaaattatcatgggccagtaaaatccctgacgaatcaccttggctacgagggccctgtgtcctgagtgtgagccgtaggttccaccgtggacttcgtggaggatttctaggccttcggtttcggttatgcatttcagcataggttggctgatgccctttttgtacagctgaccctcgactattgcgaagtccctgctcctgtgtttcagtcgtttggcctcattgcggtcggttggatggtagtggccctgcaggtatagtgttattggggcccgctagtcttcggccatgatgaggttgacgattcggtggccttcggcgtcttgagttatttgcaagccttcggggttgcggacggctggtgtgccgatgacgtggtagaatacgtcagagggcagggcctcgcccttggctgctgc

SEQ ID NO: 97069 - DNA, 377 bp, Zea Mays
atcaactccctcagcgggatgaccctcattccaaaagggggtaatcagatgaatattcttggagagagcaaggttttgctctcattcatgaagcccagcagcttagagagcatcaacgtctttgatatgatctggcaggaaatcatccatgctgcctgctttccactgaagggatgtcttcatgcaccttttatcatgaagatgattgaagttgtgacgcagtttcgatatgataaaggtacaagacatcaatcttatacccctttttggattgatcccaacaatccagcagggcgcttgaggaaagccccttccagctcccatgcacatacctctgttggtctgtctgctggtcctgctgctactgccggtgcctc

SEQ ID NO: 97070 - DNA, 444 bp, Zea Mays
tcacttagcttcttcgcgagcatcatgggattcttttcatttttctttatagcttcatcggctatctcgcggccgcccttcatccaaacattggaatagaatttcctgcccatcaaagtagcttcggccgaaggctccttcgtgtcgtctatggagaagacagtttctgcctgggctacagctttaacatgttcacagccagttttctccaaaactgctgcaacccctcgagcaccggcgaaggcgcagaaatccctacggtggctaagtatttcgtcaaaggcttcagcttcttcaccgatccattcaatgattccttcgggatcgccctgaataaatttttgctccgatgagtatgcacccacctttgcaaaactctcttttaatttcttagcacaatccaaggatttctcataatatctctcctttgattcacgaagttca

SEQ ID NO: 97071 - DNA, 560 bp, Zea Mays
cactcctgagtttggtttgtggtactcctcatcgtatgttctgtccttgtgcagttattctgatgctgattttgcgggttgccttttggagcgcaagtctacttctgggacttgtcagattttgggtacttcgttggtttcatggtcttcttgaaaatagtctagtgttgatctgtctaccacagaggccgagtatgttgctgccgctagctgttattcacagttactttagatgatggctaccttaagggattttgacttggattttcatcatgtgcctctgctttgtgatagcatgagtaccataagtgttgccaagaatcctgtgctacattcgaggaccaagcacattgatgtttgctttcactttcttcgtgatcattatgagaaaggcgacatcgaattgcgctatattgataccgctcgccagcttgcagacattttgaccaaaccccttgatcaaaaaacttttgttcatttgcgaggggaattgggtgtttgtttcccttttttattagagggctcccttttggtcttttcttcttattttctgctttcac

SEQ ID NO: 97072 - DNA, 464 bp, Zea Mays
gggagggggaaaagtggaagctggagtggtggaggtggtgggtatagcggaagtggtggatggctctggagcgacaggagctggtgaagtgggaggtggagtagaaacagtggcggaaggtgtagagggagcagtggagagaggtcgagatgcgaggcgacgaactctgtaagcaatctgatcagaggaaattagcaactgtcctcctcgctctgcctgctctgttgctgatgcctctgcaagtgctgcacgggtggctctgtccacacgccgcttcttccgaccttcctgctgctcaaggtacacagtctcccccttgacctacctgaaggggcaaggatggtccttgtcatctcctccccctggcgctgagacattcttcgtccgcaccatcctgacctgagtgttggaaacctcacgagagagagagagagagagaatccaggcaggacaggagacgggca

SEQ ID NO: 97073 - DNA, 334 bp, Zea Mays
tgaaaatatccatttttgagcaatgaaccctgtttgaaatttgaattcaaaaattggacaaagattggaaatctgaatgtcagggcatggatcgttcgtcctatgaccgcagaccatctaacacatcagattttggacagttcgaaaggcagagcagactttctgcgctttctagggcgcggatcgtccagcacccccatgcggaccgtccatgagtggactttttatcaaccaaaggtaggtcatagccgtcacaattgttttattcccatgatgtctctgtcagtttgtcgtttgtgtgtttgtagattcggattcaagcacgtagtgtccg

SEQ ID NO: 97074 - DNA, 1498 bp, Zea Mays
ttcattattactactgagatagtatttggttcacaatggcaacacaaatggtaatcataacgaaaagcacctggatggaaactaatcaagataacagagtatttgtttggttgggaacaaatgtaatagaaacagttgaaactatggcctttctcctcttgcagatttttaattctcacattggaccatcagcagcaagcaaccagagaatgcagtaaagtgatacacagaaaaccaagtcccaaaacgaacacttccacaagaaactgtaactcctagaatcacattatcttctttagttaatggctaccaaggtaatttggttcaaaatgggataatgaaaaacgactgatggaacaaaccaagacaatagagtatttgtttgaactttggatggaagcaaatgtaatgggatcagcagaaacttgccccttattctttggcagcttgctacttcccattgaattaatcacaactaatcgggactaatagtaatcgtagtgcaactgatcaccatggcacaaataagcctgacaaatcataaccaattgtgattagtcagatgacttgatgaccttgcattgcacattagctgcaactagacaactcaggcaatccagacaacaaggacaggggcaacaacactcacagtgaggccagaagtaaatcaggtgggcttggagggtattgagtgttgacgacgaggtgccacagtcaatcatgtgacaggggggctccacaagtcgttgatagccaggaaaccgagagacacgtccatggcagcagaggttgattcatgtggcagcaaggtgctgccagccattggtgaaaggatatgaagcaaagtattggacgatcatgagaaaggagcggttgcaccatgaatttggaagggggtcgacaagttgtatagtttcctggcgcaggatattttggccggtaatgggtttctactgggttgttatcagacaccacatggtttacggtctgctcaatccaggccaaaacaaatgtgattatgtcacattcttaactgatcatggagtagaacaaatgaaccaaacatctcctgaattcccatgaaatcaaaacacagtatcaaaaatcagttccctgcccaagtttttcataagagatatcagaacatatattgggtgattgagatgattaagtgcatgcttgtttgttaccggaatttgccatgccaaaagttttggcaaggagaagttgagaaaaaaaatgtttgccaaagatttggcaagccaaatgtgagatgttggcaagttttggtggcaaattttggccatgaacaaatcaggctctaaaaaactggcacatcaaggactaatgtagctcagaacatagctgatagttccaattttgtgtacttgtcaagcactaacgcaggacaataataggcatatgtttaataaacacatgtccacattaactggaaacttgtttgcactgcaatgtaaacagtactggatacatttag

SEQ ID NO: 97075 - DNA, 643 bp, Zea Mays
atctgcattgccctttttcaccaatctgtcattggggatttccattatcgtgacacctgcatgtgcctcggttagaagttgcagatggaatgccattgcccaaaccattgccaacactgtgtatagtacataatactgaaagtcacacaaacttcgattgaattcactgtaatgtgtgcaatacctctagtcccaagacaattgctctttgatcacaaaactgtcagcagccttcagttgtatccaagcagcccccactaaatccacaatcccgttgagcaccagtacaactaataccacattgttatacccatatcgagctgtacagggaaaataacccccaattttccacagtcgaggatgatcctggatagcaaacaagtattgctgctcttctttctcttgctcagtaactgaccactgctctctgaactactccaccatagtttgcagaccgatccaccacgctttcgctgcgcttacagaacactcccacaccattgaatcatgaaagcttcgaatcaatttagtgctgaatgttgagcttctgcccacccaaaactgaggaagtcttctagtcttgtccttctgcactgagaacacattcccatatggaatgtagatggtcaccctcgaccacaaa

SEQ ID NO: 97076 - DNA, 829 bp, Zea Mays
ggaagatgcaacaggcgcagacatgacaattccctggtcctcagaatccgcttgtccccaagcgatggcatctagaaaacggttcttcaacacatagtaatcttcccaagttgctaattccactggaacaccagaccagcgaataagaacctgtggaacagcttgattgcccttgcgcaccagacgtcgatctagaatttcttcaggaacaatgccagtccttgagaggtccaccaatggaggcaaataagtaaagactggagtatacgatggatgataaggttttagttgtgaaacgtgaaacaccggatgaacttgagcattgtctggaagatccaatttgtaagctgccgcaccaatcttagccaacactctgaaaggaccaaaaaacttgaaagccaactttggagaaggacggtttaccacagtcttttgagcatatggctgaagcttgagcagcaccatctccccaacctgaaactctcttaccgtccttccccgatcagccatttgtttcatccaattttgagctcgagcgagttgttctctaagatgagttgagaaagcaaccctatcagccagccaatccgttactgacccctcctccggaacaccagattgaggtaacgccaacattggagcatcatatccatatagtgctttgaaaggagtacaacccagactagtatggtaagtagtattgtaccaaaattctaccaaggccaaccacaacttccatttagacggctgagcatttactgcacatcttaaatatgtctccaaacattgattcacccgttcgctttgaccgtcagtctgtggatgatag

SEQ ID NO: 97077 - DNA, 385 bp, Zea Mays
atctctttggccctgcaagtattcacaagttagaagacgctaaattgagttcatagacagatatctttgacaaactaagcatgtaccttacattggaaccaggaaatgaaatcgagcactccatttctcgcaccctttctaagaagagtatcatattcctgtggagttgggtcctttgaccgacgccagaattcatgaagaaattgttccatgtatggcgtcacctctttaaggttggtcaatacatatagcatgatatgcctccactctccatgttgtgtggaaggagcaggtcgtcataataggggagccgagtcaagcccaacttatgtgttcacatatgctgctcaccatatcccacaaaaccaccttctgcattggccac

SEQ ID NO: 97078 - DNA, 556 bp, Zea Mays
cacgcctagttctagttcgtgttgtgttggttggtgcatgcggcctgccgaccgagggttatatagggcggtaaagcagaaaagttggaagacggagaggagctgaggcgacgactgaagaagagtctggtccgttattcggggcatgttgagtttgtgatctaaattctaaagaaagcgactaacttggcaagtaaagcggaggtctgtcgctgggagatcgacaccttatagtaaatctactgcgatctataatcatcggaaaaatagttatattgttgctgaccaacgcctctgatttttctccttcgaccgaaggggtcttctctgtgtttgatgtactttgtaaccgagcatcatatcgggaggagtacagactacagagtaccagctgagcttttctttctttctttcttcagcaatcagcacggtcaaaatacagcagaagagaagccgccattgccgtgtacttttccgttcttcggatcaagctagtagtgcactccagcagagagccacaggttctgaccgatcaaattcagcgggccaaccaaaa

SEQ ID NO: 97079 - DNA, 431 bp, Zea Mays
ctttcctcttatctgagaagctgtcagtgaagatggtcacttgtccagttctatgaagatcttctatacatcttttcttatgctgaaggactgcagagtcagatttgatatatgtgtgtgatctctatagatgtctgagaacaggcgcagaggtgcgaggcgtgctcagcctaaacagcaggcaccctaagaggaagcagctccgcagtagcatttgccaccgccacccccgatgactatcgagcagatgttcttgatgcagacccaagcagtccaagcaattggtcagaccttagcagccatgctgcaggtgcagcagcagccaccaccgcctcagcctccagtgcaagtccagatgccacaagtgccccgagacaagcgggcagagttcatgaggggccatcccccagtctttgcccactctactgatc

SEQ ID NO: 97080 - DNA, 922 bp, Zea Mays
cgttaatcgaagtcttttatttaaaagacactctgcgcaaaagtcgtctaagggtgcagccggaatagcacaacaagagcgttaatcgaagtcttttatttaaaagacactccgcgcaagagtcgcctaagggtgcagccagaatagcgttaatctaagtctctcattaaaaagacactccgcacagagtcgcccacgggcgcagccggaccaacacaagcgtacgaatacagccaacaggccacatcaccatacaaattacaattacatacacacggcgagggcatcacatattacatcggctcaaccttcgggatgatacccatctccttgtaattaaatagcattatcctcaattcctcaccctcaaaaagcttccaaagatccccctcgcctatgctcgccccagtcggcgagggcaacaattctcgtttaccaacccggtctactcggagacgaccacgctccatccccatatgacggcgcctgccacttcgcgaaaattcacccacactatgttttcccaccacccttcgccgcctacacccagtactcgcaacaggaagatcctcagcaccctccacacacggcgaagtctccgccgcaaccacatccaacgcaacaaaataatccaagccttcatccgaggactcctccgtccaaggaaacgagctcccagattcaccatcagactcaaaacattcagacacagaaccaaacaaactatcatcggcaggcactacggttgaagtctctgccgcaaaattagtattgtcagtagcggttgcttgcccaggcccaaacgtcggaacctgcgcagcaaccgaggttcagtatcacacagacaaaagtttacacttacaatccctaacccctattccgccacctgcgaaggcccgaccgccgccgcggggtcttcggc

SEQ ID NO: 97081 - DNA, 458 bp, Zea Mays
tgatctaatgcaatttgaacgaacaaaatcggagttaaaatgaaccacatatgaattttataaggttcctagatttgtttttatactacaaacgacttatttatttactttttcaggaaacgagtggcgggtgagttttctagggagtccggggtctgttttaaataaaacatgatctcttcataattacttttgactggccatggaggttggttggttttataagaactcgaggtcttttttgtaaaacaggcgaccaaaggggtacacttctatcccagtcgttggatctccctgcaacggtttcgattagatctgaaccggcacagccttctagccggaggattcgcgacctacggcacggattcaaaatatgccagagctcatcctaggcgcatggtggacgatcaatgggcgagaggagtccacgccgaaggggactgcagatctaatcagcg

SEQ ID NO: 97082 - DNA, 380 bp, Zea Mays
gctagcatgtcagcatcttcattcttgctcttgtctatgtgttggagcgtgaatcctttgaactgcttttctagactccacacagctaataagtataacatgaggaccgactcccctgtggtgcagtctttctcaatttggccaacgacaattttggaatctattttgactatgcaagtctttacaccgagagctctgagtttctgaagtcctaggatgatagccttgtactatgctatgttgtttgtgcatttatctgattcgagtgcgaagcttaggtatgcggctatctatacttggccccgaatggtgatgtaaatgattgttgcggtgcctgccctcgcatggcaccatgcgatgtcatagtggatggtccaaag

SEQ ID NO: 97083 - DNA, 504 bp, Zea Mays
aacttccaaggaattttcaagaaaatttaaaatcaaatggccagagtacgctccactgctagggttgagcgtgatggagatgagaccgaagccgttgaaactgttccgatttctgaagcaatgaggcgttctgggctggtttcatcagacacacctaatgccgaagcaacacaagctgacgttgaagaagttggttccgaagatgagtacagctgcggggtgccaagtaaacctagtcatttggactttggaaaatccaccatctctgaagctgatcttcccaaaatggtgaagctaggctatttcagcgaagcaaaaaaggagctggttcgttttggcggagaggaaattactccgaagccggaaaagaatgaggttgtagtgttcaaaagcttctttaaagcaggattaagatttcctttgaatgggatgattgctgatgttttgaagaagtttggggtttaccttcatcagctgacccctaatgctatcgttagattaagc

SEQ ID NO: 97084 - DNA, 899 bp, Zea Mays
actagatcctccaaaggtcatgtttattacgtcatagacatctggttgcgaaaatcgtcttcgtctttaggtggtggaggggggagttgatgggacaggtgtattatttatgctggtgcctgcgagagggtagaatttattagtgtgagagctaagggaggtaattatgtgggtattatggatatagtggtttgatgtgttggtagcaaggggttattggtgttggactgttggtagcaagggggtattggtgttggattgttggtaggtgtggactatggcctttgttagttgttctggtgccattcttgccattgttttttggcctcctttgtgatcggacaatccttggtagagtgtccgacatcttcaccgtggaatacacaatacaacttacagtcctgtgtggatcccctactacagtcacggtctctaccaccttcactcctctactaggctatggaggttttgctgtgtgcaagggggattcgttgggttgttgtaggttgcttatgttgtggacctgctgctgctaacgatcctgttagcccttatgctagggtctactactggcctgcgaatgctcctttgccttccgctgtgactctagcttttggtagtgcaactcctctgatttgcatacttcttgaagaatcggtagagttcttagagtgtgcttggggtctttggtgcagtgactgaacatgtggctagtgcgaaggtcgctgatggcatagtgaatggagatgtggtcttcaactgaagacacttgggatttcatcaacaaaaatttcttgtagtaatcctgaaggctttccttctccaattgcgtgtagagggatatttctacaaagccattggtttctggtctatagcccttgaagttgagcgataacttt

SEQ ID NO: 97085 - DNA, 511 bp, Zea Mays
gcacccttaggctacttttgcgcggagtgtcgcatgcgagggtagtctacgctacctgtcgcggtgacttcggagtggtcgaatgccgaagaccgttgatgcggtctttttcgacacattgcgtctgagtttttgtttttgcgggggcttttgctggtatattacatggctccgcctcgttaaaaacctcacccctcgggaggaaaagagtgcaggccggaataacattgtttgctggattataagggcgcgtgggccctgatggttggacaaataatttgcggagattgtcgatgttccaggagtgctctaagtcttcgccggagggcgttgctagcctgtacgcgctgggggatgccttcgacttgacgatgaatggaccctctcatttcgactccagcttgccccgtgattctgtccgggtggtccaaacgagtacgaggtctcctttgttgaactctcttgggacgactgcattgtctcgccaggccttggtttgagcctggtattt

SEQ ID NO: 97086 - DNA, 750 bp, Zea Mays
gggtcctcggggaaagattcccaagacacagcgtaccagcgctaggacggcgggttggttttggaaaagtggagggtctcttgtgctattctaccacgacgaaggggtacggggccatctgagccgttggatcttgttccaaccgcccaaatctgatacggctgttataagccgataggagatcatgaccattggatcgaagatctagggttctcaacctctctcaactctatacgcccctagccgttcaaaccgagatcgaagatcaacccccctgtcttcttctcacgatggttagcaggcggcggcgcttctatccccgcggtggaggacccgccggagttggccaagccgccaccccagagccatgccccctaatccgattggtcctacacggtctatagagggagacaaatcaattgagaagatccctaccaggtttcgtgaagcagatacgggtgaccacgtcgatgtacgaggccgcgatgatgtgtctgtcctccgagcaattcatggcgccccatggttcctccttcccacgcgacgctagaaaccctccaggagatcaggagaaacacccagagccaaaggcgagccctcgaagacggcgcaggcgcatatccatgacattgacttcatcatcgacggcggatccccttttctccctctctgctgtttctccctatctggtgcttctttgtcgaaggtgttgcaagtcaagtcgatgggtcgaggcggcctatgattctc

SEQ ID NO: 97087 - DNA, 436 bp, Zea Mays
cacaaaaaagttttgctgcaactcccaagaggagaaggatggcaaatgtactagatgtgttagaaacagtaaagactttgaactctactccttcaaggaaaattgccgaagcttcgaaagcacaaaccgaagctgaaacaaagccggccaaaattgaagctgcagtaattcaagctgataccgaagctgggcctttagagtcttctaagatagagcctgtcgtaattgaagaaaaggcgagagaacaagttgcgcctgaaagggctgaagctcctgcctccgaagcttccaaagaaagcactgattacatcattcgccatacttctgggaagaaactttctcaagcagaaaagctggaagcactacactatgcccaaaaattaaaatacccgaagggggcattagtgtttaatggcagcggggaggaagatttttt

SEQ ID NO: 97088 - DNA, 289 bp, Zea Mays
cccattcttaactaatgtttttaggggtcatgattctatatattcccttcaacttttaattaatcacttttcccttttagtgctgatttactacaatgcatgcatacttgaatgaacgtcctctcatcaatcataggggtgctcctagggcatcccttctatcatagtgttggcctatatggcctacttatatagccacctatctacctcattattcttaaggcctttcatcctaggtctagcgttctagtcctgacgatccaacactggtttctaataaagttttatt

SEQ ID NO: 97089 - DNA, 514 bp, Zea Mays
aatagcccatatacaagcaacagacaagtcaggacagacaaataaaaatttgctaataaatcaaataggcccaaatataaatcattttctttgaaaattcagggtcagacttgcagagaactaatcgaaaacatggatggcttctgatttttttttctggtaggtgtacatgggcagaccaagactcagtgagtattcacctaggaagctatcaggaaagctacaaccagcgaccttgttcccttcgttgtagacgcagctcttccgggattcatcacgtcaccgtcgggatggcgcagcagcaagcgatgggaatctcagatggacgccacagctcgcgcgcgatgcgatttggaggtgcgaaggcaggagaaaggcgcaggaaaaggaaatcgcgagagatttggagcgtcggcgtctgcggaaacatgtgtatgctggaggtctctttactcacgcgacgcgattgggacccggactagggatctattgggggtctatttttctttttttc

SEQ ID NO: 97090 - DNA, 335 bp, Zea Mays
gagacaacaacgtccctgcccctgaggagaatgaagttgtgatttttcgaagcttcttcaaggctgggcttcggtttcctttgagtaagttcgtagttgacgtgctgaagacctacaaatctttcttcatcagatcacccacgaagccataataaggatggggatttttgtataggcagtaaggagctaggggttagaaccaagcgcaaagtgcttctgcaatatgcacgaattgctatacgagacgaaggccacgggtaaagaacagtaccacaacaacttcggttgttatggatttatcgcccgtcccaacgcaagtcatccggtgccgacat

SEQ ID NO: 97091 - DNA, 436 bp, Zea Mays
ggaagttgttatcagatagctgttgatagcagtgaagcagacccacttgagattatcaaggttgtgtccgagtttccagatgtgttcccgaaagacctaccaggtatgccaccagagcgaaaagttgagtttgccatagagcttcttcctggaaccgcccccatctttaagagagcttacagagtattgggaccagagttggttgagcttaagaagtagatcgatgagctgtcagagaaaggttacatccggccaagcacctcaccttgggccgcccctgtcgtattcgtggagaagaaagatgtcaccagaaggatgtgtatcgattatcgagctctgaatgaggtcatgatcaagaacaagtaccccttacccagaatagaggatctgttcgaccagttgagaggagccaacgtgttttcaaagatagatctga

SEQ ID NO: 97092 - DNA, 547 bp, Zea Mays
gtgtttagcttacgtggcttcgccacaatgtcatctacgtggctggcggaagttcttctttgcacttaccccctcacgatcgcccagcagtccacgtctccttgtcttcgagacttccatagaccgtcgttgcccatgtgctatcttgttgatcatcgatgaaagaagttgtagtggcggtggcaaccgagagggatcatagagagatggcgttagggttcaggaagttcaaaaggtaggtggtcaatccagcaacacgacgtgcaaggatagtggtgcgattacgagagaaaggggaaccaacgccagtgtacgatgaattcaactttgcctcctagttttagatcgtatggttaggggtcgaatcatgtttgtgtagaatattgtaggaatacttgaattttggacatgttattgcggactcaggcaaaattgttagggttttgggtcttttagtgtgtttgaagttgcggctgttaatgtaggttccgatatagaagagttcacagttgagattcaccatggtgggttatttgttggtttggag

SEQ ID NO: 97093 - DNA, 632 bp, Zea Mays
tgcgcccatacaggcagaagtaaggacttctccatttctttgtctatttgacttcaactctttgggggactttcctgtgacatagacacaccttattagagtataatccaattgactaagtcccagaaagttatctctttctcaatctctccctagcttctctatttctcctcaaattgagccaatgtggctcttttgctacaaaacgagttaaagtgcaaaccaatattccatatacataggaaaaggtgtatgaaacatgtttgaactctcaaacctgtcatacttaacatttttcaatgtttttctcctcttggcctgtttgagtcggggttggaatccaaagcatcaagttaatataatttgatctcataaggcatccttgagctccaacaccctgcaatggtcacaaagaacacgtacaaacacaagaatgacccaaactaaaagtcaaagtgaacctagctcttttggatccctttccaggttctaactgtgatacttctcctctttcttatgaccttttcctactacttgagctatgatattgagccttatgacttgaaccataaaccttaagaattacctcaatggttccaagtcatgtccttatgttgtgatcctcgatgcat

SEQ ID NO: 97094 - DNA, 659 bp, Zea Mays
agccgcgagaggaggcgacagttgggccgagaaggggatcgtgccagcgcaagtgaggctccaaggtccagcagagggcgcaaacaactcgcatgtgcaaaaatgcaaagttcagatgcgcattgtaccactccagtagctctcgtacttcatcacgcaaaaaacgaacccaccagctaccacggtggatgcggatatcagcgtattctttctcctgttcgcatttgtttgtgcctatagcaagatgggtatcgtaggaggagtagacctgaccaagttttatcgagtctaggccgtgcttgatctcgtcttaacacgcgcggctgactcggtctgacgcgtttaatcgagtccgagtgatagcctattagtttatcaccttaggtgacaaaatagtgttgtcatacacctagagtgatggactagagttctatcaccaggattacccaaccgatcctagtgcactacccgccgcactccgacctggccaaacgacacccctcgcgcgtctcgcacttcagtacgtcaggcgtgtcacacactttaaacgagtctaatgcagccccacgcctcatccgttatgaaaagatgatcggctcgagcgattagggctcctacacctacccgagaattggcttaatattttgattggattcatt

SEQ ID NO: 97095 - DNA, 412 bp, Zea Mays
ccttggcgcacaaatgagatgcactcggctttatcccttaaatcaaggtgtgacaatctccgatcgacggttcgcctactctggtccaagcagttctatccgatcaaatctgggccatcaaatggccaatcagcggctcaaactttccctccttcaccctcggcagcttgcgcacggcagcgaggcagggctccgccccccgaagctcactggatgacaccgcccagcctaccggtgaccgaactcaacctcgaacgcacctaaacattgcacggctaaaagcgaagcaggggaaagcatccttaccgaacattgatgcccgagcggcgctagccacggttttaggcggaactatggtggagaggttgctccgatgagaaattctaggcgatccggagcagaatccgcccag

SEQ ID NO: 97096 - DNA, 712 bp, Zea Mays
cggatttggaggaagctctcttaccgagaatcacccagtatataatcccgacgactacacgcagcggcattgcgaccatctgcaacgccggcgaggaattgcctctgttgcagttgcttcccgtgcttggaagcgatgcctacttgctccatgttctttggcgccatcatcagagccttccctggtcaccgtttgatgacgagttccagtattaacggcggtggcacatggttccccatctctgatcccctcccctgcggtagcttctagtgctggtgttccggccacacgagtagacaacgaggcacaattttatagtctagtagggctcggtcttatccccggtgagagcgcaacaacccgaggaggggtacgtggagccgacgctcaggttgttacgatctggttgacgacgatgctaatagaacggtcccacacaccgatcatagtaggatgagggtgatgctggagggactgcatgatggggcccgcatgccagcaaccttacgcccaggcgctcgcgcgaatataattggtggggtgagaggctggagtactgggcccaccaatcggcgctgatactttccctccaccatgggccgcgcggtttggtagggccaacatgtaattaggtcgcgcagctgcgagggagaagcagagtcactaggcaaggagaaggagacgaccttttcctttttcatattttctattt

SEQ ID NO: 97097 - DNA, 658 bp, Zea Mays
ggattaccattttaatgttggcaacaaactgtcaagggacataaacatcccacctcaacatataccagactgcaacattatgagctcatatacgtcttcacacttgccgatgtttgacgccacaccgcaaaaacatgtatatgtttcatctttgttttatcctttgtaatctcaattatcgattaaatataattcacacctgactgaggttttaaacatactatcattgattttttttgggcagggaggtgacattgatgcatctcatgacactcaaactgacacgggccccctttttaatcagacacctagtggtcttgtaagtactccaaatatacatttatgaccacataacttcacataactcggtcataaactagtatattctctacttgcattgtttttcaccggagaggaaacacacaccttgcacactacacatgtgcactcactgccacggttcacagagatggactatgctcggtcgctccgtgattttttgtgctccccaaccatcgacccaaacatgttttaatcttcaactattaagaccaacagatcatgtttgttgtttcttacataaataatgactaacatatctgtttttacattattataaaagaaaggccatagaattcggtgaatatattgaaagttg

SEQ ID NO: 97098 - DNA, 997 bp, Zea Mays
gttgctttacctttattccactgttacttgctttgctgtggacgaaaccaatgctcccagctttttgcttgtgtttcgtttccacccgcgaacgaaggtcttctgatgccgaagcgtgaacgaatggggcactggattatgcccttcacatcctccctctcactcaaatcatttttaacgtaaaaccattgcttcatccatgagcctggccatttttccgaaatgttggcatagggtacttcacatcagaacgatacacaaagctataacatccaaagttgttatgaaattgctctttcccaaccgccttcgtctggtaggacaattcgtgaatattacagaagcagttggcatctggctctagcccttggctcctcattgcccaaataaaaactccaactttgatcaaagcctcaggagtaagttgatgaaggtatatttcaaatgtttttagcacctcgaccagcatcttatgcaagggaaagcgaagcctggccttcataaaaaatttgaatattaccacttcgtctgccttaggaagagaaaaagtattctctcctcttgtcctcactatggatatatcatggaaatatctgcccttcatcgcttcaatatgcccttgcttaaagtggattttccaaaaacaacatgacttggcctccatggccgatcttcgacatcttcattctcactctcaacatcaaaactctcgttgtcgcttgagtccccagacaacccagctaacatctcatcagtggttttctcaatattagtcctctccatggcttcatagaaaccagcaagcacggggtccacacttttcttatcttctgccatttcagtgacggttataacagaaagccaaagctcaaaaaacaattgtggtcacagagatagaaagctaaaacaacaaacacaacacaaagcttgatagcacgaaaaatattttcagcgcaagcccttttatatatacacaaagcaccactgagtggtgggg

SEQ ID NO: 97099 - DNA, 375 bp, Zea Mays
cgcaacattgacgagacctcttccagccatgttcggcagaagagctcgaaagttcatgtggctcagtcattacaaaatggcatgacccacgaggatgcaatgcaatttcttaaagaccatgacatcttaggtggtactttaaaattttgtatagccaataagttacttaaagactatcaaaatctgagtacgttctcccgtctggaatcccttgaggaaaggatcagtttcctggaaggaacctggaaattagaatctgatgggtcagtttcctggcagtaacctggaaattagaatctgatccctcttccttaaaggtaagccagtttgtttaggtcttctgtagtcatgtcagttatttatcttgttcttgtg

SEQ ID NO: 97100 - DNA, 640 bp, Zea Mays
acaatgtctccgaagaaattcccagtcccatccccggaaccgctcgctctctccctctcgtcagctccacgatctgcacgtctaccaactcgctcactccctccatcacctcaactccatgatctgctcgtccaccagctcgcagaggaagataaatgagggcatttgacaacggatccgagggcgcaaaggaaggagaagcaatcgggccgaatccgtcacggaagatcaaggagaagacgattatgtggcgattgtcgctgggttgcttagttgtggcatcaaagctgacggcgagtccaccgatgacaacaacgcatcgttgtattctgctcactgctcctccctcctccagtctatgatgcgcctgacgacgtgccaccaggtaagtctctgatgcgcctgacgacgcgccgccaggtacggtctaccttcacacgatggcacgctaacaatgcttttaattcgtgagcatcctcatttgggtcatttatgcagctaatgtctgtgggatctctcatctcggagtggagctttggatgcacaagaactgtttgaggtaatgcctcggtggatgctcattctttttctttgataattaatgtgctcagtactttttattcattgccatgcatttttg

SEQ ID NO: 97101 - DNA, 421 bp, Zea Mays
cgaaaatttatgagtcacaagccgccgaccttcgccagttcaccaactagatgctgatgattgactgaagtctattaagaagatgctcaacatcacccaatgctctgaccgggaaaaggttctttatgcttctggtcgtctgacaggtcctgctgctgactggtgggattcttatgttgctgcccatgatgctgctgacactattagttgggcggaattcacaactcagttcagaaactaccacattcctgctggattgatgaagatcaagaaggagtttctgtcattgaagcaaggcaacatgtctgtcagcgagtaccgtgacaagttcatccagtgtcaagatatgctcctgatgaggtggcagatgatgaaaggaagtaagagcacttcacagaaggactcaatgggcccctacaat

SEQ ID NO: 97102 - DNA, 636 bp, Zea Mays
ctcctttccatgtaggatcaacccactgtgaaaccatagtgctgggagcccatctcgggttcacagaagagaactccgccgcagggggcttgccgtagccgccctgctccggctaggactctgttcaggcattggatgtgcagcggatggtagattagaaaacagagatcaatcggtgacaatagatcttagccgccaattgtggatcggatggaccggacttaccatcataactcattaaatcatagccgtagatcttggatcggggggtcgcgcatggataccagtttgcctgtagtaccaatttaatctgagacgcacatccttgatccatcgccagaaaagagaatacccctttgcgggctacattttgcataagagtcctcgatcttttaaggaataaactcaccattcgaaatagttcaaaagaaagtattgctaggtccctggaaattgtggcctagaccccaagctcttctgtatttatgaccacggtccagacaactgagaaattaattaaaataaatgcataattcgtttttagtgcaaaaataaagttcaaatcttaggaaatccataactctgtgaatttaactcatttttcatctattcatgttgcattaattttgttttaat

SEQ ID NO: 97103 - DNA, 357 bp, Zea Mays
caggatttcaactctgcaagcttgaaaaataagaaacattggaactccttcaccacatcatttttccgtgattctgttgatgtgattgaggagattgaacaaaatggatcaacaaccaccagcagtgatgaaaaggtactcgctatggaactccggtgccacaggtgcaggagcgctcatccaaacatcccgaaactgaaatcccacatcgccatctgtaaatctcccttcccttcacatcttcttcagaaaaacaggctgttgttgtcctcgacgatgcatatggaccgcacgtagatgctagaactcgatgatcagttgtccttgcacgcacattttgcatgtcgtgcttgccta

SEQ ID NO: 97104 - DNA, 335 bp, Zea Mays
gcagcctgaacaacacaacaagtacgcaaagatggggggtcgtcccaaaaagactccgggcaaaaatcgcctacggacgcggctggatcaacgaaggcgcgcaaccttatcatataaattacggttacatatacacagcgagggcatcatacaacacattggctcaaccttcgggatgatacccatctccctagagttgaacaacattatcctcaattcctcaccctcaaaaagatttcgtagctccccctcacctacactcaccccaatcggcgaggacaacaattctcgcttaccagtcccgtccacatgaagacacccactctccaactcac

SEQ ID NO: 97105 - DNA, 375 bp, Zea Mays
cacgcctcagaatgagttctgtttcccggtcgatctccaaagagcagtgcttgtaaaaatgtgtacattttgtctttgttaattgttattagcctgtaaaactagcaaatcctttttggtgccaaggactgtgataccttcctataccaatgaggaaaaatatcgtgtaacaatatttagtgcactatcttaaccgtcatcgataaatgctaagccaggaatatcaaccccactgggcgatcagacgattagttgtgattaggcgacgaccaggacgattagtcgcccctgatcgagcctaatcgtccccttagtcatcctatgtatttgtaggacatatatctctactacttattaaggctgcaatagtagtct

SEQ ID NO: 97106 - DNA, 1108 bp, Zea Mays
gtgaggtggtattacaaatctgagtgcataatataacgttggaaagtttaaaaaatatggccatatatttagtttcttgtgtttgttgcctttcaaatgtgtattcttgtctgtcgccatatattatgtaaaaaagaaagaatatcaaattcaagttgaccaaacttacgtagaacagtatgtaaatgatttgcagtctttcatagtttagggtttagggtttagcagtctttcatagtttttaaactgttacagatggaatttacaggtcctccaaatcaacaggcaacgattcgaaaaaaagtagatgactgtgggttaaacagtaagaaacaaaaaatcaattgtattgtatgtaggtggggaaggagttgaaaaatagcaactaatgattggtaaaacctaaatatttgtggtgtacctgtcgtagatagaacttttaaggtttccaaaccagctgttgatgatgttgaaaagctggtggtaaatacaacttgcaagatttccaaaactagctgttgataatcctgaaaagtaggtgaccatttagtatataataagaaacaaaaaacatagactcagtgatctaggttgaggagtgaaaattctaaaggagatggtagttgtaactgtttttgaggtaccatgacctaaaaagtcggaaagtattcttatattcagaactaagtagggaaaggcggtattacaaatcccagtgcataatataacagtggaaaattttaaaacaaggccatatatttaggttattatgttttgatgcctttcaaatgtgtattattgtctgcccccatattatgtaaaaaaggaaaacatcaaattcaagttgattaaacattttcctttctttttttaatatgcaaatatgtaagccaagaatattagttcccccttgcactgtgtatatgtattctctcaaccaaaattgattgtggccggtgacgaagcatacttctacgtttattcagaaacgaataattctatagctgactactattgtaactattgattgcaatcgaacaaaccttgtcacacttccaccaatatttggtaatagaaaagctatgatgtgttaggggcaccattaatg

SEQ ID NO: 97107 - DNA, 785 bp, Zea Mays
aaatataaccatacataataatgaatgcccatgtaatgctcatgagagtgcaaagatagtaaaagtttattttctaaagtcttgaatataattttccttcacggttctccgagaacctagggtttccggagttaataaaggaattcaaagggtaggggtagggttttgggtcctaagtatcaaacaaggtctgaatcataccaaactctgcccaaggcttctaaataatgtataaagatcatctaaaaagtttagtgattttttggagttattatctattttctaaaaatccagaaacaatgttttaggctattttaaatgctccaaaattctctatttgacctaaaaatcatgaaactgtttttattaaattctatgaaaattaggaatttagcaaaattggttttacatttttaccatttttctacaattttctatagatttctaaagtttcacagaaaaagaaaagagaaaagcttaaacagtgttgggctcatttcagccgaagcagcccagcagtgagcgaattcgcccgcgcgcacgtgtgcccgcgatgactttgcaaaaacgcccttaccggttcaaaattagagtggtggtccttggcgctattcacatgtctcactgacatctacaagaacacccccgtgcttatatcctttctcagttcgaagtccacgacggtgaaccacgtagggacgaactccagcgagcatgtatcggatgattcacgtgatgactagtgttctactttggcagagatcaaatccaagacctaacgaggg

SEQ ID NO: 97108 - DNA, 353 bp, Zea Mays
gtccgtttgaggtgctatatgggcaccctcccaggaagtttggtcttacccgaaagatacagtcactaatgttgatcgctccgcatgactttccaaaagggaattaatgcccaagttagtacaacgacatctttgtcgtgctcagcacggcatgaagcaacaagctgacaagggcagatctgatagtgtctttgtcgttagggttggggactcgtgtacctcaaattgcagccatacattcaaacttctatagctccacgcactaatcacaagattacatttaagtattttggtcccttcgaggtgtttgcaacgcatcggctcagtcgcttacaagctcgatctccttgctg

SEQ ID NO: 97109 - DNA, 282 bp, Zea Mays
tataagaagatcaaacacctcacctcaaagaaccacaaatcaagtggttctattgaaacaaaactcctaatcttcctaaaccttgtccttgccatcatgaaaagataatcatgtaatctcacattctttgcaccccacaaaagggagaaagtctacagaactaatggagcaataaagccgacaagaagccaataacattctgcgtggcacagttcatcgaagaaatgccaaaactccacaaagagcactgacagcacaacaacaacacaatacttgcttaat

SEQ ID NO: 97110 - DNA, 1210 bp, Zea Mays
agctaatcagaactactgttaataatatccattaatagaattcatacatcttatggttaggacacttaagcaacatatattgttctagccctaatatgctacaatcagtgataattaaattctgcaatacataaccctttgtatttgttagctgctaacttctgagtcctctaaattgtaatttgacataatcagtaaatggttgataattaaggacattaaatacaataccagacttgtgtgtatttggggtattctttgggctgtataaagtttatagcatgcttccggtatatagaggtcgatgctaattcttagataaacaaatgatagttgggaggcttagctggtagcatgctttttgtatgttgcacttgcactcgcccacaattctttctctcaccctcttctcttcatgcttcttttttggatctaccatttagcgcaagcgaacacccttaagggaaagtattgttgcttatatctctttttctaaacttctttagtgctttccttttagtttgagtcctgcttgttcaaccacacaagatgagtaaactatgcgccagctcatgtccaggaaactaatctccatcaacaacttcgtatccatcaacaatttcgtatccatcaacaacttcctcttacaatgtcaccatcaaacattgtaatgtgcaaatcattgcgtgttacatgactcctaggcatttagaaaaatgtgcgaatcaacgagtacgcccaacacaaagaggttcagcttattgttcagtcactggccatcttctatttgacaacaatttctggagtatgagagggcctgtttatttattagtcagctgaggatttcgatctaggcattttggaggcagaaacaataggccaaatacaaaataggatgtgaattcaaataacctgtccttgtaaagttaaactgtaaataacctgtccttgatgaaaatgtctgtgaattgttgaacaattgcaacttgaacagttaaactgtaaatatgagacaataagatcagcaccttaacagtataatcactggaagctgtaatgacactgcaaaaacggaggaaggaaaagtaagcctttaatgcttttcgggatttagggtatacaactgactggaacatgaattctgatacctctaaattcagtcatattaatacaacgatatattgtacatattattttagcattttaatag

SEQ ID NO: 97111 - DNA, 1210 bp, Zea Mays
ctcagttgggataagtttccaagttttgcaactaatacttcacttgcagtaatggcaaacagagtttgcagttcaaccaaactccacaagcccttaaatggctccacagcttcccaacatctgaaactgttgttagttgcatctcgcaaccgtgaaaccataagatgtcgcaatttcttcaggtttgaaaacccttgtgggaacttaactaactctgcctgctcaaggctcaatgcttgtaggttttgaagctttgcaatagattttgggagctctttcactttggtgtcatcgaggcacaaaagcctaaggttgaatagctccccaattgaatttggaatagtctcaataggcaagcctgataagtctaatactgcaaggtactttggtttggaggaaatagaagaataccacaaagataatgtcatgctggtgtcgaacgttatgaaggtgcgaagcctggatggatcaatggttgatagaatgtccttgctgcattggagcacagccactcgtcgggaatatgattccactagcattccttcattatttccatcataagttgtactaaaaccctctcgtttagattggaaaatggctagttcacgcacaagatcatgcattcggatacatctaaccctaccaaagctgttcctctctgcaacgtgaagcatgctccgtcgtatgagttctctaagataactttcagcagtgtcttctaagctgcatgcccctttttgttcaataaatccttcagctatccacaatctaatcaatctctttctgtgtattagatagtcttctggaaacatggcacaatacaggaaacagttcttcaaatagtctggtaggtatttatagcttagatttataattttctccacgcgattaaggttctcattgttgtgtagctcccagataagctgatcataaaatagcttccactcagcaacattctttggtctcaacgacaatatgcttcctattgccacaagggctaatggcagaccatcacatttctccacaatgctttcaccacactgacgtaactctgaagggcaaatatggttttcaactttaggaaatgccttcctacaaaatacaagccaggaatcatggtcaccaagaggttctactttgatcttacaactatcctcagctagtgaagctacctcctcagttcttgttgtgattattactctgcttccaa

SEQ ID NO: 97112 - DNA, 358 bp, Zea Mays
ggaaagaatatgaacttaacggacaagtataattgccatgcatgtgagggaacagaaaaatgaaccatgagaagattatacacaagataagaaaatgatcgagtcgatagaatcaggtcctttgttatcccactgtgagagcactgatgtggatttaggtagagtgccactcccgtcactcaatttcctctcacgaagcactagattcaacagtggcgagtttacacggcaaggatcgccgccacccggacgcagccggttctaccttcttcaccaagtcccccctcacacccactcactctaggatacataaaggaacacacgcactcccctgtaagctttactgggttcactccgg

SEQ ID NO: 97113 - DNA, 605 bp, Zea Mays
ctagagtttagtgctacaacttttatctttgaactttggtaagcgtttaattgaaataagcggttacttgcccttaaaatgacatattaataaccattcatgttagatatttttgcactaaccttatgttgttagagaatatgatatactagcttcttagtgaggttaactgaagggtcttttaagtctgttggtgaaacaatatgcatttgatgtgtgcaacttgttttggagcttgttcttaatcatttttaaaatttactagactagatatagtggggattaaaatgcatgaacattctcactcatgcatggtgattgatgttgttcatgaaacacatacacttaacatcgaggttgatatattatactagcatacaacacgtgctaacgctatgattccggggagaggagggaagggttcgacggtggcggcggcacgagtgaaggggggtggcagggacgatggggagggacgaaggataggggacgatctaaataatattgttcattggatttaagtaaggaagagagggtacatcgatctgaactgttggttttgattgtctattaagtctgggtgtaatttgtttggtggatttagt

SEQ ID NO: 97114 - DNA, 577 bp, Zea Mays
ccactgattaccccagagtgctacccattaacaatcactcatcatcaacccgaaccacaagggacaagtcaaccttgtgtctgcaatctcccccttgatgagtgcattgtcaacaccaccatatgaacatatgtaagcagaaataggaagaaaaagagaaactcactcaaacgactaaaagacagataaaagccaaacaagtcatttaaagtaagcaaagcttggtccctaaagaaatgggcaatgactcaacaccactaagcaagaaaaggctagccctcaataagaggcaaaagcatggctcaacaccactagccagaagccaaaagctcatcggagcaacaaaaggattaatcggagcataaaaaccaattcagagcataaaatcaacacaaaagctaaaatcaaagctagttcctccagaaagaggcaaacggctcaccacaactagcaaaagctccaaaaggctcaattttcctcccccatgtcacaatactccaaaaaatctcccccagagaccaatagctccaaataacacatctctcctcttgatagagcaaccgggaaatctcaaaat

SEQ ID NO: 97115 - DNA, 412 bp, Zea Mays
caagaacgcaaccaacgtcagcgccattcaggagaaattgggcgagggcaggatggctgcggcgcatgaagaactcactcgagtattgggtgatagaatcaatgcccagatgatggagttgcatgggtcgcagatgaatcgcatcgtcgacctggccgcacaagctactacacgcgtagctgctctggaaaatgccacatcagtgttcgaattgtggaggcccaaggtggagagttccatcgatgttgtgcggacttcagttgatacaatgcggtcagaactcgctcgcatcacacaactgctggaaggaggagcttcaagcagtcaagatggtcggccgagcattctggggccatatgtgccagtggcagagcgcccacctgtggccgcagtcaacaccagcaagcccaac

SEQ ID NO: 97116 - DNA, 479 bp, Zea Mays
tagatcttgaaaaagggttctgaatttcagaattgagaattctgaatttccccataggaccttggttcaagggctgatttggggattttggaaaaaccaaatggccaaactttcttactatgatttgttggttatttggtgaactaaaactttgtaatttggtctttaccaaaaattgtcttttccccctaaaatttctcccaattaccctttatgcttaattgtttgacttaggattaattagggtttgagatttttccttccttaaggttcatgacaagattaaggagagtttgagaagactcattataaatctttgttcttaatctttgatgttcatcccttcattaggtttacatgtgataatggcttggtttagctcaaggaagaaccctaggtgacactagtgtgtcacagccttccccccttaaaggaatctcgtcccgagatttgggtcggagtcctaccggggtgaagcg

SEQ ID NO: 97117 - DNA, 461 bp, Zea Mays
taaataagaatgccggtcaatcatgaacaaactgagtattcttgaagccttttttattgatgacatatttcccattttacagagtacattatcgtcccgatagcttttgaaatacagctaggggtaaaactttctgaggtgttctatattccaggagttcccaatttctgtgtcgtccatttgagtgagacaatatgatcccggccgagtgacttttgctactatgaatggtccttcccataagggtgacaacttgtgtcgtccctcccccgttagaatttggcggaggacgagatctcccactgaaaaggatcgtcgtcgtacggccttgtcgtgatagcgtctcagagtctgctggtatcgtgctgattgaattactgcgttcagccgttcttcttcgagtacatcaatgtcctccagcctagtagcttcggcttctgctatgctttcgaagaccaacc

SEQ ID NO: 97118 - DNA, 936 bp, Zea Mays
aattgcttggactgcttgagtctgcatcaagaatatttgctcaatggtcatcggtggtggcggtggcaaatgctactgtggggctgcctcctcttggggtgcctgttctcaaacatctgttagagttagcacgcctcgcacctttgcgcctgttctcagacatctgtagaaattgcacgcataaatcatatctgactctgcagtctttcagcataagaaaagatgtatagaaaatcttcatagcactaaacaaatgaccatcttcactaacagcttctcagataaagaggaaagtggaaataaatggattacccaactaaatatctgactttattaataactataccaagttgcaggggatacccacaccttggtgacaatcattacaaagatccaacttcagtacatgtccatcataacaagcattcaacataagataagcaagctaactctaactaagactgactagcctgagacactgaattaagcattattagaaactccgactctgtcgatctagggatccaaatctatctgggtcctgcagtctagggtaccatagtcgaagcgaccacggggcggtaaacggtaagggtgttgaatcccgataggggcgggagaaccaccatccagatagtggcatgttgcgcactcagcacgcaattccgcaacctccgcccgaaccttgcccaactcgtcaagggcgtggtccaactctgtgttgagcacgacagccaggttgaccatgctgttcagcctgggattgccctcaccaactggcgagacaatcacacctccagcactgccggtcgaacggtgaggatagtacttcaggtcgaggccatcagctaccctgctgaacaacgagcaatactgagaaagtgcctgtcgtgctgcatcttgcatggctacctcggcagtatccctctcagtaat

SEQ ID NO: 97119 - DNA, 716 bp, Zea Mays
ggaggagatagttcggctgcggtagaaaacgtaaataagttcgaagtcacaaaaataaaaaataaagttaaaagctattaagcaatacctatccaactttcgagttccgcggctttttcagctgccttcgttgcttctcttgcatcgtgagtatctttttcgctatttttttattattttgtgggccatccctcggccgccattttcccatatgtcagtaaagaattttccaccaactaagctcgcttcggccgaggggtcctttgtgtcagcaatagataaagtagcttctgcttgggccaaagccttcacatgatcgcaaccttacttctccaaaatagccgcaattcccctcgcacctgagaaggcacagacgtccccacggtcatttaaaatctcctcaaaggcttcggcctcgctgctgatccactcaattggcccttgggatcgccccgtacgaagttgtcttcacttgaatatgcgccaacattggcgaagctagtttttatcttttccacacattctacagatttttcataacatctttcttttgaagagcgaagttctacaactgttttttcccaataatttttccattaatcactggcgtctcggtcagcttcggcaatagcacatttcaattttgcttcagccagctgtttccgaaggtcctcaatttcgcatttctgggcttcagcttgggctttggaagtagc

SEQ ID NO: 97120 - DNA, 397 bp, Zea Mays
gaccttggccctcttcgacttcggcgcactagaagaggttgaagtagcaactttcctttttcccccttgccttcgggcaagaaaatagtaatcagggtaaacaaacccaataacatcaaaaactctattcagtcttcttttccctcgagcgccaaaggcaacaatcatggcctcgtcctctgtcttcgagtaggctcctagtagcccatcactggttgcctctacaacatctatccaatcatcatttggctcatcaaattggcttctgtacgggaaggtgtacttaagataaacgaagccaccttgactggagccagtagtagtttccttcggcatttcccattcattcgcaagagaccatactttaaaagcaatgtgttcttgaactaaatccctg

SEQ ID NO: 97121 - DNA, 576 bp, Zea Mays
gtagattctggtggtcacataacgctccgtggggtagagattagttcactagggcacgtaagccagaagtcaagcaatggcgccaccgcggttgatagccggtggggtagatggtgcgccgtggctgagttcgatgcgaggaagaagaagcactgtggccgtaggatgcaaaataaacggtgtagattagatcaatgcgtaaccctttgctgaaacggatccttgtcgttagatcataaacggacgggcgcgtagtgatcgtaacatttaaaatccccgttgttggtccccaatcggatggttctgcggcgctctgggtttgatccgtgcagatctaatgcatacctcccgcgcgaaatctgacggccagaaaccgtccataccccttcgcgtggcatttatctaaagagaccctaggttattaacaattcaacctgcagtccaccctggactagctctgggtctggggatttattgcaccagggcccctggactttctagtaatggtgcgctcggtccagataattagaaaatcaaataaattcattaggaaaatactttctagtgtaaaaataa

SEQ ID NO: 97122 - DNA, 775 bp, Zea Mays
ggaatcttcagccaacatatccagcatggcacttatctctgcatcacttggattcaaaggtacctcgaaatgaacctacctctcgtcgtcagggatttcaccaagtgaggcgaccaaagcactaacctcttcgggagaggatcgcactctaaggcccaaaccgctatcaccagcaggaggatttgacacaaaactggtaaaagccttggaaggaggcagattccaggctgagtatgcaataggagcaccgatgtttgacaccttgcctctgagtatcatctcgagccggctgaccaaacccacagcaggaattcttctgttggtaacccgggtcgaatcagcgaggcctcgatacagataagccgggtacgctctgtcttttagtggctgaatattcttgaaaatgaaattagcgaccacagcttctgtagtcagacccctctctttcaacaatccaacctcagcaagtagagcccctgcctcagccacctccaggtctgtgggggattcggtccagctcggagtgcgaacatctggctatctccctgactgtggggcgagggaattcccatgattatccacgataaaccattccaggcgccatcctttgatgctgtccttgagtgggatgtcgaggtagtcggtcttcctcccatggcgcatctccaaacttgcgcccccccacaagctggtgctgccctccggccatcctaggccggcagtggtacaagtactttcatagtccgaagtgtggcagaataccaaggaaagtttc

SEQ ID NO: 97123 - DNA, 1811 bp, Zea Mays
gacgaaaccaattgactgagtagcatatatggtctcagagagcgttccatgcagaaaggtgttcgtcatgtcgagctggtgcatcggccaatcatgtgagagtgccaaggacagcaccatatcgacggtggccggtttaacaagtgggctaaaagtctcgtcatagtaaatgttgaggcactgagtgaaggtgtgacacaccaagcgcgcttgtagcactccaaggatccatcaacgtgtcgtctatgaaaccaaacccattttatagtgacaatgttggcaccacgtgcacgaggcaccaggtcctaggtccagttggcaatcagagccttgaattcctccatagcccggtgctaattaggatcaacaagggtagaacaagcaatcttcgaaaccggtgacgcagttggaggggatgttatggccagaactaggcggtgaataggctgtcgaaacccacgattggcacgcgtggtcatcggatgcgggttaaccgacgacgtgattagctcaggacccataggaaaatgtgtcaacagggtggcagagcagtagtcgatcagcggcatcgcgagtagataagggtgaggaagggtcggcgacggagagcgaggcaagcttatgtttggtagttaaggagaggtttggatagcatgcacacccgaaaaccttgagatgcacataggaaggtgcggcgccaaataaagccagatatggacatgaagcgttgattgtgttggtggcatggggcgaagtgcagggataagacatctgaagcagtgcaccatgagataggaagaaagtagaggaagcattatcgaactcacgcccattgtcacattggatagacttgatgctgcagccaaattgagtggacacatgcaaagaaatttggaagagtagaaaaagtattagattttaggcgtaaaggaaacatccacatacagtgagaacaatcatcaacaatgactaaatagtattgatacccctgacaattggagaggtccaaaaatcacaatgaataagatcaaaaatattagctgcacatgaggatgaactagcaaaatacaaccgtgtgtgatgatctagctggcaagcatggcatagctaatgctagtgcttatgacaaactttattaaacactttagaaactaagacaaggcattaggaccagaataatctatacaatgatgccatgtagacactgaagcaactaagacccagtgagtagcggaggcgtgactgtgggcaagtgccgagtgtagaggggtcccgaattattgcacctggtgatcacgttcccgaaagccaaatccctcacaaacaccaatcggatcaaactctatagagcaagagttgtcagtagtgaaacattcaaacagataataagttttgaataatgtcatgagcaacaagaacattattaaggtaaaaggggccgaaaagcaccgtgtctcttaatgaggtgactggaagcatagacctattatcaacaatggtagaggaaggagaattaattgaatgagaaggacgaaaatttgttaatttatcgacatccattgtagtatgaatggaggcatcggagtctacgacccaattagtgatcgccggaggagtaaagccatggtgcctaaggagttggccagcgactgctaatcccacgctcaggggtagggggtaccaccaattgttgtgggaactatgacactgatgggagaagtggtgttggtgcaggcgggaacaaagtgctgctagaaagacgaaagggttctaacgcagccagaaaaacctacgatggaggttgtatctgc

SEQ ID NO: 97124 - DNA, 464 bp, Zea Mays
aagacatacaaaattagaatgtgcagcagtaacattcaactatcaatgaagcaaaagtgcaatactcactccctggcctcatcaagatgttcactgacttcacatagaagtagtgcaacagacccactccctggccctcatatctcgctcgaataatatttgatacattacacctagcaccacctacctatatgatagtctcttttggctataaaagaactagatcaagagcacaccacaccttactacttttgtgtgagtttaatgtagaaacttgctcttatgacctcagtatagtgcctaactcagtttagttgtttagatgtattaccctgcatttccatgtcttgcataaaaacagaagcatcatgataaaagtccaaagagtgcagtagtacacaatatgaagaaaaaaaacagaaacatcattagtgttttacagtgtgcttaattcaaagacaaag

SEQ ID NO: 97125 - DNA, 356 bp, Zea Mays
tttatagtaaaataatagaatctagatgtaacattatttgtctctaggaaacaaaacattgctcacggagcttgattacattcgaaatttctacccttggtatttgtttcaccccttcgataggtgtagctaggggtagtgttattatctggagaggtgatagatttaagggagaatgtagtttagaaaacgagtatattaagtgtgttaggcttacctctattcattttagagcataatggatactgtgcaacatttatgcaccctacactcaagctacgaagctgctttttctacattattttaactcttttcaaatggatgataatgaggactatcttttggtgggggaattc

SEQ ID NO: 97126 - DNA, 311 bp, Zea Mays
cttctgccttctctgtaaacgacggcgaccctggtagcagtccgtgccccatgctcttctcacatactccgctccatccccaagatctcctccccacgccatgcgcttcttccagtgagccctcgcgccaaggatagggagcaacatgagaagtttggcggtccacgtcgacgagagcaacagtggtgagcctcaccgtgttgtgtcccgtcttcaatccgtgggcttgaagatttcctgttcgcctgctgttctctacagcacactcattcctcaacatgcctctaattgatgcaggtacaaaaactttt

SEQ ID NO: 97127 - DNA, 481 bp, Zea Mays
cttttcttggtcatttaaactgtatagtttcttatagcatggatttaattatgtttccttgtagggtatatacttctggacaaccatgatattcaggacattcaatcgcaatgcctgagaacacatatcgcttttgtttcacaggacactgtaagtctggtgcatgcatgatctcccattctattgatgtctcctcaaatgctgttatcttcccagattagatcttttgtaaatataatgcaagttgcatttttaagatttgtagtttgtttgctactggtgaaacagtattgtcctgcggttttatcattgtatcatgtgaatagtagagatggaaagcaagtcatattttcatgtcaactgatggatgaatctaatatactaagtggttcaagttcttgatcagaaattatatgttcaagtatgaaactcttagctcattttggtgattgttgttctgcggtctgccgcatcacattct

SEQ ID NO: 97128 - DNA, 584 bp, Zea Mays
tttgcacacccatgcacctgctaccatcatcgtcggtgctactgtgaacttcaccctctcttattccctgcgctcagtctcctccctaccctcgtcgcgtcgtgcgttgcaaccacgcctcactagttgctctgtgctgtcatgaccatgcacgacctcgctaccttcgcgcttgatgtcagtaccgcgcctgtctcactgtaccgtggaccccacttgccagtggctcaccagcgcccacgtcatagctgtttaaccatggcgaggggcccactcgtcatccctcatgtgggaactgctagttccgcttgaactgaccacgatgcaacatgcccgacaattgcccaccccattgctcgtttataagtctctagcacctattctcccctccctcaatcccatatagcgatgtccatctcgctgcgtagcaactgcagcacagcccatagcggtcgtcgttgtgtggaggagcactgtcgttcttctcaggcgtcgctcactgcagcagctaccgcaccttctccgcctcgccactccaacgatctacgtcgtcctctttggtgaggcccttcttccccgacgag

SEQ ID NO: 97129 - DNA, 378 bp, Zea Mays
tccatcaaccaaaggggcgggcaggggacggggggaaagccaaccccggattggaaaatatgcgtggcatctatctatctatgctgatggcggatcgtcccacatttagacatcacttgttcactgagtccaccgccacgacttctcttcgatgctatcacgagaggggttggtttcgcaagataaactgcttcggatccgacaaaatttatcaattggtgcgttcgataaaaaaacaattcgctgccataaatggcatgcattttctattaacctagtcagagtttcaaagaaacggcatgcattttggaatggatggaattctgacctatatgcttagttaccattgttttccccttaacccagtatggatcaaac

SEQ ID NO: 97130 - DNA, 547 bp, Zea Mays
ccggactagcacaacaagtgctaaaatcgaagtcttcctcaaaagactatccgtgcaaaagtcgcctaaaggtgcagccggactagcagaacgagtgcgcaaaatcgaaggcacattacatccgtgcaaaagtcttcgtcgaaaaactatctgcgcaaagaccgactacaggtgcagccggaccgacataataaacgtgctagaccaagtgcacaacgcccctatggacacggccagatcagcgaaagcacacagcctcatcatacaaattatagttacatacgtacagcgaaggcatcacaccttacattggttcaaccttcgggatgatacccatctccctatagttaaacagcattatcctcagctcctcaccctcaaaaagacttcacaactccccctcacctacactcgccccaaccggtgaggacaacaattcccgcttgccagccctgcccacacgaagccgaccaccatccacctcactcactctacgcttcgccaccgcccttcgccacctacgcccagcactcggaccaggaaaaac

SEQ ID NO: 97131 - DNA, 455 bp, Zea Mays
gtttgttggtcagctttatcctcaggcgcggcagccttcgtctcaataggcactgaaggcctagcttaggcttcggcctggacttcgacaacttcggcaactttcttagcaggagcagggctcaaggcctttgtggtctccatgacagcgtctagcacgctggccatcctccttctcttgggagttgcggcaggagcattttgcactttcagcaattctgcctttgctggtgggctcagaatttctagcattttcattgatttttccaattttggttcttcggatacatcatctttggctttggctggcccatctgtaggcaccttcggtgctacaatcgattcttcagcactctgcacggtgggagcagcttgttttgcttcagtagatgaagaggtcctttcaccaaattcaggcactacagccggttcaatatatcgcaaccgatgggtcag

SEQ ID NO: 97132 - DNA, 457 bp, Zea Mays
ctcaactctttgtgggcgcctcaacgaggaagtagggcaccttggtggtgtgatcgaacctcggtaaaaatcgtgtgccttatgtgcttttgtgggtgttatttgtttctcatcatctcagatctttcatctatctagttggttttaattcaactttttcgctacgtttattgttggtagatctgagtagtttcatttaaattcacagttgaacaggtgaattgcggttgaactggcctcaagacctgttgaactggcctcccttgttgaactgtcatttctcacaaaagttcgaagtttgtgttgagagttgcaggtgtcgcctattcacctctcccctctaggccaccttcacaaacccaacttgaactctccactagtgtcatgtgccaagttgttccattgaactgacatgttcaaacacccacccatgcaccccttttctagaataccctcc

SEQ ID NO: 97133 - DNA, 290 bp, Zea Mays
tgcttaaagtgggggtgtcttttcatgagcaaaacaggcaacaatttttattggttagaggcaaaatgtattaaatagttaccgtacctcctagacagcatggcaaggagaacacataacacaacctaatcaagactatcataacaacacaagacaaggcacttcttacagctcctaacatagcagtacatcacattattcacaagttattattattggaataaaggtgagagaagaatgttgatgcacaagagacaatgatgtgacaatcatgatgcatgctcattcta

SEQ ID NO: 97134 - DNA, 426 bp, Zea Mays
atatcaccgccgtggataagtccggcctgtaaaacaaatccgaccaccgtactagcttgtcacggtggaacccgataggctcgccggtgaccgccgcctcccgcccgtgcgccgcgtggctcaacctttccaccacgtcgtcgtaactccccactgtgtctaatcaacgccggtgaggttgccacggcatgggacaccaattcacgcgcgccagtattcttctccacctccgaccgccgcgcgtctcgtccaaattcgcggccaccgcccgttctccctataaattgagcccgtgactagctccgcaaggtcatcagctacccagccaccaagaattgctagtgatcgatcaccagtgtgcccgaattccttgtttcccccaaatcttttctctgccaccgtaaagcaccactccaccgtggtcag

SEQ ID NO: 97135 - DNA, 590 bp, Zea Mays
ttgatgtgaatgtgtctcctacgaagagctggatttaggaagcacatgtcttgaagaagtgtcaagcctccactggcactgaaatcagtgatctcctcactcgcagttcttcgggcttggaccttatgcagaaccagacccctgacaatgcgagcatctggaggaggaagatcagttacatcgtctttaccaccatcatcatcgcttgaaggctcccaggcctaaggattcgtagcagggcgagagcggctagaaggaattcgagccgtacacccacgaccactctaagacctagttggtacctcctcatgaatctctgggaagtcttcatcagagtcagattcaatgactgaaggatttcggcgacgaaccatccttgagtccaaacgagagacacaaggtgagagaagtaatgattttcaaggaatttaaagaacacatgtgaagataaccaagagtgaatttgagcacatagttcaaccattcatgtgaatggttcaattgtcatgagcaatacacactgattcttcttcacaaaaatgtccatgataaaaagaatcattcgaggattgattcaaacatccaaccct

SEQ ID NO: 97136 - DNA, 364 bp, Zea Mays
gggatagtggtttgggccttagagtgcggccctctcccgaggaggttgaggctttggttgcttcgcttggtggaatccccaatgatgagaggcaggttcactttgagatgcctactagcccgagcgacgtagaaataagtgacatgctggatatgttggctgaggattcctctgactcggctcctactgaaacactagctgtagcactcatcccagagtctggaaaaacattggacattcagagacctgatactattcgcccgaaatgtctccaccaagctagtcatccaacttcttctgctgaagggaagaagaagaaaaagagacagcttcggcgagtgtcatccttgaatcaggataccga

SEQ ID NO: 97137 - DNA, 660 bp, Zea Mays
gcggggcttggcttagtgtggcacagcgatttccactcacattgctcagttgcggttacacaattccacagtgaaggagagcctattagcgcatattgaaccctatccctaataccctatctgccacacacacagacgccacatccattctcatccacgcacacaaccaccacaccgagcctcgcatcgcatccactggccagctgctgcttggcacccacgactgccaattgtcgcctcgcgccccactggtggtcgctaccaccgctagttgttgtctctgtcgtttgttgcttactgtcgcttgtcgctattgcttgctgctgcttgcttgctaccgctccacacgctaaggaatcaacttatgaacttatttatggttgtaatgtttcaacttatatatatgtatcgttgttcctaattttaattactggttttggccgttatcgatacgtttccgatcgattatcgtttatcgtcatctcgttacttccggtttcgttttcctgaccgacaatcccattatctctactatctattaagtcaatagtgtaaaccacggcactaccatgacttcaccctccccagaccccaccggcagatatgcggcccgtcgcggcctctattggccattccggtctcgaggcccaagcatggcgg

SEQ ID NO: 97138 - DNA, 385 bp, Zea Mays
attctacccaagatgcagaaacaaaagaatgtgtggcaccagtatcaaataatacttttgctgggtaggattcgactggaaacatacctactgccacgtccggagcatcctgaattgcttcggcctccaggtggttcacctttccacggttgtaggcctgaccacggactcctggtgcttgctgtggtgctccttgtcttgctggggcattgactgctggcggttgctgggctgctttctttggacaattcttcgcccaatgattctgttctccacagtagaagcatgctcgacctcctacttgcgctggggctgcttggccattctggttggttgatggggcaggaagacaagctgcctggttgttctaacgatggtactgatt

SEQ ID NO: 97139 - DNA, 988 bp, Zea Mays
ccttaaactgtttttctagactttgcactgctgatagctattacttgaggatcagttctcttgctgcgtagtctttctcaatttgcacgacgacaattttagagtcagtgttcactatgcaagtctttacgctgagggctctatgtttgcggagtcgtaagacgataacttcttattctactatattattcgtgcatttgtttgactcgagtgcaaatcttaggcgggcgatgcatatttatttggctccagatggagtcatgatgattgatacggcgcctgctcccgcgtggcaccaggcaccgtcatagtgaatggtctagattgcttctgtgctaggatggatggaggtcggggatgatgtccagtcgactatgaagttgatgaggacctgtgattttattgttgttctaggctcaaaggtgacattgtagctggacagttatgctgaccacttggctattctagcgaaggcctcgagattgttgaacaaatcaatgagggctcgatctgtatggatccttatcttgtgcacctcgaagtagtgcctaaatttgtgtgatgtcataaggactgcatagatttttttctagttctgtcatgttacactttgaattggtgaggacctcggaaacaaagtagacatggtattgctatagtttgttgtcttcgtgtctttcctacaccagagctgcactgacctccctatatgatgctgcgatgcatagaagttgaggtgaagtggggtatgggttgatcagtgttgtgagctggaacaagtactccttcagccattcaaaggctgcagcctgctctgggccctaagcaaaatccttcactccatgtagtgttttgaggaatgggagacttcgctcaatatatcttgagatgaatctgttcaacgtggcgagccttcctgtcaacttttgcatgtctcgagctgactgcatgggtgtcatgtctagtattgcttttatcttggctgggt

SEQ ID NO: 97140 - DNA, 320 bp, Zea Mays
cttgggttaacttatctttcaaagtgttgaacgctacctcctgcgaatcactccaagcaaacgacacatctttctttgtaagctcatgtagaggtgctgcaatggagctaaaattacgaacaaatctgcggtagaaaccggcaagtccaagaaagctccgaatttgtgtgaccatcgtcggtgtaggccactcccgaatggcagcaatcttgctgctatccacctcaatgccctgcggagtaaccacataaccaagaaacgagacacgttgcgtgcaaaatgtgcactttccatgttaccaaacaagcgagcagcacaca

SEQ ID NO: 97141 - DNA, 690 bp, Zea Mays
tggttgtcttcaaacattttgtggacagggcactagaacatgcccctggtgctgacaagtaaaacgttctttttcctggagtgctaattgtcttgctgttagggtataacggtcaccctgaacaattgtgaaagtaaatgtgccatgctggttttaaggcgttttacaacttaagccgatcgcctggctggtagggcatagtggtcgccataagataagtagacgtgatcataacgcaccgacttaagtcattgccgatttgagctgattgctccgttagtagggtatagtggtcaccctaaaccgagttagcgtgagcatgttgcaccgtcttaagttgtcaccgacttaactcgattgctccgttagtagggtatagtggtcaccctaagccgagttagcgtgagcatgttgcaccatcttaagtcgtcaccgacttaagccgattgcttcgttagtagggtatagtggtcaccctaagccgagttagcgtgagcatgttgcatcgtcttaagtcgtcaccgacttaagccgattgctccattagtagggtatagtggtcaccctaagccgagttagcgtgagcatgttgcaccgtcttaagtcgtcaccgacttaagccgattgctccgttagtagggtatagtggtcaccctaagccgagtaagcatgagcatgttgatttcaagt

SEQ ID NO: 97142 - DNA, 327 bp, Zea Mays
ctgggcatgggaacttaccatgaacacaccaggcgcagaatagcccatacgccggtaagtcatgcatggagtacttgtaccaaacatgcattctgaagtttgtctttgtagctcgatcatacatccataccccttcctaccaggcacgtaccaattcattgatcaaaggctccatgtacatgcccattttattcctcgagtgtccgggaattatcaacgacacgaatatattctgcctttgaaagcacacaccaggggggagattgattgggataacaaacacaggccaacatgtgtacggggcagcgctcattccatagggattga

SEQ ID NO: 97143 - DNA, 409 bp, Zea Mays
gtgaagacgaagatgcagaaaattggccctggcgaccaagtcacactatcttcgaaaaatcatccattaagcagagtcaaattgacgctatgaaagggtgatatttccgagatatttcaattgtgagagctagaggagatagcgctatgcctgctcccgaagaggatgaggtggttgtttataggagttttatgaaggcagggatttggttcccattaagcaaattcctgattgaagtggtgaagacctttgaaattttccttcatcaaattaccctcgaagccattattaggatgggggtttttatttgggctgtgagaagccaagggctggaaccgagcgtgaagtgcttctgcaacatgcacgaactactgtacgagacgaaggccactggcaaagagcaatatca

SEQ ID NO: 97144 - DNA, 534 bp, Zea Mays
ctctttccagtcattggggtccgacactggttggctcaaggtgctgcactcttgcatctgatctaagaggataattggttgtgatatttcttggacgaagatcctgggtggagcctgggcccgactggatcccagcttcgacaacgcgtctgccggcgcgttgcggtctctttccacgtgatggaactccaatccttcgaatttgtcctctaattttcggacggctgcacaatacttgcccatggaatcagtcaagcaatcccagtctttgtttatctggcttatgaccactaatgaatctccatataccatcagcttcttgatgctgagtgatgcggcgatgtttaatccatggatcagtgcttcatattctgctgcattatttgatgccggaaataatagctggagtgcatacttgagttgttcacctccaggagcaataaagagaatccctgcacctgctccttgcaacttcagcgagccatcaaagtacattctccatacttcggtagtctccaggttgtctgggacctg

SEQ ID NO: 97145 - DNA, 849 bp, Zea Mays
gcatatcttccaacacttggtttgttctttccatttgcccatccgtttgcggatgataagttgaactaaagtttagcttggtatccacggactcatgtagtcttttccaaaagcgcgaggtaaactgggttcctccatctgatacgatcttcttgggtactccatgtagacaaacaatcctcgacatgtataactctgctaactgggctcctgagtaagttgtcttcacaggtataaagtgtgccactttagtcaacctgtctactatgacccatattgaatcatagccatcccgagtacggggtagtccaactatgaaatttgtaccgatttcttcgcatttccattccgataccttaagaggttgtagtaaccctgctagtctttggtgttcgactttaactcgctgacacacgtcgcacagtgcaacatgagtagccacatctcttttcaaaccgtaccaccaatccttttcctttagatcctggtacatctttgtacttccaaggtgaatagagtaagccgaatcatgagcttctctcaaaataagttggcgtaggtgttcgatttccggtacacagattctctttttaaaccatattgtgccttgatcatcttccgtgaaatctagggctttacccaaaccaatttgtgtctttatttctttgattttctcatcagactcttgtcctttacgaatctcttcgtccaaagtagattcaacttccataactgttgcttccatgttattgagcattccaaggttgagttgctccatttcccagcacaattcctgtgacatgaaatgagtagtgatgttgttcacttgacctttatggctcaaagcat

SEQ ID NO: 97146 - DNA, 531 bp, Zea Mays
acgctggccattcttctcctcttgggagttgtggcgggagcttttgcaaccttcggcaattctgcttctaccggcgggctcagaatttctggcttcttggccgccccatcttcggcttcgactggctcaactataggcaccttcggcactatagttgattcctcagcgctccgagcgatgggagcagcttgttccgcttcgacagcggaagatgtctcttcaccaaattttggcactgtggccgtctcaatgtaccacggccgatgcgtcagaaccttgatctttttgcccttcggcacagcagagatggccaaagcgacagttttcctcttttttccctgcctttgcgaggggtagcagtaatcagggtatataaaaccaattgcatcgaaaaccctgttcaatcttttcttgccccgaccccgaaggctgaggataaagcatcatcttcggctctggtatatgccccaagtaactcgtcgcttgtagcctcaatacattttagccagtcgtcatttggtttgtcaaacc

SEQ ID NO: 97147 - DNA, 306 bp, Zea Mays
cagacacaacattgatcgaacttgaggaatctaatactcatgatattccccaagtttcggactctgagaatgaaatactaactgctaattttactatagaagaggttaaaaaggcagtatttaatatggaacataataaagctcctggaccagatggttttccagctgagttttatcaagtgttttgggaaattattaagtttgatctgtttgcgttgtttgtggactttcataaaaattccctaccggttcacagcttaaattttggaataatcactttaattccaaagaaagacaatgcaaata

SEQ ID NO: 97148 - DNA, 890 bp, Zea Mays
tgcatgatcctattatgaacagaatgaacaatatgcaacaaagctttcaggacaatatgggtgccttgtcttgtcagtttgaaaatctctctacgagtgacagtgtccatgctctgggtgacagacaacagcaacttcaaaatgattttagtcagttcacttccatatttgacagctttagctctcatttttactccatgtatcctcgtcctccaccgggtgcacagtgatgttccctttgtggaaattgatgccaaagggggagagagaagtgatgactcaaggaagagcctgctgatcctgccgcatatttatgctacttatgctacatttatgtttaaagctactcagtaattatgtcgctactcagttattatgtcgctttaaaccttgtttacattgttgtgtttaaatttctatccggatgaattttttatggttaatcgaggtagtttttatttgtcgcttccattcttcatactactatgtacctcgacaaccaagattataggaaggtcttcgccaaaaactctgacatgcaatgtgtgtaaatttgtgatcgggatattctctatgcacacatttagggggagttattcctattctctgagtttcctgtgatggcttatcgatatttcggatgaacttcaaaatccagctaagtcactcaaaactcatctcaaacctttcttatacccagaaggtaagaaaggttgggaaacaaaaatttctttacacaaaaatatgcagtgttgtcatcaattaccaaaaagggggagattgtgaattctctaggcccctaagtggtgttttggtaattaatgacaaccgattacggactaacagttcctcaagtgataagattgcaggactgaatcacaaagtacaac

SEQ ID NO: 97149 - DNA, 404 bp, Zea Mays
cttttataaataggggtgttgccaggaataagctctatggcaaactcaactttccgcttaggtggcatacttggtagatctttagggaacacatccggaaattctgacacaaccttgatagcctcgagtggatcgatctctttgttatctatagccatctggtgacaacctcctttcgttggctcaggagagactagctcagtcaccacttcctctccaagtggggataccaacttcactgtcctcttatcacagctgataacagcttggtacttatctagccaatttatccctaggataacatctattccctgagtacccatcactatgaggttagcgggaaactctatcccccttatttccacacttacattcaagcatacactatcggctcgaacttttcc

SEQ ID NO: 97150 - DNA, 456 bp, Zea Mays
gtggaagaatcaaatccaatttaagcaagtagaaacacatcataaattattggattgatttttcttttcatgttagattacacatttccaaagagaaacttattctctacaagtgagactacttgggttactttaaataaaattattagtctcactattctagttatagagagagttttccttttataagtgtcctaaggatttgaattccttacataacaccttattcttttaagaacttgaaatatctctctatatctagaatcatggcaataatagaataacttagcgaaaaacatgccatgagatacttgcaacaaattaaagcatgtagattgctatggtatagaaatgatgaatatgtgatctaccatatgagaggaaattcttcaaagaatggtaatacaaatttaaagacatttgaagtgctacatatttctatgtgactacacaaga

SEQ ID NO: 97151 - DNA, 674 bp, Zea Mays
gcgtgagcatgtcacaccgtcttaagtcattgccgacttaagccaattgctccgttcgtagggtatagtggtcaccttgggttaagtaagcgtgagcatgtcacaccgccttaagtcgtcgccaacttaagtcgattgctccgttagtagggtatagtggtcaccctgagtcgagtaagcatgcagattgacaataaacatttcttgcctttgagaatgaagtctttttattgatggtgtattttccattacagaatataatgtcgtcccaatagattttgaaatctagctaggggtaaaacttccagagatgctctatattccatgagttccctatttccatgccatccatttgagtaagacgatatgatccaggccgagtgacttctgctactacgaatggtccttaccatagtggcgacaatttgtgtcgtccctcccccgctagaattcggtggaggacaagatctcccactgcgaaggatcgatgtcgtatggccttatcatgatagcgcctcagagtttgctgatacctggctgactgaatcactgtattcaatcgttcttcttctagtatatcaacatccttgtaacgcctcaaaatcttattttgagaattatggaaattttccctaggtgttgagttaaaatatatttttcataggaattatctt

SEQ ID NO: 97152 - DNA, 402 bp, Zea Mays
tcatcaagctcatcctaaggtcacttgttttttgtaatcctacacaagtgcaactaatctatgagaatcctaggtatgagaaaatgtctcccaaggaagtgattgggaagtttgtgagctttgaacttatggtcaaagactccaaatacattgtgaacttggagtaaggagccacctccaccccgagtctcaacctgttgcattcaaggcaaagaaaaggaggaaaccacaccaagtaaagggcctcaaatcgacacctctaaactcgacaatgaggagatgaccctcatcatcaaaagctttaggcaaatccttctgggaaatgatcaaaaatcctattccaagagggtttacaatgggtgtggtaagtccggtcattatattgcaaaatgtccatatgca

SEQ ID NO: 97153 - DNA, 395 bp, Zea Mays
ggggaacaagccgatggggtgggttgacatctccagagggtggaatccacagaaagtcgtcagcacgtgcatggtcgtggattctatagtgtcgtcggcccggaaaccgaaagactctgagtccagcgaacgccatcccggctataggggatgaggctccaaagtcatcctcacccaacagcgaggtacccggtgctcctcgaacaactgcacctcgtactggggaggcgtggtgtaacctgctccttgaagtacctccgagaagatgaggggaaaaccctctcgtgtgagactgtccgtgtgggaaagtgcattccctccattagtgggtacatgggaagtcatctatgcaagggtaagtgtaagcgaaaaagaaagaaaaccaaaaatagaag

SEQ ID NO: 97154 - DNA, 495 bp, Zea Mays
ggacatagccttctaggtgagggaaatgatatcgtgccaacaagctgatagtcgtttagaggggagatgaatatgtgacacctgaaatttcaaccctgaaaacaaactaaattccaaaatagtggttagagcgagagagaattgaatcggagtagggagagttctagcaaagtgtgctcaaatgattgtggaatagacatgggagtaacacttaatgattgaattaaaatccaagcaagagatcttagaggggagagggaagaacaaatcacaataaaaatgcaaaacatacacaaagaaacacgcgatttgaactactggagtttggttccaaagaacatacatctccgttgaggtgtccctaaggacagggtctcttttaaccctctcaagcaattccaatgatcaagcttgagcctcggatcttctgatgtgagagtcagagtctctgcaaggcgctacacaagttggagcctcttactagcctttgcaacg

SEQ ID NO: 97155 - DNA, 448 bp, Zea Mays
agaaccacgtccatagactagggccatggtgggtgcactagggttctcaatcttggcccgagtctagtggtcaatctctatggacttgagcttgctaaagagattgtccacgctgagagtctcgtagttgggtgactcgatgatcgccgagaccttcacctcccaaaccctccgatttagagcatgtagtaatttcggcgctctctcatgatcactatagggtagctgtgccttgttggcatgcatcttgttcacaatagactagaacctggagaacataggatcaatggtctctccagccaactgtgtgaagttctcgtactctcgcctgtacgtctcaaaaagtctggtcttcacatgatcgttgccctcaaggaatctctcgagggtagaccagatctgatgagctgtagtcagatgtccaactcgctcaaactcaccaagtgag

SEQ ID NO: 97156 - DNA, 289 bp, Zea Mays
tttaaaagcgttcctatcgaacctgaatgggtgatcctctagcaaaaaacatctatggcaatcgaagtaacatatctttccaccaaacttcagtcggaagcataaaatgtcttcaacgcatatcggacatgtcaaaatcccatgacaactccatccaacaaagataccataagccataaaatcgtaaatagaccacaaaaacgtggctctcaggttgaacttcagtttcttgtaacaatcatatgcctcgactccttcccacaaaattttcaattcttcaatcacgggt

SEQ ID NO: 97157 - DNA, 684 bp, Zea Mays
gctaaccatcaggtgcgggctcccggggctatataagttgagttctcccagctattcacgagcaaaattgtcagttgtcgctgtccgacgaagggagcagggaggagcattggaccaagccgcacgtcctcaacgcttaatcgagtagcgagggtgactggagtgcgaggagttgctcaccagactcttttcactgccgtgggatcacgccgccgcggccagaggcctccgtgctatgaagaccggtaagatgctccctattttctttgttgaactcttgtgtttgcgtcataccaagcagagttaattttggacgcctgtgagccgagttgctatggcacacccaatggcaccgccacgtcgtgcgagcgtcgaaggagaggagacgagtcggggaccgtccgattatggtccaacgggtaggattagatccccgtatacccgttcacttcataaaatcctgaccatgggtctgtgttgtgcagcgaggattagactagtgcgtaccccttcgctttattgatcggaaccattgtatcgagatcctgcggctctcttttcgtgcgtgtatcaggcatggttcttttaaataaaggacccctgtgcgtctacctattctgctcgctgtcccgctccattgaaaaacaactacatgtggtcttaactattacagtctgaaccctg

SEQ ID NO: 97158 - DNA, 497 bp, Zea Mays
catgatcggacctttcaagaaagctcaaggaggttatactcatatactggttgccattgacaaattcacaaaatggatagagtacaagccaattgactctttgacctcagccaaagcagtggagtttatccaggatataatattcaggtttgggataccgaatagcatcatcactaacctgggatccaacttcactagctctgaattcttcgatttctgcgagcaaaggagtatccagatcaagtacgcatcagtggcacacccaagagccaatggccaggtggaaagagctaacggaatgatactggaagcactaaaaaagaaggtattcgacaagagtgaaaagcttgcaggaaaatggatcagagaacttccatacatggtctggagcctgcgaactcaactcagtcgagctctgcatggaaataccccgttcttcatggtttatgggtcagaagcagtgctgcctgctgatctaatcttcggggcgctgaggt

SEQ ID NO: 97159 - DNA, 762 bp, Zea Mays
cttgtgtactgctgtagccttgcagtaccgaatctctggatgtcattagttgattgaaattaatcttgtgtcatgccatttgaataaatagtcttcagataaacatgctacaactaagttgcagggattataattcattcacacaatagttgttgcagggcagatttcaacatagtccataatgggaagaacatctatttatgggatcagaggagaaagggccagacaaagagaaattttgatagagctatcattctattccttctaattaatgattcgaaattatatataggatatttgatggcaatatcatccctaattttttcatgtctgagttctatacgatatattattactgctaccttctctacagttgcagatgatccctcaaattgttccaaatgctacatgaaaaaatatgttctatcaaaactttagacatgagtgtcttgcttattgaacttatatagaactcctactgttcccttgaccctcgacagatagttgtttacatgcttttgttccttccacagtgtgatccggcccgaggagattccaaaggtcttggaaatcagtggcgagcgcagcctcatcgacaacttctcctaccacgtgtaataatcatggtacacaagttttcctcgaatttatattctatgttttgatttatttcatgattgtcagtttgtgtaatgcacatactattatcaatgtcagtgttgaatgcgagtcattggggtttcatgcgggtctctatgttat

SEQ ID NO: 97160 - DNA, 577 bp, Zea Mays
gtgagtcagaagcctcggggatagtccgttgagcgataggacttcatccgaaaggaggtcgggaagctgctggacgccggcttcatcgaagaggttcatcacccagtatggctggtcaatctagtcattgttccaaaggcaaacgggaaggttcgaatgtgcatcgactacaccagccttaataaagcttgtcccaaggacccgtatccacttccacgtatagataaaatcgtggattctacctccaggtgcgacctcttgtccttcttagatgcttactctggtttccatcaaatccagatgtctagggaagataggaagcataccgcttttgtaacagtggatgggctttactgcaatgtcgtaatgccttacggtctaaaaaacgccttgccgacatttgtgcgggcgatgagtaagactttcagggacctgattagggacagagtagaggtatacatcgatgacatcatggtcaagactaagagagggtcgaccctagtggaagacttaaccctggtcttcgacaagctgcaggcaacacgcacgaagctgaacccggacaagtgcgtctttg

SEQ ID NO: 97161 - DNA, 440 bp, Zea Mays
gcatctgttaagtcattttcccttctaattcagatattccagcgttcatgcaacattaagtcattcttcatgtttctcaaccatttctttgctcttgcttcaatcattctaggccatattaagtcattttaatgtctaaacaacattaagtcattccaaagtgtagacaaagtcattcaagcatccagtaggtaacattaaatcattctagtaaacattaagttattttaggaaacattaagtaattttttgttttcagtcagatggttaataccaggaggggaggtgctgatctaccagcacaaattcgtcgaagaagggttctaactaatccggaaccaacaatgaatccccttcgaatcctccgccaattgatgaaatgacagttgctcaaatgcgactactacagcaaatggccaacacaatgataagaatgcaag

SEQ ID NO: 97162 - DNA, 450 bp, Zea Mays
gagctaccggcgaggtgggagcagcaatgtctatggcgccgtcgtccctgcgctggcgccgccgtgttgacaaccaggggaggaaagagatggccctgtagccgttagatggggttgacggcagggattagatgtgggttgtccaccgctggatctttggtgaacggctcggacttgatttcgttgggttaaagtgtaggccgtagatttcgaatcgggcggtcatggttggtttgggtttcataaaatttggaccatcagatctcgatctagtggctcatagcgcataccgttttgagtagcagagatctaatccggggcgtagatttcttatcctacggctggggcattccgataacctttcagtcgtgtacttatgcaaaagaaaccctatgaaaactgtgaatcaacccgccgtcctcgactgcggcgctctgtgtcttagggatt

SEQ ID NO: 97163 - DNA, 411 bp, Zea Mays
tgttactcaaggtttttccctcagtacccacattgtgaccattatcacatgagttttagttgaagcaaaagacaccaaacttgagaagaccagtcataactaagtattaatcaccctagaggtcataccctaaccacatcatgcacctcaaagtgggaaaatgctcaaaccctagaactaccgaatttaagccatttgagtaccaaaaggaaatctagtaaaatgctatgtgaaacacaaaatcatgatttggaccaactaacagagttgtagtacactaaataacctacaaaatatagtaagaaagtttacccaaaagagttttgcaaaatcctcaaacaagccactcaagtggggacttcaaataaaaatcaggatttcagatttctgaaatccaaccctctcacaaag

SEQ ID NO: 97164 - DNA, 391 bp, Zea Mays
atctgggctcattcgcaattactttgcacacgccaaggatggcgggttcattctagcaaagccaggggactcttttgtaagatagctgtagcgaaggggtatcgatcacatagagccgttggatcatgcatcaagggccacgattaaataaagttatctgcgaaccggtacgcaacgacaatcgtacgatcagagatccacggtccacgaatgcccacaatccaatccaccccgaaccacacgattaaagtccgacggctcggatttaaaatgacgaaggggtaagctacacacgatcatggccgtccaacacgggatcgacgacgcacaaacgattttctctactctaatcttggccgaccacgcatggatccacggtccacaaacgttc

SEQ ID NO: 97165 - DNA, 385 bp, Zea Mays
acaaatatctgatgtttgacccatacataatattacatttcctaattaacaagaatctagtcttctttaagtattctttcggcagcttcattcagtagcctgttaacaacttcgtcaacgaatgtattagcgacctccatcatatccaaagcttctttcatgacggggtcagcctcaggattgaatggctccggtggtggtgaaaggctggctgcaaaaaagtatatgataataagggttcgaagctagaaacgaataataaagcaaaagggcattagataggggtagctataatcaatgcacgtttagctgcttcatcagtttcctttgccgtaacttgagcatcatgggattccttttcatttttctttattgcttcatcggc

SEQ ID NO: 97166 - DNA, 319 bp, Zea Mays
gggctgtgtatctgataaatttcctagtttattacgtttcctagtttagtttatgatagataagtttggaaagagtcttgataggtggagacttattctccaagtctccggactataaatatgtaataagcatcattgtaaagagggacgaaaaacaaacaacgttcacgtcaaacaacaatctcggcgcatcgccacccctattctagggtttcaaccaagtaagtgccatgctaccctagatgcgtttagtgtctagggtaccactgttcttactattatcatgatgttattcgtactgtagcgttttgatggcgaa

SEQ ID NO: 97167 - DNA, 362 bp, Zea Mays
ctcatcttcacacccgtcctagccaaaccttcctttacactccatggcaccccagcaccatagtacgacaacccagacacgtgagggtgagtacttttcggcctccctagaagaccagaaagagatgaccagccatatgaaccaccaggagcaagcattaatgcaccacagaacccaaaaccgtgggtaggaagatgacataatacccaaacactcacacctatgctagaccaaagggtcgatggactaccaccgactgctattgacatagtaagggaagagatagctgaggcattccgagataagctcagagttagcatgatccccggaggacagtcatatcagaaaccctatgacacgcg

SEQ ID NO: 97168 - DNA, 374 bp, Zea Mays
cggcttgcagggtcagtatcgttcatctgcctaattgttcgttacatcttattcttacatataatgtcgaattgcttgtctccattgattgtgcaaagtaccatacacacagtagaagatgcatgtcttcgttcagtgtttatttccacacacctggaatgaaacaatagaaggtgtttgtttgataaatcattagcaacaaattatgtagttatttctttttcatgtttaaattgggcgtatttgtcactgatgattatatgtttgaggcctttatttcaaaggtttggggctgcctattttttcgggggtgtttgaatctcgaaatggtatagagaagcattctcttttgctttcgactgtccattcaaaca

SEQ ID NO: 97169 - DNA, 393 bp, Zea Mays
gtaacagctagtttcgccccttggggctatttatacccccaatttagcatcttaaggtgtcttgccccttccaatagctagagcacccatttgagtgaagattaccctttgcatagtgaggaaattagagaagagataatcatgtggctaatgactttattagtgtatatagagtaacttgtttgcaaccaccatccgcattgtcctaggcatggtaaaatgcgagtctagtgcttgttactcttggtgaccagcatcacttagacgactaggtggtgattgggagtgtggtgattgcctaaagattttatgggtgacccgactcgagacttatgtatagttgtgagcagttcaccaggccgaataagtgaagtactagatcatagagagcac

SEQ ID NO: 97170 - DNA, 290 bp, Zea Mays
taattaaatggtgaaacatccccacccgacgaatgtataagaagatcaaacccctcacctcaaagcaccacgaaacaagtagttctattgaaacaaaactcctaatcttcctaaaccttattcttgccatcatgaaaagataatcatgtaatctaacattctttgcaccccacaaaagagagaaaatctatagaactaatggagcaataaagccaacaagaagccaataacattctgcgcggcacatttcatcgaagaaatgccaaaagctccataaagagcactgacaa

SEQ ID NO: 97171 - DNA, 319 bp, Zea Mays
tctccctcttcttctcgtcagctttcacgtaaaaccattcatttgtccaaccagtcggccacttggtgtggtaactgtcacaggagctttggtatccttccggtacacaaaattgtaacatccgaagttcttatgtagtccatcagctctagccttcgtctggttgtggagttcgtgcacccagcaaaatccttcagcgttggcactcttcccttggcttcggagagcccatatatacacactaagtctaactatggcatttggggtgagttgatgaaggtagatctcaaagttctttaaaacttcaccaatcatctcg

SEQ ID NO: 97172 - DNA, 733 bp, Zea Mays
tactgcttttgttctcagctggctgtactctctggtcaacagtttcatggtactgctaagcacttctgagttcttgcaagcaaatcctatttttgtcagcccccaaaatgttatcttcttacaactagctgttcatcttattgggcattctttttagtggctcctaaatcccaagagcttcagtttgcccatcgtctaagcagacatttgagctcatttagtcaacctgttagctcgcgttccgatggactctcgttttatgttccttatggagaattgagaaccttattttgtgtgctgaactctaggtagcttcagttgttcttacttatcctgtttccaatttttcttgagaaatatgtggtatgtgcatacggcacagtggtttgctgattctatcattatcaaaccctgacagagagcactgagatagaactaggcaggactcctttctggattaagctaataaagataacatccaagtgccggaaaacaaaacaaattctgtcaaaatttacactcctttagattccatctgtgcaaattattgttccgggtatctcaaggggatatgcctgagaaataaaggttccgctcatgttagttacctctgttaaatgattttgagtacagaaaaaaatcaatctgttgaacactgttactgatgggctctgacttaattttagttcagttcagaataatattatttccgaagtcccaggctctagccctc

SEQ ID NO: 97173 - DNA, 749 bp, Zea Mays
attttagacatcacaactcaaaaacatgggttggagcagattaatcagcttttcctaatcattgcttaacttaaagttgttaatacacaggtcacttaaaatggcacatttttgggatctaacatagaggcaattacacatggcgtaaaactccataagactacatttgctactgaaggacctaaatcacttatgtgcatatcttagcggattgttcttcaattttaacaaggaccgacttatgaatgctactcgcctccaataattatcgggctgcgataacgctcatacaagatttctaattgatcaacaagacatgtatttatcccatgggcatggaatgtgatgattgataaagtgaagcatcacattgccatacaacaaaaatcatgacaacaccgatggatactatccactaaccgtttgaaaaacttaacttactcctcgcttgccactacatcgctcctcaatcacacgaccatcatgcgcatacttcacacgactatataatagcaacctaagcgttgtgttacacaagacatacatcttccttcgttgcgagtataaccatattacggcatatacccacacacctcaatcaattatcttatgccaccactattataatacaccacggcacacacgcatacgtgtccccactgcattctcatgaccaattttagcacaattatttatgacaatgtttattgactacacaagtgaaacactaatcgatcattcacacatct

SEQ ID NO: 97174 - DNA, 467 bp, Zea Mays
catgacttaccgacgtatgggctattttgcgcctggtgtgttcatggtaagttcccatgcccagtttgcaaggaagctctcgggttcatttggttgaaaaagggtggcaaatattcgtccttcgataaacatcgacaatttctccctcctgaccatccattccgcctagacatcaagaactttacgaaaggtgtcatagtgacagaccgcccacctgcaacgatggctggtgccaaaattcgtcaatagatagatgggctcgtggccaatacagaaggtggttttgtgggatatggtgagcaacatatgtggacacataagtcaggcttgactcggctcccctattatgacgacctgctccttccacacaacattgacgtgatgcacactgaaaagaatgttgccgaggcactatgggcaacaattatggacattcctgataagtcaaaggataacgtaaaggcaag

SEQ ID NO: 97175 - DNA, 573 bp, Zea Mays
gtggcaagggatattaaatgctatctaaatggcacataccgcagttgtacacacagagatctagggttaataccggctcggcaaagagctccggattaaaagccaatatgaaagaaactatcttcatacttaactaataccagagccatatagcccccacggtagcactgtcaatcctggatttcacttacagataagtccttaagtagaggaatgctagaacaaaagtctagcccccttgaatccaaattgttaaacatcatcttgggatcatcatttcatgttgccatcattcaatgtaactagtatttcatattcaaatcatattactttaattcaagcactagtaataactacccatatgcaatttaacccaataggtatcaaggcacaagataaacaatatctaagatgtccttaaggtaacaaattagaaacatgcaatatgaatcatgatgattaaaagtgaataggtaacaaggatagtcccatgttttacttgcctttgacttgagatccttcttctgtagatgacaatcttcaaatactcaattcttgatcaccacgtaattc

SEQ ID NO: 97176 - DNA, 842 bp, Zea Mays
gtcgaggtctcgacagcgtgaggagtcacagagaacaacgacgtaggaggcggagagggacgagtcgaagaccgagtcggacactgttacatatgaatctcttctttatttcgatcatgtattatcgacttaagatttgcctatttcaattaatagtaacattgagtcaaattttggtcattcgaaatgacaggctttggcatcactaaacacaacctatacatgtataagtgtccctgtagcacccacgggtatatatataggtctgtttggcacatcttattttcagcttcttcaaagatttaagtatatgtgtacttttgggctgtgctaaaagggccaacacgaggcacaacatttttggcccgatgcgagcacaacacggtacgaagtttggcgggccaggccaagcacaacacgatataagggccggactatgggtcgagcatcgagcccaatggacgacacggtccatgtaactatcgacccccttagacccgttgggcggtccagcccattaaaggcacgacccatttagggcacaacccatttagtccatcgacatatataagtagttctataacggttttgtaataatgtaatgagatgtttgaagttctataatcgttttatggttgttgtcttgttctgtaatgacaggctagagttttgtagactgtagttctcaatgtttacaacaattttatagctattttatctatatttgaaggtctatacttattttgttctaaattttgcatgggtgctttaacaacccaacatacctaatgggttactgggttgccgtgctaaacgggacgacacaacccgtctaaagttta

SEQ ID NO: 97177 - DNA, 526 bp, Zea Mays
attttggtgggcttgggatttctaacttgtattaccaaagttaggcactatagactaaattgatatggttgaaaaaatagatcctaacatgccttggtttgggctgaaatttcctatttaacatcatgtcaggagatttttttgcttcttcagttgttaccttggttggagatgagtctaacactttattttagacaaataggtggttggatgggtcttgtatcgaggattttgcctctactgtagttgctagtgttgataaaagagctatttcatccaaaacagtggcccatgctcttgagaactagcaatgtatcaacaacatagagacctctattaatttgattgggctgcaacaatacctacaactttggcacgctttaagaggagtgttgcttacacaagaggctaatagacatgtgtggattcattcttcctctgggcagctctcttctaaatcctgctataaggcttttttcgtgggttcgattacctttgaaccatggtagaggttatggaagtcttg

SEQ ID NO: 97178 - DNA, 299 bp, Zea Mays
attgacagggtgaccccagttgcatattgcataaaggcgtggtcattccgaagcttaaacttagaggactcataatcatggtcatcagcttttccctctttttctcatcagccttcatatagaaccactcatttttccaaccagtcggccacttcgtgcggtagctgaggactggtgcctttgtatcctttcgacacgctaaattgtaacaaccaaaattttcatgaaggccatctgtcgtggccttcgtctgatagtgcagctcgtgcactcggcagaaagctttggcatctgggctc

SEQ ID NO: 97179 - DNA, 477 bp, Zea Mays
agcgtggtggaaagtctaatactaactatagttaccttggtggtctcccttgcagaactaaatgggttggaattcgtgattgtatatgactagggtggatcaacctagattatatgttgctctatcactctcctttatagttcaaggaggcagtgatcttacatgtacatgcctccagcagaccctacttgtcatcgagccaactgtccctatcttgtctcaaccctgtataacagtcctttgccttataatcagtcatatgacgtagatcgagcatgtgtcaactaatcatacttgttaaactgactttactgagtgccttaatggtgttaagtatgattcatgtactataattacattattgttcctccatactgcctagttatggctatatggatttttcatctcatgggagccaataaatgcgagaacatacttgcacaatgtcccctgagcatgtatcagggtaaaggtgtg

SEQ ID NO: 97180 - DNA, 369 bp, Zea Mays
cgagagcacgagtatgtcgggcgtgacggttgtgcccacccgacaggttgagcctccagcgataactcgggcggatgagcgcaggaatttcccaagatgtaggaggacggttcactacaaaccgggagataggcgaatggattacttttgtcatctgtgcggggatagatatcattggtcgtgtatataaggccaagaggtacccctaccattttcatctcaccttagcccaccattctcaaagtccacaacttgtaatctcatcccaataccaaaaccatcacaggacgtagggtgttacgcctctcgcgcggcccgaacctgaacaagcttgtgtgtttctcctgtcgtgccaccgcacgaaccatc

SEQ ID NO: 97181 - DNA, 633 bp, Zea Mays
attttttcggcacaaaattgatgtttagacacgcattgagaagaacttactttttttttcaccatgttggcccgaggagggatattccattcttctggtgctagcgtcgggatcaaacccagatcgacggcttgggtctagcacaagaaaacattgaaaagaacttactattaagattatatgttgcatcacattatgaagtaccacttgatctagttagacaacttggcactcttcacactttattctattagtgttgttctttgagtcttccatggggtgagcatggtacccctcacaaaggacttctctagagccactcactccttcccacgggattccacgaagccacaacctttaagacgcctaggaggtggcaacctctgagagcaacaagcaccaccgacttgcacctcaaccaccaaatgtcacttgatgcaaacgctcaatgcaatacactaggaatcattctcatacacaattggatgtgaccactaaaaatcgtatgtgagcataggcccaaagctaagcactacacttgtccaacacatccctaagatgttctctacatccaaacgactagtcatccctctacttatagaggagagggaccaactaggcgttataaatatt

SEQ ID NO: 97182 - DNA, 564 bp, Zea Mays
agatgactcaagccagaactcaactgaggagcccgactttgacgcagctaaggcagtagaaagggcctgcttcatggcaacaccgccacagaaagagaagggtgggggatgaggaacccccaaccaagaggaggagtaccaacaccagtgctaggcgtggatcctcgcccgcgaagctagcctttgacagtagtaggagaagcttgatgccctcgttcgaaaacttgatagagtttatggcgacatcgagcattagcgcattgaggctaaaaggcctcgggcgtggaaagtctatgatcagttcgccgaggggagcaacgatgcccagcacttcctcaaccctagtcaaaacatggacgcaacgactatgatgtttcggtccaaccgtgaaccagacgagtcggaggcaagggcgatgtaccagaacctctacaacctggtggagaagaccgtcgtgcaacaagccaagatcgacagatgggcgcccaccggcacggacagctttggcaccctctctgcatcatcatggagcaggggggcactgccctcccaatctacaaagtc

SEQ ID NO: 97183 - DNA, 719 bp, Zea Mays
tagcttcagggctcaccatagacagaccaccatagacagaccacaacgcagtgcgagtatcagtcatgtagtcacgtgtgtgcatgcatggtatatcatgaaatgtaataaattacaaggggctatattggctgccaatcaccgtaagccaacttgctcaggcccttatgtctataggcatgagtaatcacttctatcagcattggtagtcatcttaggaagggataagtgttgtatcacattaaatgtgatacatgacattaagggcatgtctccgccctaacaacatgctcatggagtaggagtaactaacatatctgtgaaagcatacccatacatttatgaccgtatgtagtcagatgatcttgccttctttaggggttgaaaaccccatatagccatgactacacattatgggtgtattgtcttgtaataaagggcatgagaaactgtattgagcgccatcaatacatttccacactctgggttagccctcggttggtcatctcaagggttatgattacactggcacatgcttcatgactatgaggctaagatgggttggagacagttggccccatgacaagtaggacctacaggaagcatatacatgtaagattgccactcctttagactataaaaagtttggtagagcaatattcaattcatgtttactcataacatggaaccataccaagctccaccaaactcaagataag

SEQ ID NO: 97184 - DNA, 591 bp, Zea Mays
tttgaaaattttgcttaaataagtaaactaatcaataataataataaataaagtgaatttgcatctcatgtaggagttatgcttgctacatttaactagtgttcaaaacaagattcgaattttgagtttaaaatttaaaaaaacaaaaaatgaaaatagaaaaaagaaacaaccacgtgcattgggccaacttccagcccaactaaccacaagcccaacccaactctccaccgccatcgcagccacgggagcatgttgatttgtgggaccgattcgccagtgctcgcacacgctggatgtcgtcgtccgagtcactgtcaagtgggacctacgttccaggatcatctcccacgataagatcttctcgaaaccgaagcgtgagcatggattctgtaacaaactctactgccgacgggagaagttgttacaagctcggatcaactagaatccagggtataatactaggtccacaaaatcgtctctccatgtgcacccatgagccacgttgtccgtagtcaccgccctcagaaaggaggcgacagagagaaagagggtcgtgctcgctgtcatgggtgtgtcgctgaatacgcc

SEQ ID NO: 97185 - DNA, 382 bp, Zea Mays
aagataggcgccagtggtggtggtggtagctgagtccaagcagcttgagaatgactcgccgaagcaaccaacgtcgtgggttgctgattatccacatattcagggatgtatggcgaatagcatgaagtagtgtgcaagacctgctccggctgattctaccatgcttcggcttcagtaatctcctgcttttggatcatgacttggcacgtccttgttgtgtgtcccttatcctccccacagaataagcataacaatttcctaggttgagtagcaaaccttcctccgaagcttctcccccctctgcctcttggggctggtggcctataggaagtttgttgcattcctaaagattgtgagctttgctggctgctctagttgtgat

SEQ ID NO: 97186 - DNA, 638 bp, Zea Mays
ttccttctcctccatcaaatcgatgggccccacttgctagaagcttttccctagtgtgctcgctaaccgatgggccccagggaccgaggattttatccccgacagtagcccctgagccccgaggggagagtatctcccctcgagggctgatgaagggtcaggtgaggtttgttctttctcctttcgagtgactatggtacttatgtcctcgggactcagactgctttcgacacagcctgctgtctccttagggcagagttgggtgcctttgccccctttataagctctaggcgggcgtccgcttgtcgtctccctaaagcgcttcgtccttaggccctcactctagatgggctccgctggaggtttagttgacgtttctagggtcgagaggaagccattccgtgttgatctagctccagggtaaggcctcaccttttctgtgtgactccctctcctcaattccatcgattctggtgcccctatgatgtagtgtggtccccgctcctctcactagggaggcatcgtcctctgttggctcgttgtggccagacctgttgtccccctccctctcccttaggaaccttggaagagttacgaagtcttccatgcggcgcaggaggctgtcgaggccgaggccg

SEQ ID NO: 97187 - DNA, 379 bp, Zea Mays
gtaacatcctttgtgtgggatcagtgggggtgttacagttggtatcaaaggataggctgtaggtcctagcaagtggaatagcaataaattgacacactgcacattaggatgggttttctgctttactattgatatgttatgttattgtctgtgctagtttgacattatctgaagtgatgctatgccaatcttatttacttattattctcacccttgtggcagcagctatgccgcctcgtagggctcagggtagtccgcaagttcctagtggggactcgatgagtccggcggcaatgttagccgcgatgcaggccatgcagcaggagttggccattctgaggcaagctattcctgttgcccctgcgggtgctgctcaggg

SEQ ID NO: 97188 - DNA, 509 bp, Zea Mays
taaaaaccatggaagcacatatctgtttgggacttatggagaatggcttcgactgaatgcctgaatcgggccgggaagcacggagcagacagaattgcagatagaagtgcagtatatcctctgtgtcccttttttcctccccaaacaaaaaggtgtttctgatcactgtcaccccaggacctatccaaatcgctttccaatgcagttagacagagaaggcatggctgtgatgttataatgctgaaggaccccaagaagagattatggcctgtcgtttaccacgacagcccgttaattgtgggcttcaccgagggctggaaacatttggtggcagcaaacgaccttcgggctgtggacgtttgcgagcttgttaaggggccagacgatggtgagccggtgtactctgtccagatgtgtggtcacaaaatttaaagccgccccgacttcatctgtgcacttctcttctcttaggtgggctgctaagaggacaagcctaatttgtcaatatc

SEQ ID NO: 97189 - DNA, 543 bp, Zea Mays
ttgcaattgtcttgacatggggaatctcaaggagcccattcttaccttttcaatgcaccattgccaaggataatgttccatctccaatctgtctaactcctttacctaatcaaccatgtcatctcaaggaggaccatccccatcttcccattgttgaagaactagaggctcctaagctccgttgtatgagctcctcttcagaacatattttctccagttaggggtatacacattttggccttcatttaaaaaactagaggcctgtaagcttcgttgtatgtaattatttttatcttatctttatcttatagttacaacatgttataggtgacttaaggttgaggcttggtatgaagatttcacttaagatttcatagttattgacaagcataccaatatatcataggaacgcacatgcaaacctagtgtctatgtggatgattgatctatcctaacaaaacacactcaaaggaatttgtgaaacaatacaagcatatataacaagctcactcaagcaagtataacatacaaaatgcaatcata

SEQ ID NO: 97190 - DNA, 895 bp, Zea Mays
catttataggatgggaatcacaccttaaaatttagagtaggaaggggtagaggaggtctcgaaacatccaaaactgcaggcacacacaacttctaagattcgaacctcaacccatcaaaatcaaaagagagcgttagatgagttttgataactagttgggataagaaaattacttgttgaaaaaagcacgaatgatatgtgttaagggtacgactggaaattagcctccgccttggtatgtgaaattacttcttgttaaaagactctaggaattgaaggcatgtccgcgcttcatggaggctttgcccatcaacagatcgacgcgtggatggctgcgcggacgtgaatattttctagactacatctgatttctcctcagtcctcacccccgtgcttcacgcctaataccacatctccaaagcctgttggctgtgtccattcgtgccaggccagggacaggcacatactgtgtgaggcactgaggcatggacacgtcttgagtgatggctaaggccatgatgtggggtccgcctatgctcccaccacactcacgtctcatctccactccatcctctgtactcctcttcctcttcccttatctctactctctccttactccagccgcccacgcgtctcctccactcccgtagtggtgaggtttctctccctccattcctttcgcctgctctcctcgcctcatgtcggctcgccctcgctggtgccattcatcggcgccatccatcctacctccgcgtgggtcaccattgtctgtcggctcacctgctcaacctcatcagtgcagtcacaccactgtcctcgcttcttgccttcgtgcgcgtcccctcgctcgcttggacgatcccgagtcgactccactccactccgctattcgctc

SEQ ID NO: 97191 - DNA, 927 bp, Zea Mays
ataggactggccgtagaccgcagccctgacctaaaaagctttccttaaaataaaaacctcttaatttcttaaggaaccttctcttctttccccaatattaacaacccttcttctctttctactagatggagggcaccttcgtccttaagacatcctattgctcagaggtggaaggatttcctcaccttctttggagttgtgcgcttcacatggggatccgcaagaagccagagtatgtctggaaggaataccacgagaatgggattgagaagtgctctatggcagtctacctaggagaaagccgaggctacccaaatcaccctcccttttagatcaccgctactgtccaccgcttcctagacacctgccagaatgttacccagaaagccctcctccaactatgccaaaactacaagaaggaagtctccgagacaccccttcgctactttccacccaacaacaaaaataaccctgcgtggaggaaaagactccaggccttgtcagggagagagcataatgaatatgaccctaccataatctacatggtcagatatctccacacccttgacaaccattttgatgaccttttctcccactgcacccacctaaactctcgagtggaaagcctagagcggcaaatcaaggaattgaaggaataaaaggcaactcttcaagaaagtctcgagatggcagaaggcgaggaagccaacacttgtgaggcataccggaccctgaagatggactacgctagaaggataaagaggctcgctcccgtcaagaggattcagaagcatttcaaaagccaaggatgccatactgacccgaaggaagaagccctgccagcactgccttccctagggatagagaacctttctaacatcgaggatgtatccctggctagccttgatgatcttctcaaggagtttg

SEQ ID NO: 97192 - DNA, 437 bp, Zea Mays
gcattgcaaacaggacatcttcgagttttgggtatccaatgttgttcatcaaaacccggcacacataaatttctcttctgtcttggaggcaatacaagtaatcatcctcaccatttccaccatagacgactgcccccaatggatatctgagtgcctcagcacatgattgcacttcgacaatctgttctgtagtcagctttcctctggtagcatgttggatgatgtactccgaaggcccggttgttttcttgtttactagcgctagcacttccttttcggagggggccttttctttggtaacaggctcttcggccttctcatctcccttgacctttgccttttcctaaacaataattttttttggaatgttggcaagggtctcgacagccttcagtgcatctacaactagtgcactctcagtcttttgtgcgcttttc

SEQ ID NO: 97193 - DNA, 555 bp, Zea Mays
gccaaataaaaaatcatatagcattacatcgattaaaaataatcttcatacgtatcggggttagccggatcataactctcatcatcactatcaaccatttcaatctcaacaccatcggaagacacaacctcgtcattaatgtcattgccttcaaggattactaagtcattatcattttgcacctcatcctcctcctcatcaacaaccatttcaatatctacgtccattccgatagcttcggttaagtctatctcaaatcgcccttctagcccatcttcttggaagaactctccatcatatgtgtccggatctaagttgtaatcttcatcgttaggaataggtaacctcccgtgcggtgataccttatgcacaacatcccaacccttaagatgttatttcgtttggaacgcatatgggagataatacacttgtgtggcctgttgggccacgatatagacatcgtctcctggtaaggtggaatcttgtcgaatttcgactatcccaagattagaatgtgtccgtctcatcacttgagggtcaaactaatgacatttg

SEQ ID NO: 97194 - DNA, 653 bp, Zea Mays
gccacttgtggatagctaggagatgccgaaggagactactgctgaatccagcgaaggtggattagttcgattgaaatataccttcagatacagagagaagttcgacgaaccaaatgatgactggttgaaatgcattgaagctactagcgacgagttgcttgggacatataccagggtcgaagatgatgccttgtcctcagccttcgggggtcagggcaagaaaagattgaacagggtttttgatgcaattggcttcatatatcctgattactgctaccccttgagaaggcaaggaaaaaacaggaaaactgccgcttcggccaccactgttgtgccgaagggcaagaaaataaaggttttgacccaccggcctcgatatattgaaatagtcgtagtgcttgaatttggtgaagggacctcctccactgccgaagcaaaacaagctgctcccgccgctcggagcactgaaggatcgattgtagtgccgaaggtgcctatagccgagccagccgaagccaaatatgatgcggccagagagccagaattggaaaaaacagtgatgatgccaaaaattctgagcccactgatagagacagaattgccgaaggtgacaaaggctcctgccacaactcccaagaggaggagaatggcta

SEQ ID NO: 97195 - DNA, 381 bp, Zea Mays
ctcaatcacgggtgaatgatctttgggaaaagaatgaatgagttcatcgaaactcggcaccccgagtaagtcatctggtacacttacatatccatctgaggacataagggcaaggattggtgtacgtaggcctgataacttggttgggttgtgacatgtaaggggaataatatgaagatgtgtgaaaaaattccttcgcccgacttagttgtgcatcagcgatctctttctgcttttgtatggttatctgccaactcttcatagtgtggcctttgttttctccaaaagacacaatacaattttcttgacttagtattattgttgaatcttctgccaaagcttcgacccccctcttcctcctcttggggctggtggacaaaa

SEQ ID NO: 97196 - DNA, 297 bp, Zea Mays
ctttgatagtggtcgttcttttgccgttttgtgtcgaactcagagctggattctccggtaatcatgtgaataacccctcgaaagggttgtagcgaagtcctcttgttgttgtactggtggtggcagtaatggctggtttggatgctgtggtggtggtggaggcggtaaagctaggatctcttggttgttgtggcatatattgtgattttgctggtgaggatggaaatgttcattgtggaattggtgctggttgtactgatggggatggtaggtgtgggcgacaactctttggttgtt

SEQ ID NO: 97197 - DNA, 565 bp, Zea Mays
atgtcgggttcttgatgcaattcccttctcaagagaaacttgatgagatgattaatttccctgaacttaaaatgaaaatgtccagggcaaaaatttatgtctcttattggagctcacaggctaaacctaaatccaagcttcattatgtgtagattgtggctgaaaatgtcgctgaggaacttcaaaactatcaagctatttgtgagctgggatcaacaattgggactgttgaagaggtggatatcttatctttagattctaaagatattgtgagattcaaggtacacgtcaaaagtgttgctatgattcctccaattatagaggtaggtgttaaaccttttctctatgacatatttttcaagattgatgatatcactgatgagggatggaatgatgagtctataaatcttggcaaaagagcatcggtggacaggcaaggtcttgatgacctttcttatgaaaaaactggcaaaaaagctagaaatgtaggggacaagtctgttaaagaagagttgagacttgaaaacattggggatatgatgtctcaaggcaaatcttctggtcg

SEQ ID NO: 97198 - DNA, 803 bp, Zea Mays
tctccatgtgtttcgtgcgtcgatgctaaacggggttggagagttagacgacgttgatgttgccgcaatagccggtgctacgagatgacacgctgtggagttcgtgaagaaggcgatgcaatcaggaagcttcactaatgtcattagcgacaatgtgatactccgcctcaacgctcgagtgggggacgacgttctgacgcttggaggaccaagacgaggttgtagcctagaaacagaacatagcctaaggtggattggtgtgtcttcggacaacctactcgctcaccattagtgtaggcgacgagctcagaggcggaggggtagcgaagaagtctgtcatcttgagtgccctaaagatagcgtagaacatgtttcatctccattagatggggctcttgcaaatcatgcatgtgaagacaaaactgctgaacaacgtaagcaaagttgggcctagtgaacgtcatgtactaaagggtgcccgcgagactccaaaattgtgtggcatccaccataggagggttgaagttggcggtgaacttggcctaaagatccacatgtgtggtgtagtgcttgcaatctgtgattccccgcgctcaagaatgtcacacgtgtagagacactgatgcaggaagagctcatcggatcattgttccaagaaagcggtgaagagatctcatgtcctcattgcaaattccaactacagagctgagatggtgcactgcaaaagctcaatgctagaagctatgagaacaatatcatcaacctatagcaacaagtatatcctctcggtgcctcggtggaag

SEQ ID NO: 97199 - DNA, 306 bp, Zea Mays
cggggactgaatgatcggctacaaaggaaaatggccacgtgcatagacctcacatatggaaaggctgtcagcacagccttatctgttgaagccaaatacacaaattctggaaagaataagggattcggtggtgagaggcctaatcagggccaggcaaagaagcaacggtttgtcatccggccttctagccaaaaccgtattttttctcgtccaccttcatttccctttaaacagcctatcattatccgccccaataatgcccccactaccccaaaacagccgggtgccccaggcactcgattccct

SEQ ID NO: 97200 - DNA, 399 bp, Zea Mays
cttgaattcttctgaacgtgaacatgttccacatttaatatggaggacgctgtcatgactaaaatgttaggtatgtagatgattcagtagtaatttaatctaggaaaaaacatatttatgacaacataccagcggcagatattttgtgtattggcgtagccgtcccgtttagtgcagtacagcgtgtcgaccaccaccgtttcatcgaggagaagacgaaacgtcgatcaccattagcatagggaaggagaagacgaagcgagcagtcatgctgtttgtcgacgatcctcggaaaaaaaccgagtgctcgaagtcttccgaatgtgagcatcccgctcggtggagtgtagtgaggtagctgcgcagatcaccactgtttctctaggaaggagaggatga

SEQ ID NO: 97201 - DNA, 514 bp, Zea Mays
gtagagcaggaggtggtgtaaccattaagttaccatcaactactccctcagtgtctggaccaagacgaacgccatctcctaccatcgccggcgattgtccagaaccggccatctccaccgccaactagttctgtagtctggggtatttttttcgaatgaaaggaaatcacggatgctatacttaacaagtaaccgcatccacgtttccagggtatttccataatttctgaaaccgtaccgatattgtagcaatgtacatgtaatacaaatatccctaacaaactacttacgcacaatgactcaatgttttacaccaaacagtatacactatatatgcaacatttatagcgtatctgttttgtgccatatctttcaacatcttattcaatattatctttaactgccaccattataccccatgcaagatccataaattccgcgcccacgtttcagagtaagcacatttgcatgtggaatctaatccctataattccgcccactaccatatgtttac

SEQ ID NO: 97202 - DNA, 642 bp, Zea Mays
aacaagttgatatctcttttggctactgatattacaagttatatcataaaagttgttaaagataccaagtatttttctattattcttgattgcacccctgatgtcagtcagcaagaataaatgactttattgtttcgttgtgtcagataccaagattttgaaattcactttgccagatcacacattatgtgctatggagatttttgagcataccagagatgtgggttgttatcataatgcatgtattgcttatcgaatcttattcactgtgcatgttactgttgcatctgttgaaataagtttttctaaattgaaactattgaagaattatttgagataaaaaatgagtcaagagaggctaaatggtcaagcgacattatgcattgagaagaagttattgggcgatatcaatattgatagcatactcgatgcctttgtatcaaagaatgttcgaagaaactttataagatgatccaatatgtcaagtaagtttttatcattctagttaatagtattttcaaaccattcaacatttgtatttattattgttatatatgcaaatatagatattatatatatgggttaaaaggacctccatataaattttcgcccagggcccctgaaatctcaggaacggccctg

SEQ ID NO: 97203 - DNA, 396 bp, Zea Mays
attccagttaaggtggcagatgggactattatccagtgttcttcgctgttgtctcaagccacttggagtgtccagcaatgctctttcactcaggatttgaaggtgctacccttgtcgtcttacgacgtgattctaggcatggattggttggagcagtttagtccaatggaagtggattggaagtttaagtggttggtgataccttatcaaggaacatcagttttgttgcaaggcacatctcagaacgtccctggtgacttattcatccatgttgctgtgttgcaagaatctgtacaggcttcccttcatcctgctgttgctgaactgctggatcagttttcagtgattttctcggtacctacttcattacctcctgttcgaaattgtgaccattct

SEQ ID NO: 97204 - DNA, 627 bp, Zea Mays
gcacattcaatttgggaggagggggcagaggcaatgcgaattttggattgcggtcaactcactgggtggaggtgtgcataccccgccgtggttcatagcgctatttatagccacagcggtccggctagcgttctccgaccatggataacttcgttagcgcatgcttaccacgtagggaagagacacagtgagggagatcgaggcatgggtgacaccgcggcgaaagttatttgagtcacggtggccgccggtgattaactccggccacgctcggctcagcacgcggaatggtgccacgtcccgagttactcccttgcgatcaaatccccaccgattcatccgagctcatgcaatccaacagtgctgcagatcttttcttggtgttcttcagatttttcagtgtattggatcttcagaacttgtctgaactgaccatcttccaccccccgatctctggatttttgttaagaatagagcaacttcccttaataaaatttgtttactaaacatcagtctacaaacttactataggattcttgggtcaaaactgaacgaattcaaagatatgtcatgctcaaattggtcccatatcactgtgaccatttttgtcttcaggttcagtttcag

SEQ ID NO: 97205 - DNA, 318 bp, Zea Mays
cacaccgctgtcacatcaaattactagttcaggagaacgcgataaacgcctttcgcggagcaggcaccctttgggcacacccattgggtatatcgcccgaaaacttcaagattttctgaagtgatgatacctgcaaaatatacgcataccgtgacaaaaagagaagatcgactaaaacaggaggaagtccaaatgtggttactgaagcgcaagtccaatcaatagaagcattaaagtacatggctgagtggtgtccagccgagggtcctctgtttcaactagccagatgtccaacttgttaccgatgaaattgattcc

SEQ ID NO: 97206 - DNA, 442 bp, Zea Mays
tgcatgtcaaggctgtcgtccataagccagcagagtatgttgaagaacatggaaggagacgaggaggaggaggaagcctgctgctgcaggacggcgcagtggatcaccaccgattcagactgtgagttgtgtcgtctgcattgtttattttgtctgtatatatagctgaacatgtaaactaatgattctcggttggctcgcagttgtggtgttggaactgtaaactaatggtcatcaagacatcaattacactagtgtatctatggtaaggtctgtgtctgtatcagatcagataccccgacggacttcgctgcattacacttacagttgccccggcattgcttcctatgtactcgtatatgtattatatgtgtcttgaatacaatcctaaggataggaaaggtattcatataaattctagtacatcaaatgtgacaccagg

SEQ ID NO: 97207 - DNA, 2312 bp, Zea Mays
attggtgttttatctttcacagaagctgcaaatgaggtaggacttgaattatctggcttagaggttcttgaatatggagttgccaagaaagatttcggtgtcccgaaccacttgatgagcccattagccatgactacaatcatatctgcagcaaaaatggcctgggaaacagaaaagaaaactaaaggaaaattacattgttctttcagcatcactcttattccatgcatacatcctagtagtatgagatataaccttaaatatgattcatacatttaataccaatgtggtgcagttttttttggacaagattcagtgaatactacctgaagattgtgtgtgcttagtaatcttgttttctgcattagttggtgccccataatagccttttccaggatgcacgaagcaacttgggagtcaaccgcgctaaggatgtcatcaaacaagtatacatcagaattgtggtacaaagccctgcaagtgtatgatcataatgttagctagcgagcttaagaaggatgaaagtccacaaagttgtcaaaaacatgaccttgccaatgctagacgagctctttgtccaccagataagttggtacctttctctccaatatgtgacatatctcctctggtcattgccgatatgtcaacatgaagcgcacatgcctctattacttcttcgtatctgcattaattttgtaatgcagaatgctaattaaaaggggaagcaataaattctatggtgtatgagcatctacaatagttcatgaatcatgatagctgctttaatgccatgcaatgacataatgaaacaaacttgtgataatgtatgtcagagacagataaactacctccttggatcaaattctttaccaagcaaaatattatctcgtaaagagccagataagatccatggtacctaaagaacaccagttacatttttaatctccagacatttcaatgcaaatcttaagcaatttcaggtcataaagtgttacctgtggtacataggcaattgaaccacaggagctaatagaaccactgatgacacgagtctctccaatgactgtgttcaataaagatgatttaccagaaccaacctgatatgggacataaaatttcctcagttcagaggaaaaattgcaatagcatcagattagattattataaaaaagatctgaatatatggttgtatttctttgcagatactggcaaattgagatataatataatgtgccaaacagtatgaacatgctattcagtttccccaaccaaacaaaccattaacgaaattgtgtacccccaccacataactttccaagaacaccttagtacaaaaacgaaaatgtgacaatcagaatagttacctcgcctacaattgcaataaagaaccctttttgtagctgcaaagatatatctctgagaactatgttcagctcagcaacagagctgctagaccaagaacaggatacattctgaaagacgatggccattggattatgagttactttggtatatctcttaaagtggtggtttaaaaggtcagcagaggcatttaactcggatgagtgatgctctggagtagataaataattactcagccgtctgctagagataacagcctgcagcaaacaaagcatgcaatgttagtgcagctgcgaatgtatgtaacagtataatggcataaaccaattatccacttacatcaatcatcccattaataacccatggaaatgagtttagcggtgatattagtgtgttaaagagtgcaacacaagtaaatacctgtaataaggattccagatattagcagaaagtttcttggtccaaaggcatatcctaagcatatcattcatgatattgttttaccgtggcagcatccaatgcgtgtcccgttattgcaaaaatagaaaaggtggaaagggagaacaatgtcggtgtggttgcccagaaatagacgcaccaagcatccagatattttcttgtctattgggaaataggaggcccttgttagttccagtacaatatgttcaacttattataaaatgtagattaatcaaaagcaattgcacaccgcgagatgcttcacttctgattctcttctttccaccaaacgttcagtgaatagtttctcccaactgtacatcttcactgttctaatatgtgctaagagctcccctgcacagcttatcctattcatggacaaattttggagtattagattctatattattgtgttgactaccaaacatttgcatgattcctcctgcctcatgacccaaaacaaatcaacaatatatgccagtgaagttgag

SEQ ID NO: 97208 - DNA, 512 bp, Zea Mays
ggcttgtgtggtctccttgacagcgtctagcacgctggccatcctcctcctcttgggagttgtggcaagagcctttgtcatcttcggcaattttgcctctgccggtgggctcaaaatctttggcatcatcattgtttttttccacttctagctctctagccgtatcatccttggcttcggctggcccgactataggcaccttcggcactacaatcgattcttcaacgctttgcacggagggagcagctggttttgcttcggcagttgaagatgtcccttcaccaaattcaggcactacgaccggttcaatatatcgtggccggtgggtcaggaccttcattttcttgcccttcggtacagcagtggtggccaaagcggcaatttttctcttcttccattgccttcgcaatgggtagtgataatcagggtacacgaagccaattgcatcaaacactctgttcaatcttttcttgccccgacccccaaaggctgcggacaaggcatcatcttcg

SEQ ID NO: 97209 - DNA, 1190 bp, Zea Mays
cggcttctagaggttcttctgctttaatgaagagcgggggttgagtcttagagaattccaaatatgttgtttcacgtggtccttgaggaggagcccttcctccgtgctgttggagctgattgcccgccatttcgcgcaagaaacgcgtattatcagcggtggcattgaccagggcagtgatagcctcggccaaagtcggtggtactggtggcgggttgggagtatcctccctaccgcgggaagtccctgcaccatcatgtgcgcgagtccgtgatggcatctgaggcaaagaaacatttggaaaaaatatgacatgccagcatacaccatcatattacattaccaaaatgtaataattatacagactccagtgtacaactcgacttcattacttattttacataagtataatatctaaactatactattctagtcttcttcatcctttgttgcttcatttcctgctgcaggagactgttcgtcagcaaggttcatggaaggagggggcctaaaaaggtccaagtccccatcaggtccttcatttgctgttcccaatggtccagctcccattgcagcaacatcggaaggcacgtccgggtgcagtcgagcatacaatacatgtacttcttcatgtaaagtattacagtacaattgtaggctttcgagggacgcactaagctctaccacatgagctagagcttttgcttcgtggtcccaagcgattgaacgcgagttgacggcccaatcaatgaacgaatcccgttttgaaatctcgtactgtaagcggctgactttggctgacaattccgctatactatgactgtgctgctctcgtgccctattcctgtgacgtagctctgaccaaagttgttccacgctggcttccaggtttccaattgggtcattactgccactactacttccttcgtgcctagaagctaactgatgtcgtggcacgccaaaaggtccagtagatttgcgtgttgttttcctagtacgcgccatatctccataagaggggaagatttattagtatattcttaaacatgatgcatgcataacctgataataatggaatcgactttcgttgatccccaacttcctatatattgcactctgttacccaactatacaagataagggactaccagaaagtggtaaggtaagaatgaaagaatatgtctgggtaa

SEQ ID NO: 97210 - DNA, 403 bp, Zea Mays
tgctggtgctgtggaccagccgaccaccacttgccacttggggagggtatgtatggtatgattggctgggctgcgattgccgctgaaatagcagtaaagcaccgtcacaacacaactcgcacaagacgcgcgcggttcatggagtcagacattcgtatcagctgacatcttggctactcagatctgtcatccgaacaatcaacggctcagctcagatcccatgtagggttaccccaacccacatgctagaatagcaaatacccaacggggacgctgtgcactataccgtttgttcatcctttgctaaaccagttaatcttgctgcgggtccagtcggaacgacagaatggttcactcctgcccccaccgtctcccccaatggcagcgcgtgcatcctagtccg

SEQ ID NO: 97211 - DNA, 583 bp, Zea Mays
tatgaacatacctagaacaggctagccacggtgagggtgtttctacgatggtggaaaccgaattgggggaaatcccaaattggcgagctctaggggatgattcgaggcacggtttgctggatgaggcgcttgactgcttaacggagccgagggtatgcgcaatttatagcgggcttgagcggtgaccggtgaattggacgaattgtgctggcgaccgagaggggaatgagtcacggcggcgatctaccgtggcaatagcagggcgactaaactacggtggtcattggatggttactacggctcatactgtcgtgataacttcctaaggcgtggcgtcctcacgatgaatggcgaacccgccggtgagtaccgcacggccacgtcgccggtgtgtactgatgaacaagcaagcccacagtacattccagcccatccttagcaagatttttcacctcgtgattgttatccgtgtttgatttagcgtgaatcacggtgttagcatgaatccacgcgtggggtcgccggcggcgaggtctctgagctggtgatccaatccagttactgtaccatcgcgacacttcat

SEQ ID NO: 97212 - DNA, 441 bp, Zea Mays
aagggacgtgtgttggcgagggaacgactggtggagctccctgtcgccggggtgtgcttcggtgcgtccaagcgcgccggtgtcgctgcctggtgaagacgacgcaggtgcgccgttggatgcgaaatcgaggatcaggattagaacccgtgtgacgtatcggtatgagtaaatggtagccgtcgtgattcgatcaaacgactcaggctcaagtggggcatgtgcggggccgaaccatggatctcggatccgacggtgtcgagtcagagcaggttttaatcagaccgatctaatctgggctgctcatgggtgatcggacggctgaaaaccctagataccccttcggccaggccatttcgcataagagaccctggaccttttggaaatagaacccgccgtccatcagtgattttccctgtgtctctggattcttaccccgag

SEQ ID NO: 97213 - DNA, 478 bp, Zea Mays
cctgctcgccctccggtgttgtagccacttgggtataataaatccgtccggttttcttgaaattcttgctcgttggattattagctgcgttcccctttccttggttggagttcctagagttatgttggaaattggttttattttgcttcgggtatgggcagtccttgatgaagtgtccggacgttccacaattgaagcaactagtggaagaactggggagagcagggaaacaagtcccaagggcactcggctgattggtaggagcggggccagtagtgggacgaataaaaacaggctgcttgaatggacatgaaggtgggcgaggtgaagaacaattttgattaaaaggtcggatcaccaacctggttctcctccaaacccctttgattttccatgtcctgtatgtttggcttccattgccagtgatgtattgacaaccctattgtagttgagatccaagtaggttgccattttccgc

SEQ ID NO: 97214 - DNA, 300 bp, Zea Mays
tccattattaaattgctaccatgtgaccatatctattccattggtattgacatgcgcgtatccttgcattttaatacccttatcccttgattcaaagtacttacccttgtacctctactacctatttaaacagttcagtttatgtgtccatgacattcctgtcttttgagatcccttcctattccattgttaagtcattatctttcaacaatttatattcccctggtcttagtatgctcatatccttagagtcttgcatactcttatattttcgtgtatgcttatcttcatacccaacgt

SEQ ID NO: 97215 - DNA, 396 bp, Zea Mays
aaagaaacgagcagccagattcacagcgaagttttcctccccagggttagcaggaggtgtgttaccagatggatcctgtggaggaggataagaagaagaggggcccaggtcaccttggtaaggaggagggccaaactgatccacatcatcagcaagaaaatcttcctcaacttcatcatcattagcagacataaatgggacaccataggcttgttggtgtcattcatttacatcaggatggggtgcatgaagggacacatcaggggagcaaggagcaaatgggtgacccaaagagactgactggcagcacagattgtcatcagtctcccgctggcgcctagccagctcatgcacatcagcagagatggccagacacatggagaaaagagttgtgat

SEQ ID NO: 97216 - DNA, 346 bp, Zea Mays
atcttggatatgaagttcaaatgggcatgacggagcaaattacggcacttcatatatttttccaaccatctcggcgatgagctagattaagtttttttgacgaggaactcaactaacttttctttacgaggatctcgactaacatttctgtgcacctcttttttgacatataaatttgttcagtatctgaggggagaaaaaggaatggctcaccgttagtttatcttgtgggttttgttggcccaaatgaagatgcgctgctcactattttgtgttatgattatttccatgtctttgaaaagaagatgaaaacagcggtttgtaataaacggttgcgttttggagc

SEQ ID NO: 97217 - DNA, 314 bp, Zea Mays
tataggtggacaacatgaaaatacaacatgtggtgtgtgataccagttctctgttacacgtatcacacgaccaaatggaacagatgggtgcatcctcagaagctaagaaggttagcattgataactgattttttcatagtggtacatatatactttatatttatatgtgtatactaattaatatcaaatttgtattatacagaggttgaattttaatgtggatgttataaatctgagtatgccggatcgtgcaagaccaaaaggacggacaataaaaaatacggaagaaaggattatgaaactaggtgccaaag

SEQ ID NO: 97218 - DNA, 506 bp, Zea Mays
gcactttgcacatctttatcactttattccttgtaactcaagtcaatgtatcaagagtcttgataagatactccgtgtaagtcaaatcatcctaaacactgagctcttccattggtaactgttcctgagggacacggggacacttcttaagttgagacacatgaaatacattatgcacatcagatagattatcaggtagctcgagttaataggccatctctccaacttgcctaaaaactcagaatagtccaatatagcgagagaacaatttgcccttaatcttgaatctcctcattccatgaagtgatgacaccttgaggtacacatgatttctttcctcaaattccagtggtcttctattatcagcatagctcttttgtctggtttgagctaccctcgaattctctcgaattatacaaacttgttcttctgcctcttgaataagttcaggtccaaagaactgtcttcctctagtctggtccaaaaatagaggagtcctgcatttc

SEQ ID NO: 97219 - DNA, 304 bp, Zea Mays
attcgaacaacacgctaatcgggactaagtagtaattttactcggcatgtgattattttctattaatatgattaagctgaattaaatattataattcatattcgcttagtatacctgtgatatccctcgaccgtagtatcagtcgtctcggttccgttctcgcgtagtcgtagatgcgaattctttgtcgcgtgcatatttatttgatctatactgttgtatggtgtactgttttctaccatttcaagaatgttggatgtatgtttgcactcacgtagatatcgggccgttcgtggagtctgag

SEQ ID NO: 97220 - DNA, 876 bp, Zea Mays
tactaacatccaaaagatattttatactgtcatatctttccgcaggagcagaatcaaagcaatcatcagatgcaagactatctaaagtttcacagataattgtaagataatcaagaaatttgagtcaattgtcccatctactatttatttgagtactcagataactttgattttttgtgtaggaacaagagacaaatgtcacttctactgacactactgttttaccaatgacaaatattaacttgccatttggagagaatcgagagatgcccatgttcttcccacccatccaaggagaatttacaaatctgttacttggaactcactttgaagttgctaccacaatttctcgccgtttagagtttgatgaagacttccctaccaaatcaactacttagtggcattaaagtttgctatggtgtattaaaatatatggtaccattagattatgaatgtttaagtactctcatggttaagtacactttatttttctggctacatcatggattgacgaatgctcggcgtttacatcaggaacgtttaagctactctgttcagcagcttcacggtaaaaaagcaagtcgcctgggctccagtcttgagaagcgaatacaaccaaatattgtataggctaagaatgtagcacaggcacaggctgcacagcccagaaaatgttacggtgagttgtggctttgagattcggagtaccacgtggcgcaaagacaagtcgggtcctacggattaataaaggacctgggtctcacgtgattcgtttcccattatatgtgttgacttgcctcaactcatgtttggttgactgcacgcagaagacgcatgttgcataagcggatacaaagcaagccattaaggccattt

SEQ ID NO: 97221 - DNA, 286 bp, Zea Mays
atttcgggcgactgtccggtgaggcctagactgacctaagtttggccaaacttagccaaacttatttacttggtttcaactcttgggaggatcttcttgtgacttagacaaacacaattagagtacaattcaattgactgagtcccaaaagattacttcttctcaatcttctccaagctttactgcttcacctcaaaaagagctccaaatgacgctttctgtatatacatggttagagagcaaaaccaaagtatcatatgcatagtaaaaggtgtatgaaacatat

SEQ ID NO: 97222 - DNA, 711 bp, Zea Mays
aaggagcacgccataacttatttgagtcaaagattggtggatgctgaaacaaggtactcttttattgagaaattatgtaatgcctattctatacatgcaaaaaacttagatattacctcctgtctagctcttgcacctttctatgtcaaatcgatgtaattaaacatatgctgcaaaacctaattatgagtggtaggattggtaaatgagcttatgcacttatagaatatgacttggcctacgagtctttgatatccataaaggctaggtcatagctgattttattgtatagcatcagatcgatgatactcctgagctagatataccatatctcattattacccctagattttattttgatggatcaattcacgatgaagggtaagggattgtcatcgtgcttgtttcaccaaggaatgccacttttgacttatttagccgattaaaaactcattgcactaacaatcaagccgattaaaaactcttgttcagtttggaacttttgaattaaacgggagcaacacatgtcaaaatatttggtgtttctcagctggttgtgcaacaaattttagaagagtatcactacttagacgatatgctaaatgattaccttgagagatgttgggacataatgcgctattttgacaaatttgacattcgaattatatccagagctaagaattccagagcaaatagcttagcgcaagaagc

SEQ ID NO: 97223 - DNA, 560 bp, Zea Mays
atttgctttgcaaattgatgaagcggtgtgtttgcatccacgtgggcactcttcaccagcttgttcatgctctcgctttgttgtgtagagaccataagaccacaatagtctcctttgaaaaatgcaggtacccaatctttgcgtatttcatataatctggcaagggtgttgttctcgtgtagctggaaatcatttagcatcatttgctaggcagcctcgaactccatttcattcaatggatgatgtattatagattggaaccttgttttgaaatccatctcctcaaatcttgcatacaattcattcaagtggggcatatacctgttttgcacatgccacaaacacaatcgatgtattgtgtttgggaatactctgcctagtgcgattggcatagcagggtcttgatctgaaatagataaatttacatagcattatgcaagccaatatgatatcatatagtacgtgccataataaatacgagccatttattacaacatacctgtcaacatcactcgtggtccttcacatcccatacatgttttgaacgtattgaagaccca

SEQ ID NO: 97224 - DNA, 361 bp, Zea Mays
gtgaagcagacccactagagatcatcaaagttgtgtctgagttcccagatgtgtttccaaaggacttaccaggtatgccaccagagcagaaagttgagtttgccatagagcttcttcctggcaccgcccccatctttaagagagcttacaaagtatcaagaccagagttggttgagcttaacaagcagatcgatgagctgtcagagaaaggatacatccggccaagcacctcgccttgggccgcccctgtcctattcgtggagaagaaagatggcaccagaaggatgtgtatcgattatcgagctctgaatgaggtcataatcaagaacaagtaccccttgcccagagaagatctgttcga

SEQ ID NO: 97225 - DNA, 275 bp, Zea Mays
tttccctcaagcagggaggaatgtctatgagcgattatagagataagttcatatagatatctagatatgctcatgctgaagtcgtggatgatcagaagatgcagaaattatttctagagggacttattgggccactacagtatcaactcatgtctcacttctttccatctttccagagacttctggacaaggctatagctctaaaacacaagcgtgttgagctaggcaagatgaagcagaaggctactaaccaaggacaggctggttgtagcacc

SEQ ID NO: 97226 - DNA, 810 bp, Zea Mays
gaataatgtccctctacccgaagctgacgaggtggttgtctatagaagtttcatgaaagcagggcttcggtttcctttagataggatgttggtggaagtgatgaaaaccttcgagatctaccttcatcagcttactcctgaagccatcattaagatgggaatctatatttaggccatgaggagccaaggagtagaacccaatgcaaaatgcttctgcaatatgcatgaattcgtaacccgttctgaagtaagcaactttggttgctatggcttcgtaacccgttctgaagtaagcaatccagtgccaacgtttcgtaagagatggccaggggcctagatgcaggaatggttttatgtgaagaatgatctggttaaaagggaagacatcaagggattatccaacgtcccatatggtctcacttcggcattagaagaccatcccttgcccttggaaacgatttgcaagcatgtcaagctgcttttaacacgatatgcacctacataggcaccagggacttagtccaggaccatattgcttacaaagtgtggccactcggaagtgggtgggagatgccgaaggaggctgctgctgggtctagcaaagatggcctagtctatttgaagtatacattcaaatatagaagccaatttgatgagccaaacaacgactggctagatgccatcgaagccaccagcgatgaattacttggtgcctattcaagggccaaagatgacgctatgactgcagccttcggaggccgaggcaagaaaaggctaaatagggtttttgatgttattggttttgtatac

SEQ ID NO: 97227 - DNA, 544 bp, Zea Mays
tggagcttgagaactcaacctagtcgagctctacatggaaataccccgttcttcatagtctatggttcggaagtggtgctacctgccgacctcaggttcggggcaccgaggctggtcttcgaaagcatagctgaagcagaggctaccagactagaggatattgatgtgctggaggaagagcgattgaacatagtaattcaatcagcccgataccagcagtccttgaggcgctatcatgataaagtcgtacgacaccgatcctttgtagttggagacttggtccttcattgaattctaacgggggaaggacggcacaagttgtcaccactatgggaagggtcgttcatcgtatcgaaagtcactcggccgggatcataccggcttactcaaatggatggcacagaagtgggaaattcatggaacatagagcatctcagaagattttatccctagcagaaccccaaaaattctcaaggcaacattgtactttgtaattggaggacctcacaatcaataaagttttcattttcaaatacatacagac

SEQ ID NO: 97228 - DNA, 554 bp, Zea Mays
gggcagcaaggtgtcgccactcaaagcccccatcatcgaggttgttccagaaatatgagctgagcgtcctgttcagctaccagtggttctagtctttttttatgtatcccaagttaactctcccttgctcgtgccagggggcagagcaagatgtcctgaaggttcttttgcttcactgttggtcgtcgcatggtagttggtggtcctggaggtggttttcgaatcattggatcattgtacctctgtatcttactattttcagtttggaacttttgtgtgcctcatgggacatatgtatcttactgttggtgaacaagcttgccagtctgcatcaaatgttagctatgttatattctttatgtggcaatgtctgttcgagtagaggagggttcatcttttaatgaatacaaactgttgtattttatcttggaatgtgagaggtttgaatgctcgtgctaagcgtgaaagtgtgaggcaaacaattctttctaccagcgcaactattatttgtctccaagagacaaaaattatgagttggactaaagatttattaa

SEQ ID NO: 97229 - DNA, 639 bp, Zea Mays
ctctgttgtgtcacgggggaccgtccatacgtctgtttaattggcttcctactttgttctacatggcgctccacgccatgccctttgggtggtgtagagtcgatcccgctgcctcaggggccactcagataggtaatggatagccttctatgcgatcgtgatgccttccttgtggaggttcacgagcgtcttctctagcctggcagtatgccaagcgctactacatcatctgccattgtgaacttgagtttgacgtggacaattgggtgtgacttcgtttccaccaaccgacgcatttgctggagtcttggtccaaggtgttggagcgtatcgggcaggtggcctatcgcctttcgcttctagagggcgttcgtctccatggcatgttccacgtggtgttgctcaagccgatgcacaaggaccctcacaactccaccgcctgtctagcccgcataggatggttgactactactcacaccagagtgtgtgttgcggtcccaaatacaccgggtgcctgagatttccttgttcagcggtgtggcctgtctagtgacgacaccacttaggagtcgcttcaacaattcaaggacctttacttggacgtctaactcgaggacgagctgttccgggggggggggg

SEQ ID NO: 97230 - DNA, 330 bp, Zea Mays
ataactttgtatctgcaaggacattaccacccaagtgacgtcaatgaggccaaacgcctcaagcaccgaagccgggacttcgcactagtcgggggccagctgtacaaaaaggggatcagttagcccatggtaaagtgcgtgaccgaaaccgaaggcattcaaatccttcgcgaagtccacaacggaacttgcggctcccactcaggacccaaggccctcgctgccaaggtgatccgtcaaggattttactggcccacgataatctgtactgcgaatcgagtcacgaggtcttgtgaagcatgccggaagttttctccccgctcgagcaac

SEQ ID NO: 97231 - DNA, 652 bp, Zea Mays
aagggtattttatggttcgaagatcaactggttgtttcgaagaatccagaactcaggaagaaaattttgaacgaagctcatctctccaaattttccatgcaccccggaagtaacaaaatgtatcatgacctcagatccttatattggtggaccaggatgaagagagagattgttaagtacatatctaagtgtgacacttgccaaaaaatcaaagccagtgatttaaaggtagcgggtaccttacaacctctccccataccatcttgaaaatgggaggacatttgcatggactttattgtgggattgcccaacacctcccggcaccacgattccatttgggtcattgtggataggctaaccaagacagctcatttcttgcccgtgcataccacccacaagatagaaaaatacgtagaaatctatattgaccaaatagtgtgtttgcatggaatcccaagaactatcgtgtcagatagaggagcaccgttcgtagcacgtttctgggaacagctacaaaagtcacttggaacaacagtgattagaagctcaacatatcatcctcaaactgatggtccaacagaaagagtaaatcagattctcgaggacatgttgagagcatgtgtaatacattatggcaaagattgggacaaat

SEQ ID NO: 97232 - DNA, 856 bp, Zea Mays
acttgttggtgttttgacctgagggtcctaccaacaagtgaattagtactccgcgcctagatccatatgggtgatgcaagaagacacaaacttttatcctagttcgggcaagagaatgccctacttccagcagagggggatgaaacttatattatcttgcacctaagtgcttgtagtagggggtacaagctgaccgggagagggagaggttcccaagtccctagtggtgattgaggcaagtgccattatgagtcgtggaggtgaacacctatgaagtgttctcctcctcgtttgaagcactggactagtctccaggagggaccccaggagcgccatgacatgtcgtattgaggaggggagatgagtttgagcccctatattgatcataaaacaccaaaatccttaatcaaatgggtcgaggtccattttccttacagtatgcactccatcccctctccggtgactgcacaagcatcctcgtccccggcagacgtcctctttcccggcggtctcgcatgatgtgaattctctaggcccctaagtggtgtttggtaattaatgacaaccgattgcggactaacagttcctcgagtgataagattgcaggactgaatcacaaggtacaacaaagttcttgatgaatcataaccattgattgtggatcaagtgaaggcaaaggtaaaacataggtttttgcttttgccggtcagcaggtgtttagagaagaaactgactggattagtaggatagacagtcgtactattaagaggggtcaatgaacttgaatggtgtatgacttagtgcctcgtagagtacaaacgataatatgtgtataagggggtaacaacgctacgga

SEQ ID NO: 97233 - DNA, 403 bp, Zea Mays
gtgatttgtactctatggcacgaggataactgcgagaggtaaaaagatcggaagggaggaggatttggtcccggatgtgagcttatcggcgcacttgattgcttggagacgtgtccacgtggccgatgtcgacggggaacgctggcgatctcagttgcgccatgcaataggccgtattaccacgtcgtcgcgagtcatggagagtaactagtgactgatgtaagaccttgccccagtacgtgccacgatgaactcactttagcaacatatcccttcaccgtcgtgatccaaatctcattcaaattcggagcaaccgtgaccgacttttataaattgagcgcttcccttgctccgcccctttgtcacaaacccagtgcaaccccaaccatgtcctaccctccac

SEQ ID NO: 97234 - DNA, 350 bp, Zea Mays
ctactagatcagtaagagaactcatcttccaccgcccacaactcatttgtaatctgtataccctagtgcaattccaatacatagcctcaacaggaagtagggtgttacacattctagcggcccaaacctgtatatatcattgtgcaaatccgacgtgctcctacacgtaccatcgagtcgcagtcaacgatgtcgtcctactcaagagcatcgcgtggggaacctcgtggtgtgcggttgggtcataaacactgagagctggtgtgccaggtagggggtgcgacgttaatccatgatgactccatgactatcatcttcaacatcccaatcactttcaatgctggggaggt

SEQ ID NO: 97235 - DNA, 399 bp, Zea Mays
gcggagtggttttatgccctggagcgtgacattggtggcgtactcacttggtcaaggtttatagaatttctccagatgcgttttgggccaccactccgtttcaatggcatggctgacttgaaagcattacagcgcaccggcaccgtcgaagactacactcgacagtttttaacaatcctgtgccgctgtgatgacatgactcatcggcagcagaccaacatgtacacagcaggattgggggagcccctgcgcactgatgtggagatggagatgccagagacacttcaacgggcaatgcatttggcccgagtgtatgaaaggcgtctgctgctatctgccagctccagcaccacctcatatcaggcaccagcagcgccatccaaatccccaacaactgca

SEQ ID NO: 97236 - DNA, 1022 bp, Zea Mays
gccgctgcttggccgcgagggcgtctctctacttcttgaggttggagttgcgcatgtagaggcttttgagtaatagttgctctttggtgttgatgccgacgtcgagaccagcttgtaagtcttcatcatcattcttcgggagcatcccaaatgggtgatggtggcctgccatggtggcaaagcctggaggggacagaggcaggttccttgttaggtccggccaaactttatcttgatagggttggttttttgggtttgatagatggtcttttgaattttctgaactggtggtattgaccttggcctcttgctcggtggagattgctatctgcttttgctttaccgtgaggtcctcgccatgcaggttgctggtggtcttcgggttgggtggtcgggaatggtcggcagcgagggcaacatagcctttttggtggcaagggctgccctggcgtcatcgtcatttggtggtgggctagaacgagtgctcttcttgggggcatcgtgggtttagtcttcatcgtacgaacggtgggcgccaaatgttgagtactgacacgtggtcaggtgggcccaaacacttagagacagatagagagtacgagagagcgacaagacggctggtgggaactatagcttctcgttatgtgtgtcccatcccgctacaggacggtggtatttataggcccgtccatgggtaggtggtccaaagtatggttctacccctggttaccaactacgtctagggaatattccatgtaacgaagtaattacagcaccgtgcgtacactagacagtgcacaccaaataacacacccacaaactacgctgataggtggacccctagggatgccctccggtggactggtgacatacatggcctctctgtagccctcgcccttggagcccttgcgtcatggtacccttcgttgagcctagtcaaatgaggagcagtggagcccctagggcgacgcagtcggtgaacaccctgtcctatgtcaatcgctctgtggcctctaccgttg

SEQ ID NO: 97237 - DNA, 399 bp, Zea Mays
cttttggctcatggatactaaataccatgatttgaaatgttgttgtattgtttggagtgatgtacaaaatactacagttatgtcatgacgttttaaaatcatagtattctagaaccatagttttgaaatactttacttccaaacatgtccttagtagcatcataaaaatgtgtacttcaatcgagcatacttcgcacatgagggggcattggaagttggtgaaatttgagtatacttatctcgttttcttgccatagttcatttcaatctcatagtcaattcgccttatctacaccactaattgtccagctccaactaaccatgaacgatacctatctaggtaataaaaatatccagaaatgtcaaaccattttcacgatttagagcaactcagctttt

SEQ ID NO: 97238 - DNA, 919 bp, Zea Mays
agcttgctgaaggctcttccaaaattttgaggtgaactgcgtccctctatctgacactatcttccgaggaataccatggagcctgactatctctttaagatatatccgggcaagggtggctcctccaaaattggttttcactggaatgaagtgggccaccttggtgagacggtctatcattacccagatagagtcatttcctttttgcgtccggggcagtccggttacaaaatccatgcctatttcctcccacttccattcaggcactgggaggggttgcagtaggcctgcaggtttctaatgttcggcctttgttcgttggtaggtgtcacatcgggccacatactgtgctatctctttcttcatcgctctccaccagtatctggttttgaggtctaggtacatcttggtggttcctaggtggatggagtaggctgagttgtgagcttcattgagcaggacttcccgtgcctctccctttgatacgcacagacggttcttgaaccaaaggactccttggtcatctgtcttaaggtccggaagttgctctttgcgagttttttccataagccttgttgtctccgtgtccaggcgttgagccttgcatatgaggtattatagcattggcttgacttccaggctaccgttgtctcccagacatgcattcagctgagctgattccttcttccaatcttctaaaaagttggttccctttatcccaaaaggtttttggctgagggcgtctgctaccacattggcctttctggggtggtaatggatctcaaggtcataatttttgatcagttcaagccatcttctttgacagaggttgaggtctggctgagtgaagatatacttcagactcttgtgatcagtgaagatgtggcatttgttcccaattagatagtgcctccatatt

SEQ ID NO: 97239 - DNA, 1028 bp, Zea Mays
gactcgggacacatgttccttcttcttctgtctctagactcttaagattgtgcttgtctcatcttcttcttcgtgtagccaggtgattttgatgaggcagagaaaatacttcatgatgtctttctgctagggagggatctcaatactctcatcacagacttcctcggatctttgggagaaactggtcactacccacacgacgcttgaggctaccgacggcgaggtggccggtctccttgctcgccaaatgaagatagaccgtcgcgttgtggtttcgtgttgtcttctgcttttgtgaataaccctctttggttgtcattgactattttcccttgttaccggtgccatttctagaactagagtcggaggtcgcgggcctttgcgaggtcgtggatgaggtgatcttctttgttcagacctagggtgtcgattgaggagagcgaattctcaatgtagctaaccgggagtgcctggtcgtccatcgtggcgctcatcgcggtgccgctggggctctggcctttgtgcagttctggtcgggctacgagtttggtactatggacttgtcggaggacacgaccgtcggtgctctggaggactttgaggatgacttcgacatagccaccgaaaccatggtcgacatctttccactggaggatgtgatcaatggatctccctagttaggatgtatccgtaggtagcttcgatcatgggacggcccaggtgtgtctgcccctatgctttttgcaatgttgtcatttatttctaaacttgttggtgaaatgtttcccctccctttcctgttcctgatattctattatcctttagtgtgaaaaaatgggttttggtatacttattttgggacttcacttgctcctcgattgcgcgccaggtggcctcggcgtaattcataggacctagaaggtggtttcgaaaacctctggcccactccggcgctgggccattcgtccctggtttttgtgtcccacgtgtatttgggggaatcgggagtgttgcatcgtgggtagcgg

SEQ ID NO: 97240 - DNA, 463 bp, Zea Mays
tgcgaatgtaaattaagttattgtaactctttccacttttactccaatggtatgtaatgtatgtgatgtgggatgaacgctcctgggagatgtgaaggagatacgagaatctggttctgtcaagctattgggtgcacctgtatgactgtataaggtccttgggacatggacatctgtaggtgggcataatatcatgggaggttccataacagatggctccgcacatagcctctcggaagttataacttccgacatcctcgtacaccggctctcagaagttatagaattagcctaacgtcgcgcccatatcctctctcacgagcgtctcctctgtctgatatgcctgcacctctcctatttcctacacccgtgccattcttgctgccagccccacctccgcccaccaccagcctaccaccacccaccgcagcagcaacaccacccaccaccaccgctcaccacc

SEQ ID NO: 97241 - DNA, 452 bp, Zea Mays
cgactagtcgtcgacctgggcgattagtcgtctcgtcgaacacttcctggttgtttttggtcgttgaagttttggtactgggcttcactctggtttttaacccatctacagtagcccgcccctccaaaaaacctcccagccgccagaacccttcccagccgccataaaccctactcctctcctctgtcaattctttggtttctgccaacgtctctgctccagcctccaagtgctccagccgtccagcggcgtccagtactccagtgctccggcgtctgtcagctagtcaagaattgaagatgagctcgtcatatgaaggtagcacttgctctcccttctctgattatctcccggtctcccttccctttccctctattacctctgcagcgcccggaagatagcggtcatctggtatctcccagtaggcagtagcccaatacccagtagtaatt

SEQ ID NO: 97242 - DNA, 374 bp, Zea Mays
gacaatgttcttttgctgctccagtaaatacaactacaaacccatgttgtgtaagataacactattattgccagttactctgagtgctgattatttaacctggcgcatgtttattggttaggcagaaaacagttggcacttggcaggatgtaccttaatggatagttaggccacacaattgatttctggagaacataagacattttaaccattatatttactaatcccactccttgtttcctgagcaagaggaactcattaattatttgatttatttcattgtgattgtcctgctacatccatatgcttgtacattgctttatgttgctatgtcaaaaattcaaaattacgtttctcccaacattcggctgccg

SEQ ID NO: 97243 - DNA, 491 bp, Zea Mays
gacctgagtccgactggatcctagttttgacaacgcgtctgctgccgcgttgcggtctctctccacatgatgaaattctagcccttcaaatttgtcctctagctttcggacggccatgcagtacttgcccatggaatcattcgagcaatcccactctttgtttatctgacttatgactaccagtgaatctccatataccatcagtctcttgatgcccagtgatatagcaatgtttagtccatgaatcaaagcttcatattctgctgcattattggacgctgagaatagtaactgaagagcatatttgagttgttcgcctccaagtgcaatgaagaggatttctgcgcctgccccctgcagttttaatgagccatcgaaatacatccgccatacttctgcagtctccgggttgtctggcacttgttgttcggtccattctgatacaaagtcaactagtgcttgagtcttgattgcagtgcaaggtcgaaact

SEQ ID NO: 97244 - DNA, 1606 bp, Zea Mays
cggccatcaccggggctgtcccagatcttaaagatggcctcttccccatggaggcactgaggcgagaccttagagcatcttcctccatgtccgctatgcggtgcagagcgccctttcgaccagcaacgcaggagagggatcaaaagtggaagatctccctgttgacaaagttaaagacgatgttgaaaacgatgatcatggagttgtcgttaatcgacgtcatacccccttcctaacgcgccagctatcgttgtgtggtaccgacaacgaactatgggatacaccatgtagtgcttttgagaggacggcgaaatcggtcgtagctcgatgattcttgccaaccacgacaaacacaaggaattatattggatcgagctgccaagatgcgtaataccctacgtcatgtgtgtttctgatgattgtattaccttgtgtttgatgattacaggtggttgtcgaaggtagaagatgagatcggtgtttgaatctaacagggtctgtcctttttataggggtatctcttcaactttgtatagctgacttaagagatcaccttctacaatctcgacgcacttctcctgtcaaatgacttctgctagaaagaggccatatcttctggcggttagttggttcttgtgaatactgcgcgtggctatatgcataggtcataacctatggagtcttcctgatctgacgtacaactcgtttagtcgtccttgattgcgtccgcttgagacccatgaggcatcccgcaagtggcccattgggagccttgtaggcagtccacaaagcgtaaccatgctatgatgacctagggatatccatcccccataatgacaacgattgtgatgagatcctatgcaacaacatttagtgagctcgcggacagggcaacacaggtagagttcaagaggataggtgttctaggcattgcctacctttgcgaacctccttggtctgatctctacaatatcaatacgatgatgagcttagagtatgatatcaaaacctagtaatgtcggttgcggtccttaagctttacactagggcatcgagagggatatagcttgaatagatgggatcagagggctcgcgaggcccaactttatagtcctaacacttgagttctatggaaaggactaggatatggtggcgtgggaaaggattccttggtgaactggacttcagctagaacttgattggcacaaaggtaatggaaaagagaaaaaacaaaaatggctaggggtttagcggggaaggatttggatagaaacaactaactttgtacaaggttgatagtgggtcagagtggatcctgagtgagtcccaattggacacgcgttcttgtgcagcacgacagcagcgagaggagagggatgataggtgggacccaatggtcagttatcatggtgatgctgcaacaaggggctcggttgtcaacggctcgtgagccaaagtatgggcacatacagggttgagcatgaaatccactgggccctacccgatgccctattgtgtattttgaataagaaaaagcaaaccaatttgaaattaaaccaaacaactttgaatatactcaaaaaaaatcaaatgcattggtatgaaa

SEQ ID NO: 97245 - DNA, 961 bp, Zea Mays
gaaacaaatggctacaactcaagattatggacaagttgggatgatgcaaggcaagccacctcctacagccacatgcacgcagaaacagcgtgcaggtgtgccttaaagacctggggcatggggggactgtatttgtttgtctgtcttccatatttagaatcatgatgagccaacccaatctcagttagtttaggaacttcactttcttctttggttcgatcaggtacaatttagttggcatgcaactcactttctactttgcaggtctttttatgtcacgccaacatccaaaacagattaaaactgaatgtattttagaggaaatggactactcagatcaggtaggtgttccaatctctttgcatcacataactaaactgaacgtattcagaggaaatagactggttaggtgcttcaatttctatgcatcacatctttgagatggattggcacctagaagaagtcaacactggagattgttaatacgattgataggaactataaatagagttggacctagatggctatgctaaggtgtatgtatatgtgtatgtgtatggtatggggtatttcagatgtgtatcatatggggtgcttgaggcagcaagcatgcagaccttcaaattgagacggaggttgccgagaaggggtctgtacacactcttggtaatgcctgtgtcttattttctctgaagaagactggttgtttcgacattcttgcttttattgatggtgtcagttacgtatgtttattgatttcactatttttcctgcatgaagttcaagttgatcgaaagcggagagctggctcgtctcagggagctgatcaatcccttaacaggccagtactcagtactaaactggagatcttaacccgttcctaggagaaatccaacaatacataactgaaatttattgtcaattccctttatctgttcatgactttgtgtactttttccta

SEQ ID NO: 97246 - DNA, 464 bp, Zea Mays
ttattttcctgttgttagaatccaacaatagttacaattatggaagtaaatgcagtgtgatgattttcaaacttcttcttatttcgcgaggcatagagatcgccctaagatgagtaatcgcaaacgtgcttgtgttggatcgagtagacgtgagcacgccgtgccgatttaagtcactaccgacttaaactgactgctctgttagtagggtatagtggtcaccctgagttacgcgtgagcatgtcacaccgccttaagtcgtcgccgacttaagtcgattgctccgttagtagggtatagtggtcaccctgagttaagtaagcgtgagcatgtcacaccgccttaagtcgtcgccgacttaagtcgattgctccgttagtagggtatagtggtcaccctgagttaagtaagcgtgagcatgtcacaccgccttaagtcatcgccgacttaagtcgattgctccg

SEQ ID NO: 97247 - DNA, 272 bp, Zea Mays
tatttttacccagtcagaactaaacatgaggcagaggagatggcttgagctgattaaggattatgaattagaaatccactatcacccaggcaaggccaacacggtggcagatgcattaagtcacaaggcttcctgccattgtcttacagtaaatacctctggcatcacattatgtcaagaaatggagaaattaaacctgggaatgattcaacatggaaccttggaccaattgaagcttgagtcaattcttctgcaaaagattattgatgccc

SEQ ID NO: 97248 - DNA, 359 bp, Zea Mays
gtcgaggtggaggacctcaaatgttgtcctactagagctttgagtgtgatgcgagtgacattggcagtagaggagtgctcattcaataagataatcctatcttcttgcctcctcacatccaccacagtgttcttgagactcttatcaactaaaactcctactccaatttctatctgcagttgtctcagtgtatcaaagcttgaaattggcatgtccatcttttgatccttatatttaatttctaggacttaagataagctggagatgtaaataaaaaaaaaggatataggtgattctcaaatggctagtcatgaaaaatttctttaaattctattcatccaaaaaaagggagacatcaa

SEQ ID NO: 97249 - DNA, 312 bp, Zea Mays
aggttacaaactcgtgagccaaggaagaggatacgaccaagagaaagaaggtatgagacggaagaggggcgattttaaagggcaagtatgagacaaacatcaatgtaggatatagaggtgtcaagggtgcatatgataataattaaaaagcataacaaaggatatagttaagacaagactcgcgaaacgacaaagtggagaaaacaatcaagggtaagatcggtaaggttccaacataagggttgaagtaaagattcattaccgagtggagttacaaggaaacaacgagattactacaggtgtgcaaaataa

SEQ ID NO: 97250 - DNA, 348 bp, Zea Mays
cgtgaatcgggatgtggtggttttagagagggggagaggaggctgatgacatataggtcccgcacaacggttgtgattttgggaagctctagctgatgtgcgagactcacgacacgcacaacaatagtagttccggtgcccgcacagttcatcctcaccattccctgttctgcctttctgattccccctccctccgcacaatctattctcatgttcggtcaccattacttgtttactttctcattctcccctcccaacaaagctcattctcattcccactcccaaaataggtccttaggggattcgaacctgtgaccccttataagtaaatgtgctcgtagctaccac

SEQ ID NO: 97251 - DNA, 435 bp, Zea Mays
agtaaaactcgtggaatgcacatgtgcttattcggtgaacttcaaatcctttggtacctcatcttatacctttttgggtctgtatgggtctttatccctttatagggattatcaaactttggtgtttaacacagactttatttcttttggaaggttccagctaggaactataatctcaactatgagatattctctctacactggagagtggtcattcatcaggaatgtattatccggtacgagatttatatgttgcatatttataattcaaagatatgagtcctcctaggatctcatgacggatcttcagaatcctattaactgcatattataatttatgccatttgccagatatattacatagtggaactgtgtttattcaacacatatgtgggatgggtctctcactagaccacttgaaccatcacattcacc

SEQ ID NO: 97252 - DNA, 371 bp, Zea Mays
tggagatctttatctaggtagtaaggagccaaggcgtggagccaaatactggctgcttctgcaacattcatgagctccattaccagatgaaggaaaatagaaaagagcagcttcataacaacttcggtcgttacaccttcgcgtactggaaggatgtccgataccctgctttggcgtaccagagccaatggccagcctcctagacgaaggaatggttttacgtgaagaatgacttagagaagagggaaaacatcagggatattatctagaggctcgtgaaaccacacttcggcgtaaagaggttgagaattgtgatgactgacgaagctcaagcttgtctggtggccttcaacgccatatgcagctatatc

SEQ ID NO: 97253 - DNA, 448 bp, Zea Mays
cagaaaaattatgtggataaatgacgtcgaccattgatttttcaagtcggagatcatgtgtacctgaaagtatcaccgatgaagggtgttagtcgatttggggttaaaggaaagttagcaccctgatacatttcccattccttattcttgaatgatgtggacaggttgcatacagacttcggttgccggaatcattgtctattttgcataatgtgttccacgtatcccaattaaagaagtgtcttcggattcctaatcaaactatggatgtggctgatattaatttggaaccagacttaacctattcagaacaacacattcgagttttggatcagaaagaccgaattgctcaaaaaaggaatctcaagttttataaggtatagtggaaccaacacaccaaaaaagaagctacctcggagactcaagatttcttagagaaacattttcc

SEQ ID NO: 97254 - DNA, 525 bp, Zea Mays
tctatggcctagagcatctctaagagctcctagttagcagtgtctcccttagccaagtcgcagcactcaacctcgcactcatatgcatgacacactatgcacagtgatggtacccgtggggcctggcatcttgagcttcaagtaggtgcaattagggatagccatgaactttgcgtaacatggtcgcccgaggatggcgtggtaggtccccttagaacccaactacctcaaaggtcagggtttcggtcctgaagttgtcttgcgtcctgaaggcaacaagcatatcaattcacttgacttgtcactctctcatctctagacccttggtcaggagcgcttcgcgcgctttggcctgatcttaggcgccggggaggtggaacccatgccgcgctttctacgagctcggggggttgctgcgacgtagtgtcgttcgccgttggcgtagatgtagtgcactcatttgtccccgacttgtggcatcatgacatggagatctcagcctgctgtcgcgcagtgaggccgaga

SEQ ID NO: 97255 - DNA, 295 bp, Zea Mays
gttcatttgcatggaatcctaaggaatattgtgtcagacagaggagcaccgttcgtagcacgtttctgggagcaattgcaagaatcgcttgggacccatgtaataagaagctcagcataccatccccaaacagatggtcagacagaaagggtaaatcagattttggaagacatgttgagggcatgtgtgctacactatggtaaggattgggacaagtgcctttccttggcggagttctcgtataacaacagctaccagtccagcctaaagatggcaccttttgaggccttgtatg

SEQ ID NO: 97256 - DNA, 400 bp, Zea Mays
aatgagtgtagcccccgagctttgagtagattttagaaataatccattcaaaggacttcatctttgtgcttcttttgaaattagcattttcaaaataaacaagtgatgccatctgtccatgccttgttaggtctggaatcaatttgatcggtgacaagttggacatttggctggttgagatagaaagccttcagttggacaccattctgccctgaactttaatgattctgttgattggacttgcactttagtaaccacacttgggcttcctctcgtttcagtcaatgtcttctttttgtcgcggtacattcattgcgtatactttgtgggtatcactttcttcagaaaatcttgaaaattctaggtgatacacccaaagggtgtgcccaaggggtgtctg

SEQ ID NO: 97257 - DNA, 308 bp, Zea Mays
tactatataatgcaaaggtcggtatgatgatctgtgactcgatcacatccttgaccaaaccccatagagagagaattcttatatgactagatgtattgtgtgtattctgatgtattgtgtgtgattgtctctatattggacctaggcccacttacccctattattaatatatcgcccaaccctggtttagggacaaggtttcacttctatcatggtatctcgctaggtccctttctcttctccccttcctcccacccctagctgccggctggccgccctggtcgttgtcctcttccctggccgccggc

SEQ ID NO: 97258 - DNA, 349 bp, Zea Mays
tgggaactcaagtttgatcttggtgatcacttcagtgagcaaagagtcgagagagacttggccagtcgggactcctcaacagagacataggtttcattaaaaatgaactccaataaacaaattgttgtgtctttgtgcttttgcctttacgttttgttttacccatttcttcccaagttcatactttccatacacttcgtattatattattgctaagttgttacatttattagcaacatatcacaagcattgttcttatactcattctgaactaacccctcttgttctagcacttttaattaaatatctcaaatcaagttttgtgttatgagttaaaattttaggtttt

SEQ ID NO: 97259 - DNA, 531 bp, Zea Mays
caaaatagagattgggaaaattcataagcgagcgtattctgggacagcaattactgctgcagaaactgctgctgtctctacaagaaactgtgataaagatactttgcattgctcgaaacatgaagatgcttttcagaatggtgttccaacatgcgaaaatttcaaggaggatattgagggagaggaagtcgtttggcttcgctgtgatgtatatgacactggaataggaataccaggtatttcctgacatttttctattatctattgcataatcatcttctccgtatatcagttaatcgaaaaactatatataaaacttgctacatgtttggctttgtttctaattatttcaacatcttgccacctgcagagaagtccttaccgttgctgttcaagaggtatatgcaagctagtgctgatcatgcgaggaagtatggtgggacagggcttggccttgcaatctgcaagcagttggtatgaacttcagttcccatgcattgatgcattttaaggacacaatattgtataatg

SEQ ID NO: 97260 - DNA, 284 bp, Zea Mays
tttaggtaacttctatcctagcaatgtttctaacatgtatgcattaacagaaattacatctacaaccttataaggcccttcccaagatggagaccacttgccaaacttgcgatccatggtcttcaatggcaggattgtcttccacaccaaatctccaagttggaatgatttagcctttaccttcttattacaagccctgacgactataagcttgtccttttcaatatccttcaaagccatcaacctcttatcggtcacctcatcaatattatccatcattaaat

SEQ ID NO: 97261 - DNA, 578 bp, Zea Mays
tttggcactactatgcggttattgaaccataacacaccttgatcgtcttccttgaaacatttggctgttccagcccttattttctcccgtatgtgcttcatacccacattatccttttgagcatcaactattctttgcaagatgatagactcaagctttagctgattcagagtcccttgttgaaccatccccaggtttagcttttccatctcttgacataaagtattgtcagaggtcttcgccataagacagtggcaggaaaccttacggctcagtgcatctgccacaacattggctttgcctgggtgatagtgaatttccagttcatagtccttaataagctcaagccatcgtctttgcctcatatttaattctgactgggtgaagatatacttcaagcttttgtgatctgtataaatatgacagatatttcccagcagatagtgacgccaaattttcagggcatgaaccacagcagctagctccagatcatgagttgggtaatgctcctcatggtggcgcaactgccttgaagcatatgcaattactcgaccctcttgcattaatacacagccgag

SEQ ID NO: 97262 - DNA, 623 bp, Zea Mays
ggggggcttggttaaatcgcctgcgcgtagggatgcccagcacgacatcaattagacaggaagattctggtggtgaccagcacaatggggatcacaaaggacctgttcggatgtgggaccctccccgtggccggatctctcgtgattgagcgggctctgaaactcaggcaagaactctcatgtgcttccctgtttccttcacgtagctagtagtatttggtttggctgtgggagcacttgaagcaccgagcttgagctctggtaatggcgacttgaggggggggaggtctcccacaccagcgtgttcgacagacagagggttgaagaagaaccgtgggccactagatttcgcatcggtggatgaggttgacctttgagcgtacccccttgtggcctgtatcttggtcgttgatcggtattcaacagccgcgatcgcgtcgcgcataacccttcaggcgggaaaatcagaaccgtggattgcctgatgggcggcccagatcgtataccaattcgggtgtgattcaatctaatctgggccactagttttggatcggacgactgtcatgcgcaaataccccttcgtcgagcctttatgcataagagcccttcaacttttacaaaac

SEQ ID NO: 97263 - DNA, 348 bp, Zea Mays
catgccgtggcaggccgtctgtttgggcatctatatccatgggcatctagggaatatctatcccccacaccatccccttgttcaattacaagaggagggacatacaaccccatgagggcggatgatatcagattagatcagaatgcaacaacaacaacaaccacatatattaatcttcgtgtttcttgtgcctttaccttcagttgttgatcacatgacctaccacatataaacattatgaacaatcttcgataattggcatgctaggtaggggaagtcatacatcaattgagagttgatggcaaccatgaggttcccatcaggagagaaattcatcttcaacaccct

SEQ ID NO: 97264 - DNA, 676 bp, Zea Mays
tcgccgccgcaagaccccagacaccgccgccgtcgacgttctccgcttcggtcgtcgtccggagttctcggtcggggtttggggactgattcacgttccctggaagaagttcacggccatccgaggaggaaacgaccgcggtggcggcctgaattcaccgtcggagcttcgtttccaccgcggttcggactcgaccgttgccagagcgcttcacaacgtgatcactggtaaggacccttgtgtcgagttcaccgttgcctctgcatcctattgtcgctggcacatttggcgctggtgaactcttgcgccagaacccggaactccggcggggattgaccgcgcttctaggtgtcgccgccgtgcggagctcggaggtaggagagaaaatcgtgaccgttggatctttgtgcaacgtccccgattagatttggggggatgtcactgggtgaccgtagatctgtgcacgggtggccgaaatttagccatgacttatccctttgtgcgatctaacctggaccgcggatccatgatcgtgtggctgatattgcgtaccgtttcgtttagaaagaaatctaatcttagccctcgattctggatcgtgcggctgatgtcctcccgtaccccttcgcctcggcatttattcaaaagagtccttatgttattagaatatagaacc

SEQ ID NO: 97265 - DNA, 280 bp, Zea Mays
gtggtttcttcgttaggaatggcagtgctagggaagcaacccatgagctggtgggtgttgttgtttttcgacgaccactagaagtgcatgtgtgcttatccacgataattgtaacttgcaaacaataaaaaattcattgtgaccttccctaatttcattcaggatccaaagtagaaacaatgtgtgatacaacattactcacaacgactgtgggagacccggcattttgtagccttgcattgattctccatggacaatcacctcctttgcaataagctcg

SEQ ID NO: 97266 - DNA, 620 bp, Zea Mays
aaaagacactccacgcaaaagttgcctaagggtgcagccggaatagctcaacaagagcgttattcgaagtcttttcttcagaagacactccgcgcaaaagtcgcctaagggtgcagccggaatagctcaacaagagcgttattcgaagtcttttctttacaagacattccgagcaaaagtcacctaagggtgcagccagaacaacacaacagaagcatcaaacgaagtcttttattcaaaagacatcgcaacaattacctaagggcgcagccggaataacgttaatcgaagtctatcattacaaaggcactccgcacaaagccacccatgtacgcagccggaacaatacaagcgtacgaatacgaccaacaggccacaccaccattacaattacatacacacggcgagggcatcacctattacacatacacgacgagggcatcgcctatcacatcggctcaaccttcggaatgatacccatctccctgtaattaaacaacattatcctcaattcctcaccctcaaaaagctcccgaagatccccttcgcctatgcccgcccaatttggcaaagacaacaattctcgcctaccaacctcgtctactcgatgtcggccacgc

SEQ ID NO: 97267 - DNA, 726 bp, Zea Mays
gcagggcattgcggttgatcccaagaatgttgcggctgtggtggagtggaagagaccctctagtgtctctgaaatccgaagtttcttggggctcgctggatattatcggcgcttcgtaccaaatttttccagcgttgctaagcctttgactaaactcttggagaagggtgttctcttcgtttggtccagcgattgcgaggtcagttatcagacattgaagaacaagttggtggatgcccctatcctagctttgcctgagagcggtaagcgtttcatagtttatacggatgcttcgtgaattggtcttggctgtgtgttgatgcaggaaggcagagtgattgcttatggctcaaggcaattgaggaagcatgagaggaattatccaactcatgatcttgaattggtcgcggtggtttttgctctaaaattgtggaggcattatctttatggcgaggcttgtgacttttacaccgatcataaaagtctcaagtatattttcactcagaaggagctgaatttgaggcagcgtcgatggctcgaattgattaaagattatgatatgtccattcattatcacccggggaaggcaaatgtggtggctgatgcccttagcaggtctggggttccaaaagtggccttgcctttgatcgctgatctggaccgtttggggatcgctttgtgctatgtcgacaccactagtgaggagactcggatgcttattcaatc

SEQ ID NO: 97268 - DNA, 583 bp, Zea Mays
gatactaaagcgaacacgtgggggaaggtattactgaagttcatggttgcggagatgctcgaccccgagagacgtcgtgctggagttccttccgccaggccctagctttctcgtccatccatcgatacgggaatgaggagggtgccgaccagtatatatagggacatacgagtctaatctagcgtggaactaggccggacaggtagaagattgagacggacttcagaagtttgttgcgaattcgtaggtgcgcacgcgtactagtgcgattctgttgcagccactggatcggagctcacgcttgaagcagatcctggccaaagtgccccacatgtcattgagcttggctgacatcatcgttgaggtcgtggtgacatcatgcgcgacaaggggaataaagaattcagaaaacaaacgtgggtgggtttgtgcggtgcatttgtacagcatgggctgcgtcgcagtttgagcccaataacaggtaagtttttcctattttttcttttctatttgttttagttttatattttacttttaaatttcggtttcaatttcaaatatgaatttgtctgcaaaataaaat

SEQ ID NO: 97269 - DNA, 332 bp, Zea Mays
aaacagtaactctcagccatcaaagacatgagttactagtcatgaaatgagggtcatgtaactcccagtcatcaagagccaattaactaattataacttccatcactgatgtgccttgaatttatttgattaactagtcaataggttttaacccaattaatctaacaactacatcatgccaaacctataaggacatcgctatagcgctcgccctcagcgggtgaacgttgatgccctgacagtcgccgcatacgctggcggtggcccatcaaactttattcgtagatccaccactatgaactagtattaatacttacgttaatattgattta

SEQ ID NO: 97270 - DNA, 524 bp, Zea Mays
caatatttcgggtatggggcttcgagtagatctttgaaatgattgatggtctcctcaataggatgcttacttcccttctggcccattatggctactagtaattcgtcgtgcccccacatgtccttctttctcttatcaggctattcgtcgaagcccccgttggactctttgtcgagtttggccttctgcttatgatggtcaaagatcgccccaccacatcttccctggacgcgtggctagttgctatgtcgaagagctccttcgtagttcgcatactcatttgccccaacttatgcactagagtatctgttatggtccctgagatgaaagcgctcataacgtcgacgtcgatgaggttagtaaactcgttgcattgccatgagaaactaaaccataaaccctaaaaccctaaaccctaaacttgtttctaccagcagttcttgttgtcccacgggttgctcaggattacgtatgtgccctagaaatttccgacgaagatttccttgaggtcgatccaatttcgg

SEQ ID NO: 97271 - DNA, 311 bp, Zea Mays
aagatgtgtccacagatttagtcctcttggccttttccttggaagaatctcgacccagtggcctcttcgatgtgaagctagatggtactgattcttctgcatccacatctacagtgttactatgggtgggattagcgttgccatgctgattttgttgccccatgtggttgtccatccattttggttggtccttaagtatggcccaacaatgtaaaaagtggaaaggcttcttctcaatagctgcaaacctataggccgccagtgatgtctgcgacaaaactaatggttacagcaggaacatacttgtaaat

SEQ ID NO: 97272 - DNA, 521 bp, Zea Mays
tgtttttattttaaaaactcattttctaattcatttctctgatttaataaccctatggactgggcctcaataacagaaaatagcaggggctacggtgcaaatattcctaagactcagaaagtccctggtgtggacggagggttgatttatcaatactggaagggctcttttgcaaaacgtgcaagccgaaggggtatcggcaggccagagccgtccgatcggaaatctatgtcctagattagatccatatcattttaaaccggtatccgatctgagccgcaactgcccggatctacggtcacgattttaaataaccctgatctaatccgacgcacacgatacgggatcgacggcacagatcaacgcagcgaaggggtaagtcatgttctaatcagaaccgttcggccataaatcaacggccatgggttcatcacctccaccgctgaccacacacggcggcgctacgaatcccagcgaccggacctcgccggcgcgaagagtacctggcaacccgggtttag

SEQ ID NO: 97273 - DNA, 558 bp, Zea Mays
gcaccgttgttcccagcaaacgcaagagctgagagcacgaattgtatcatctagaagcacatcgatcaatattcccgtaggctacacacagaattaacctacataacctaaattacacaaacttaaccataaactgcgataaaaaaatcccctctccacccagacacccacaagaacacactacacacggtaaaccctcaaatccacaaccccaggtctggtctctagcagatccaaggaatgatggaagaataaatccccacagatccaattacccaaacgaatcctgacaccaaaccaaatagcacgagatgtagcgcatgctgcgcataccacccccacgggtgattggcgaaacagggttctttcagatgaaaaaatcgggaaatgatagcgcgagaaggaaacgtctactaatcgggaagcgcgaacctgaacaagcgggaaaggaaaccgcggcggaggagggagaggacgacgggattcaggagccgagactcgagaccacgcaccttgtagagaggacgagcggcgaggggaacggcgggcagcggcggc

SEQ ID NO: 97274 - DNA, 499 bp, Zea Mays
ctctgtcagatataatggtctttggaataccatgcaatcgcactatttgatcaacataaatttctgcatacttctccgccttgtgggtggtgtgcactggcaagaaatgagcggtcttggtcaaccggtccacaataacccaaatagaatcatggtgcatggaggtattgggtaatcccactatgaagtccatgcaaatgtcctcccatttccaagatggtatgggaaggggttgcaaagggcctgctgccttcaagtgactggccttgattctctggcaggtgtcacactcggatatgtacttggcaatttccctcttcattctggtccaccaatataaagatctgagatcatggtacatcttgttgctaccagggtgcatggagaatttggaaaggtgagcttcatctagtatcttctttctgagctcagggtccttgggaacaaccaatcgatctccaaaccataagattcccttactgtcctgtcggaaacattt

SEQ ID NO: 97275 - DNA, 361 bp, Zea Mays
atcatatacggatattagtatatatgggattatataagtagtagtgacagaattatctaaatatgcaattatttgcagtagtagaaccttacagtttacaaatgtagtatcatgagtagcatagatattatctcacaatggtcctcgtttcagctagctgaatcaatagaattttgtttttagttgctacaaaatatttagcattgaaagaaagtatgcagtgaatatatgcaaccacgtacatgagagcggattagtaggaatatacaaatttcttgaagcaaccaaatactggtcgtaagcaaacaataaacagagggggagtaggggtgcagggttattacgataattgaccaaattg

SEQ ID NO: 97276 - DNA, 401 bp, Zea Mays
tgatgatgtgtggaagaccttttttggttgacttgtctttgcagcagcagtaagttctttttgcttttgtatggttatttggcaagtctttgtggcgtgacccttgttctctccatggaaacacaatacaacttccttggttgtgaattatgattaattaaatcttcttccgaagctttagccccatcttcctcctcttagagagctagtggtcaaaatttgctttggaaaggttgttgttgtgtccctgatgtctaggatgagtcttgaggctaattttattgtgcttgacattggctagatttgtcttcattttggtccatattctagatgcttcgaacatgtctaggatgaaatcttgctctgaagcccctagcggactctgcatatttctatgcgtc

SEQ ID NO: 97277 - DNA, 503 bp, Zea Mays
gtagcctttctctaacaactcatcaatctgcttcttgagttccaccaactctggtccggacactcgataggctctcttggaaataggggcggtgcctagaataagctctatggcaaattcaaccttcctttcaggtggcatacctggtaactcctcaggaaacacatctgggaaatctgatactaaactgatagcctctgatggtttaatctcctcaatatgagtggtgacttggtgacaactccctttccttgatccagacaagaccaattccactaacacttcttctcctgatagggacactaccttcactgttctctcgttgcaactaagactggcttgatacttggttagccaattcatccctaggatgacatctatagttgtatcctggttacccataactatcaaatcggcggggaactctatcccccttatttgaacctttgcactaggtaaaaatctattagtttgggtacttccaccaactgaactaactctca

SEQ ID NO: 97278 - DNA, 702 bp, Zea Mays
ggaagtcctggctggcgaggatggtcttaagctcgggtcttaatcctctcaggaaacgcgccattttcctggcctcggtgctgacatcctcaggcgcgtagcgggccagctctgtgaacttgtgcacatactcactgactgatcgcccaccttgggttagttcccggaattcatcctccttgagttgaactatcccttggggtacatggtgctcacggaaagctgtctcgaattctgcccaggtagcatctctgacggcttcactgaaagtgtcccaccatgccaaagccattcctgaaagctgatgagctgccagctgcacacgctgattctcagggcaagcgatggcttccatcttcctcttgatcgtgcgaagccagtcatctgcatcgaggggattgctggaccccgcgaacgtgggaggcttgagtctcaggaattctcccatcctgtcctggggtcttccaccacctgggcgctggttctccagacttcgagtgaggacttcaatgagtctggtttgatgggctagaacttgggccagatctagtggtagttccggaggtgcggggaggtgggtcccatccccttctccaccggctcctccttcagctcctaagggaaaacctgctccaatcccggaggcggtaggcgtggttttatccgaagccatctgccatgggaagagagttactattatgc

SEQ ID NO: 97279 - DNA, 668 bp, Zea Mays
ctgtcagaacaactgaagcagcccctgatggtacagtagcagaaagatctcaggattcagtcccccttgtcgccggtgacttgcgcgcccggattcgcgccggttgccgtgattcgtgcttggcacgcagtggatatccacggggaggtaaaaagatctcgcgggggagcggatttggtcgcggaggaagcttatcaccgcgcctgtagccgtgtgacatggccgggccggcggttttgctgtggaaactctggtgacctcggttatgccacgccatggctcgttattgtgtggtagtaaccgtggcacacttaggactacaatctttgagccgttgcaccggtgagcgccacgattaacccactagtgttctcctctctcttcggccgccagcgcgcgatttcaaattcacgagccactgccctcgggccctataaattgagcgtgccatcggctccgctaggtagtcacgcacccaatacagcaacccgtgccctagatcgtccaccaaagcgccccaatttgagatttcccccaaatcggtcaagaacaccgcgtgtgtgagctcgccgcggtcagcccttcacaggtccgatcatgtcctcctttctcttgttttagaatccctatgtgcttgtgatgcttctcgacccggccaattgagctgg

SEQ ID NO: 97280 - DNA, 437 bp, Zea Mays
cggtggagaaaaaggagtcaggtaaacttagattatgcattgattttcgcaatttaaatagagcaaatcctaaagacgaataccccatgcccatagccgacacattaatcaataatgcatcaggaaatagaattattagcttccttgatggtaatgccggatataatcagattttcatggccgaagaagatgcgtctaaaacgacctttatatgtccaggcttcattggtttatttgaatgggttgtcatgacattcggtcttaaaaatgctggtgctacttatcagaaggctatgaatctgatcttccatgagttgttaggaaacactgtggaagtctacattgatgatattgtagtcaaatcggctgagtttagtcctcatatagctgatttgcgtaaagcctttgataaaatgtgtcggtatggtttgaaaatg

SEQ ID NO: 97281 - DNA, 440 bp, Zea Mays
cgagccaatcgcagttcgcaggttacacatacatactcctgtgtagagtaggtacttaagtgcttacaatctgtcgggggtcgatcaagcttcttggaactgggaactggtagcgggaaaagcctgcttaaaaatatgatggcgtacggacgtcgacacagaccctctttatcggcatgcatgcagcagatctttggccctcctgcctctcctgccgcgctggctatgctatagctctgagctgagctctaagtctctgatccgacaagagtctcgagctcacgatctcacaatcctgacgatctgagattacgaggctggccggagtggagaagaggtcgaacacagtagtgtcgtcgtctgccactaggagtctatcacgattcacgagactctctgcgtgcatgcacatgcaccaatggcaggaactgctattctgc

SEQ ID NO: 97282 - DNA, 362 bp, Zea Mays
gaagaaggcggtcgccaactgacgcgcggcttcattagttagtcaaaagctgccttgtagttatctttaccggtttgccgccaattctggacgcatgtcaagtcaagaacgccgcctgcttagttgttttagctaatgcatactggagttgcattgcatgcctaatgtaatgatcgagacatatgctgctctgctcccttctggagggatatagctagatcagctagtgtggtatatatacgtagttgggtgtgtctgctgtatgacaggcagtggtgcttaaggagtgagcttcttcttccctgggatctttaggacaagtagagctttctgctgcatgctccatgaggatgtgccaatct

SEQ ID NO: 97283 - DNA, 594 bp, Zea Mays
ctgacccgttatgatgccaaataagggattgtttgacccttgaagttatgcaatggagatcccaagttcctaaagtgtcttcaggaaagtgacggtgacactgcttccatcatcgatcaacaccctcttgactcggctcctgcagaccactaggctaaaaagtaatggatacttgcccaggtgatcaaacttgagccattagtcagctcagctaaaggagatcggaatcttagaccagcgatatggcgttggtgggtcagtcatagctaccaggacttagcggtcagacaacttctgctgccttttgttctctctggagtcgtgctctctaaaaattaagttgatcactctatcgattcttagggaacatttagctgttgtcttcccatagtggtggttgtggtggtgggttatggttctgccttgcaggtggtggtggtagctctaggaatggtcggccatggccgattgagttattgaactccctacagttaaataggttatggcgcatctccttgtggtaggtaatcgaggatctcgtctagtgatctcatgttgttgttgttgccatgaggggaaccatgctaccatgcg

SEQ ID NO: 97284 - DNA, 607 bp, Zea Mays
gtttagatcattggataaccctcctctctcttacgcactcaaatttaatgaccaatattatttaaataatccttcctccttcactcgtgcctcggtccttcctctgcctctctcgccacccgtcaccctctctccctcactagtgccgccgcgggtggcccctcccctatcgtctcctctccctccactttctccttaggaccgtaaggttagtatgggtattagactagttatcatcaaagcgtgtgagttatatgctgattttttttttgggtttgacaatccaaacgatctaatcctagctagttatcactgctccttgcgtcaacagctacgtacctagattttcccaagttgcagcctaaaacacctctagggactagggttagtgtgtcgcccgctacgtacagctcacgcgcgggcgtccggttctttatttatgtgcaatcggccttttgcatccttcacatgcgcgtcttttgctccagctggaggagaggacgtggctgcggtcgataggtactatgagcatcggagagcatgtatatacgacactaggatttgaattgtttggtataccgttagcttcattgttggtccagcgact

SEQ ID NO: 97285 - DNA, 763 bp, Zea Mays
gcacaatgtaaccaatgaatgtccttgtgagcgctagaccctgatggtcattttacttgttgatctgaagtcaactactagctccaaacgatgaatggtatgcatgagaccctgaaggacccttttggataacatagtgttgtgcatatcagtctaaatcttaatgattgactgtgtatttggtaataaaaacaataagtttgcagaattgtaaccatgaagcaacttgttgttgcgtgtcttgctggaagttgagactaatccttcacaatgaaggacaaatatgtagtattcatgccactacattaatctaagtccaaagctcactgcataaaacccctatatgtaatgtgcgtaagatttcccaaataaatcaccacaatagcatacattggccacaactggatgattgtggttggggattttatctgtatgcttttagaacatctcggcattagggggaggaatgcccatatagtgtaatgcctcaatattctattaaacgcacaaaagccaaactgaacctgtcgttcggtgtgtgttcctatgtatatgaagtttgccagaaatcgttgaggagtaaccatattggtttgaatgcttctacctgatgtagatgtggatatacccgggattaatatcatatccacatttgacttattgacatttgatctattctcggggacgtctgtgaatatgatccattggtcttagttaaagcatatgttctgattgcagattcacatggtctgtgataactctc

SEQ ID NO: 97286 - DNA, 325 bp, Zea Mays
gccggacttagcacaacaagtgcgcaaaaaacgaagtctatcgcgaagactatccgcgcagaagtcgcctaaaaggtgcagccggacttagcacaacaagtgcgcaaaaaacgaagtctatcgcgaagactatccgcgcagaagtcgcctaaaaggtgcagccggaccaagcacaaacgcgcaaaaatccgaagtctatcgcaggaactgcctaagggcgcagccagcacagtataacaaaaagcagaaacaacagcaagaccaatcaatcaaccacacgaggcacaggcacgcgagggcacacaactccattttacaagccttt

SEQ ID NO: 97287 - DNA, 306 bp, Zea Mays
agaaacaaactgtagacaagcacatcaaaagagaaaaaggcatcttccttgcctcatcactgcaggaaatatgtgggtcactgcataagaatacattgctgcacatactgaagtagcgacagttgctatactaagaaattaactttttgactacacctttttcatctcataagatggtaagtcgcattcaaacatgtactttacagaagtaacattcaaacctgtattttacagcctccatgctgccaactcgatcaggtttcaggctcttgcatgacaagcaaaacctgcagtaactgtacaacg

SEQ ID NO: 97288 - DNA, 382 bp, Zea Mays
attatgcttcgcatatagtgtatgattgtgctcacgatttcgagtagacacttcaagtaagtcaagtaggtttgtgatacaagttgtgtaatggagttagttgttttaggataattattgaaatactcggttcgtaggataaacatgtatgcgttcatgatttgggaagtaaatgtgtggtgattgcgatttggagattagtggtttacggttcgtataaattggtcgatgtgcgaatatacgtgtgaatatgtatatttataaaaatattgtaatgtatatagtgacatgcaaaccgacgtgtatgttatttagcgggcaatgtcgttgctccagttagccgacctgtcagatggcttggctaagctcgtggtcatgataa

SEQ ID NO: 97289 - DNA, 286 bp, Zea Mays
ctctcactaagagaggctaggagccagaagagaatggctactagcccaacacctcaggaggaagagttggaccaggagatcagggatttagaagctatacatcactaggtgtagaggaaaagagaaaagatgcttcggttaaccgaacttcaaaggaagatcgacgaagcagctgaagaatgcgccacctcgcgcaggacgataaaggacgagggcctcaacatagagagcttcgtcaagaaacttcagtcaacgatgatggatggtatgatgatctgtaccatgg

SEQ ID NO: 97290 - DNA, 397 bp, Zea Mays
gtgacagctcggggccactctacacgctccagccctccaccgccggcgtgtctccacctcctgccctggtctccaccacctcctccaccacctggcatcgacgtctcggccaccctggacccgacgtcatgaccaagattaccagtagtctagatccttcatgtagtaggggacattttgagggtctctgtcatgcttgtcagttaggccgacatactcgtctcccatttactacttcttcttctcgggctgagcaggcttttgacctggttcactgtgatctttggacctcccctgtactcagtctttctggctacaaatactatttggtgattttggatgatttttcccattttctctggaccttcccgcttcggttgaagtcggacacattcac

SEQ ID NO: 97291 - DNA, 516 bp, Zea Mays
tgtgtttaataaaacgggatttaatgattggaagcatgcatacaaagcattacctgagcatgttggtggagtgagtagtgctcataataagtgtgttaagcattttgatgattttcaaaatcaaagacaaagcatctcaagtcagcttagtcgtgctactgaagaagcagaggaattgtatcgaatccgcttgacttcatctctagaatgttcaaagtttctaattgcacaaggcatggcttttcgtggacatgatgagtcttcaacatctttgaatagaggtaattttctagagatgatagattggtacaaagataagaatgaaattgtgaggaaagcttttagtcgtggttcaatgaattgcaagatgacttctcctgatattcaaaaagatattgcaagatgttgtgcagaagaaattgtagatgtgatcatgggagagattaaagatagaaaattttctattcttattgacgagtcacgggacatatctgtgaaagagcaaatggcagtgat

SEQ ID NO: 97292 - DNA, 651 bp, Zea Mays
caattttctggataaggggtagaaaagcacccaatttaggtctttggatacccaagggaagccctaagtaagtaaagggcaatgatccaattttgcaatgaaaagtatttgcaaggatctccattttctggtccgtgacattgatggggtaaatgttggacttatggtaattctcatggagcccagtggagtcagcgaaagagttgagcattgcttttaagaagaaaagctgtctagggcaggcttccattatgagaatagtatcatcagcatattgtatgatagggaaatccgggccacaattgtttggtaatggaagacgaagaatgccaccttcacaggccttgttgacaatagactgtaaaaggtcagcatcaagaacaaaaataagcggggacagggggtcgccttgcctgacgccgcgtcgacagtgaaatcttttcccagggactccattcaaaagaacttcagaagatccagagccaagaatcatagagatccagtggatccatttattaccgaaccccttgtgtctcaagatctctaagatagcagcatgctccagtttatcaaatgccttctcaaagtcaagctttagaatgaccatttcttttctggatttgtgacacagtgaaatatattcaaaatccc

SEQ ID NO: 97293 - DNA, 467 bp, Zea Mays
cgccagcaaatgcctgttggcactgcggagaccccagtcacttcaagaataactgcccccaattgaaggcacccaaacctacctactccaactcggtgaatggccccaagattacctcggcacctgcctccaaggcaccccctccaacagtcagcagagcaggacccagtaccagggcagagcacgagttaatcacgtcgacgctcaagaggcccagcaagctccgggagtagtgctcggtgagttccttgttgaatttactcctgctactgtgctttttgattcaggagcatcccattcatttatagccactagttttgtggaaaaacatggcatcccctctacacccctagaaatccctttggtcacccgaacctcggggtcagaccttctttgccagctcaaatgctcccaggtcagaattcttttaagtggggtagtgttcttggtagacttaactgtcttgc

SEQ ID NO: 97294 - DNA, 410 bp, Zea Mays
cgattgtgggggttcagtcagtcatatcccttcatctatataaagggtggaggtctagactcattacaagttggttcttgagttaatcacacaggttttgctaacaaatcccgctagaaatacagaatcctaactgacagtctagaccacggaccgtccagcccgtggggcggacttccggctacccaaactagtgctcaacatatgccccctgccttttggtggaggttgacaaaccaaaagcatatgcactgctagcacccttcaagaaacagtagatctcataagtcatcttgttctcggagtaagaactaagcctgatgcaagtcaccgacttttcaatccaatagggtgatcattcaatagagctctaatgcacaaaggccattttggattgcatctctctcgtc

SEQ ID NO: 97295 - DNA, 459 bp, Zea Mays
catatatgatctagcaccaaatcatactggtctacaacaaacaagcttgtgcaaatatataagattcatttagtgcttgtataggatctaaacattatgtaaagtagggtgcagggtggagacagtggtagataagagtaactcggattgatcacatgtgatataggtgattgaactagattctcgatggaaggctggccctatcctatcctccaaaggagttcagtgaggtagcccctttttcctcatgcttcacaatcacggtacagatgccaattggagttaggaggagaacagcttggtagtcaaggtaaataagacaagggggagtccagctactagcattaccacttttcgacagagacatggcaatggcaagtgatgtggatagagccaactaccaaattggtacaataaagaaaataagatatatttggatggtattgaattctatatcta

SEQ ID NO: 97296 - DNA, 299 bp, Zea Mays
ttagcttaagaatagtagaggcatgttcattacaagcatcaatgttagtatctttgcacttattgcagataacaacatgctctacagatgaactagcaaaattcacttcttctaacttagcaattaaaacaacatttaacttcttaatcttagagatagaatcattgcaagcagacaactcagaagacaatagttcatttttcttaatttctagagcaagagatttttgaatattaatgaatttatcatgttcctcataaagaatatcttcttgcttttctagaaacctatcttttcat

SEQ ID NO: 97297 - DNA, 695 bp, Zea Mays
gttgactttttgggttgggtggtgtcattcaagctgtctgagctggcggtatgaaccttgccattttgctcagtggtgatggttaactgtttatgcttcatgaggaggtccccgccttgtggctcgatggtggattttgggtaattgggtggtgcgttgtctacggtgatgactacctttgcctttttggcagcgaaggaagcccctgcttcattgtcgtcgactagtgaaggagctcggtgttcttttggggaggcattgtgagttttgtcttcgtcgcacaaacagtgggcgccacatgttgggtactaacacgtggtcaggtgagcccaaacactcggagatgaaaggaacgagctcaggtgtatgataagatgtttggtagagaactatagcgtctcgttatgtgtgtcccgcctagctacaggacaagggtatttataggaccagccggggataggtggtctaaagtacgtccctatccccattcaccaactatatccgaggaatattcagtgtaacaaggtaattacaacactgtattccctaaatgaggcgcacactaaataatacacacatacattacactaacaagtgggcctcgtagaagcatcctctggtgcaccaacggtgggatagtcgccttgtagccttcgctgctacctccggagtcttcatgactcggtgcccttcgc

SEQ ID NO: 97298 - DNA, 367 bp, Zea Mays
cttggttaatctatccacaatgacccaaatagaatcgtgatgctgggaggtattgggcaatcccacaataaaatccatgcaaatatcgtcccatttccaagatggtatgggaaggggctgtaaggtgcctgctgacttcaaatgactggccttgactctttggcaagtgtcacattcagatacatacttagcaatttcccttttcattctggtccaccaatacagagatctgagatcatgatacatcttgttactgccggggtgcatggagaatttggagaggtgagcttcgtccaatattttcttcctgagttctgaatttttaggaacaaccaatcggtcttcaaaccatagaactcccttggtg

SEQ ID NO: 97299 - DNA, 616 bp, Zea Mays
aatccgtcgacttcaagctctccgctgagtgtggtgcttccgccactttcgcgatttgctactctcagagccgctaaagaaatggcttttcacagagttgatcctgcgccgttcctcccccatggctttgtggcgcagcaggtcgatcatcgtgaaatcatggtacgtgatgtgactcgtcctcaaccctctgcgcatgaagattggggcattgtgcttgttcaacctttgccggagcatgaggtcaatttccacatctttgatgatatcatccgtgagtatcttgtgggggtccagcgtgttcaagtcaggagcattcagcgctcccatttgggacaggcacttgtgcgattcaggttcgcgtttgacagggacaacttagtggcattgggtccacagcaagccttggatttttcttttactgtcattcgacacaatgagggctggaatcagcgtgccctaacctttaaccatgaatgttggcttcttcttcttggttttcctctggacttctggacgcatgaacacatccaaaatgcggtcggagcctttgggagggttctcatgtgggaccctgacccaaataatgcaactagattgttggtccgggcacgag

SEQ ID NO: 97300 - DNA, 710 bp, Zea Mays
atgaaaacaccaaaatttcttacaggaaagtggtgacagaaaagacatcgaatggaggggagacatcgaagatcaccatcacgacctccaacgttggggggcaggcgcaggcaggcggtcaggcacgaccccctgttctacgcaccacggatagtccgacacatagacacgaatggtccgggacaccgttgaatagtctgggcggttctggcagacaggccggtagtgcctaggagcagcgatgaccacgtaccttcaaaccttggaccagtcagaaataggtacgtggaatacaaacatgtttaaggcatcctgtcaacttgtcaaagtcggtccgacctttgatcagttattatctaaatatgtgaaaaagaaggtcggcccaagtgactggctagcaaagcgacctcgctcacctacccaagagcgacgacaggtaagaccaattggtcatctcaccaatcggaagagacaacacatcacaatattcatttaagacccaatgtacctacatagacacctccacccccatacacacctatgacatatcagtatgcatacctacctccacattataacccaaatcaaatttggggcatgccaccatatccatatgggatgccacaataccctgcttgggggcaccccaaacttctatatatgataggttggcaccccccagtgcaaggtcgattgagtgcacctcaatc

SEQ ID NO: 97301 - DNA, 532 bp, Zea Mays
ggcagcgtttatctgaaaagttcccggagctttggtcttttgcctctatcaaagagattagcattcgtcaagctcggttggcgtccccgaatgaaatgttccatatccccctctctgctgaagctttcgagcaacttctctcacttcaggacgtccttggtaatatacagttgcttgatcgcaatgattgttggcgatgtaatgcctcttccaatcggttttcttctcagaaggtctatgctcacttgactggcacctgtcaaacgctccctctcttcgtttggttatggaaatctaaatgtcaacctaagcacaaagttttcttctggttattgctcaaaaatagactgaatactcgctcccttctcaggcgtcgctcaatgcctttagactcattcacctgcgacaactgtattctccagattgaagaaaggcctattcatcttttcttcaggtgcaactttgctaagagatgttggcttcttttgggtttcctcccgccaggttctatggatcttctgcataccctaat

SEQ ID NO: 97302 - DNA, 502 bp, Zea Mays
atcattgcctctgctctgatagcctacattggcggcaccaaggagttgattagccttacctccttagagtcgcgacatgacaaattgcctaccaaaagttgctgcgaaaatgctgaaggataggctttcgaagtcgggctacattgagatcgggtggtcgactctgaaagagaaagatttgaagtccatgaggagacttgggtacttcagtaacagagtgaatgtgcatctcctggggatgaaacaatgccaaagccggggaaagatgaagttgttgtgtacaagagcttttcaaggcgggacttcggctcctaatgtaaatgatgattgcgaatgtgctacaaagttatgaagtgtttatgcactagctgactctgaatgccatggttcgactaagtgtctttatcttggttgttcaaagccaggggcgtatggatgccgatgcattctgcaaggctcataatcttcattatcagacgaaggccaaagagggattaggcct

SEQ ID NO: 97303 - DNA, 682 bp, Zea Mays
ttgacgcgaggaggtgattcctccctcttcttgttgccggactctcccgatggagctttcctatggcttgtggcgggcttctcgccagtcaccatctccttctttggcgtgagatggtagagttcatcactcatcaaaacatacttgaaagttgtacgcgtgaatgttcttatatgtcctgacattgggatttcataaataattagttatgggcgtcctccaatcacttgcatcggcttcattatcagccgaatcgattaggagaactttcctggtaaccccagacggtccgacgtcttcacgcggacggtctgcgacctaggaattggccctacaccggttatccgattttcagtgttgtgaaatctccctcgctttatccgataacctgatgcatcttgtgccaaattgttagctctatgattctcaactctagagatatgccgaatactgaattcgtcaaaagaatggattatgctccaacattttcaaggtaactatttagagtaccatcaaaacattgatattcttgtaacacctgttggacgaccagctgagaatcaccaaatgcttttacatgttttactcccatacaatttaaaagttccaagccgaataaaaaggcttcatattcggcttgattgttagtgcaataagttttcaatcggctagagaagtcgaa

SEQ ID NO: 97304 - DNA, 2026 bp, Zea Mays
gtaaattatagagcacttaataggattgcttgctacagaagtatcgagtgtcagctttgtctcagcacataatcagtaattgcccagtccaataaatagttgtactattttgtgtttcacttctctgaccattgtttaaaattgttagggcgcaagggatggcatatcaccctggaacaccgatacacgatttgcttgcagaaatccatacaatactttcagaacagatggttaaactccttgcatctttttttcccttttaggttggagggatccgttggacatggcacggcctgatgtattggacacacttttcgtggatgcgtgtttcaaagaggttgagaacggcatctatgtagcagaattcactcaccttttttggcagaatgttacaaaatccattaatgaacaaacgaatatgactattccacttaagtatctgcaaaataggtttaaatacttcaaagaaagagatttcagacggattgtaattcactcacctttttttgctagtctattacaaagaaagcaatatacaatcatcattactttcagaagatagaaaaacatgtaaacagaaagaaaccaaggttgaacacagtctccatgacatgtatttgcttttagctggcctcttagattttaaggccaaactagactagcaaaaaaacacaggaacaagataaataactgacatgactacagaagacctaaacaaactggattacctttaaggaagagggatcagattctaatttccaggttactggtaggaaactgatccatcagattttaatttcaggttccttccaggaaactaatcctttcctcaagagatttcagacgggagaacgtggtcagattttgatagtctttaagtaacttattggctatacaaaattttaaagtaccacctaagatgtcatggtctttaagatattgcattgcatcttcgtgggtaatgtcattttgtaatgactgagccaaatgaactttcgagctcttctgccgaacatggctggaagaggtctcgtcaatgctgcgcttcccagtacttgcactacttaagttcccacatctaatattggcacgatacgcaggtactgatggtgacttatgctcatcacagcttataaatatatgtgtgagctgatccaaatattgcaacatacgttcgtatttacccgattcaagttctttttttatctgcaatggaaagcgtcagttagtgttaagttctataaatagagaaagactgaaatgttcaggtgagatacctcttcaagtgagagctttatcgggcctgcgccacttgacaactgtcgcgtaagcttattgtaccgtccccacaaatctttgaaatatttaaacctattttgcagatccttaagtggaatagtcatattcgtgtgttattaatggattttgtaacattctgccaaaaaaggtgagtgaattctattacatagatgccgttctcaacctctttgaaacacgcatccacgaaaagtgtgtccaatacatcaggccatgccatgtccaacggatccctccaacctaaaagggaaaaaagatgcaaggagtttaaccatctgttatgaaagtattgtatgggtttctgcaagaaaatcgtgtatcggtgttccagggtgatatgtcatcccttgcgcccccaacaattttaaacaatggtcagagaagtgaaacacaaaatattacaactatttattggactgggcaattactgattaggtgctgagacaaagctgacacttgatacttctgtagcaagcaatcctattaagtgctctataatttaccactgaattccaatattccacaagaactaaaaaccctaggacccaagaaccctactttgtggtcagcagatgcgaaggaagaggaggtacctggcaatcgactggaccgacaaggtgaagaccgagtcaaacgagaactgcaaccggcgatgcgacggctgaacctcaccaaagagccaccaccgatccagcaagaatatgggtcg

SEQ ID NO: 97305 - DNA, 605 bp, Zea Mays
aacaactgtatccagcggtcgcagaggtcatcgccctcaaactccagcggacggttagctacccctagtgacttatacactcggcggaaaccttcgaataccactgggcgttagtctgcacactcggctcaaagccctccgagcagagccgttggacaaatagctccttcaaagcgaagtccttaacatggccatctccttaacatggccatctcctttcgtaggaactcaacctcagcctcaacaaactttgccctctttgtctacttctcgaccttaatattatttaacatcagcctcctcctagcctccacacactccgccttggcagcaaccacttgttcctgggattttgccacatgggctagcgtgtccgcaacaacagcaagctagtagagaaaatgccccatcagtgcaaccccaactagaggaggcaactaaaaacaaaaatactcaccgtctagaagtgcgaagcaaccctctcaaggcactctgagatattagagtcatcagcccgacccttcgttaggatggaggcatacacagcctatcaggcttcgcctttgaggtttccctagccaaagtcccttggacggccaacgccc

SEQ ID NO: 97306 - DNA, 271 bp, Zea Mays
taagtgtagtgatcttttacacaaagggggacgacgggttgatttggcataaacccgagggctcttttgtaatatcaccggccgaaggggtaagcatgattcctgactgatcagattagatcctacggcccggattcgatcccaatttggtacacgattgcagccactcgatcagaaactcgcggcccggattaaatccgcccaattctgaaccggtacgtaatagcggtcataggattgggtttcgatggcttcgattgtaaatacccag

SEQ ID NO: 97307 - DNA, 986 bp, Zea Mays
aataacttgaaatttgagatgacagtacctacagcaaaatgtttcttaaggtagtattattggtttctgtaataatgatcatggacatactgatactaaatacttttgttcatgtcaatataggagatttgtacgtgttgctcaagttcctgacaaggtacatgtttcactgttttgcagttcctaccaattccatgtgctggttgatttttttttctttctgcagggctcatctctgcatcttgagttcttagtcaactacatttgtgagctgtcacttctggagtacagcttactttgctatttaccttcaatggtagctgcctcttctgttttcttggcgaagtttatccttatgccaataaaaaacccatgggtatatgtccccaaccttatattttatgaatcttcattgttaaactcgatgtttgcattcttcacccccaaaacataaataaattttgatgcttgcattagctaacatttgcatttattcttgatcgaaagcagaattcctcactttcttactacacgcggtatacaccatctgagttgcgtggttgtgtaagggtactgcaccggctcttccgtttgggccctggaagcaatcttcctgcaattagagaaaaatacagtcagcataaggtgagccttgcctcctacataaggtgattgccgatgagaatcattactttggtacctactctgatgctaaatgccctaccctttatctgctcagtacaaatttgtagcaaagaagtactgcccacagtcaatccctactaagttcttccaggatctgacaagttagaagccaagattacttctagttactcaatgaaaccttcctgaggtacttagtgtgatactatgatattgatttgacagatagttttgaatgcaaggcatgcgcgcggccttgcgtttagcagataaacaggttcaagtaaactgtatgtcacttgtggcaatgttgtttcagtgtt

SEQ ID NO: 97308 - DNA, 2353 bp, Zea Mays
tgaattaaacttagtggctgaaagtccttaacttccaaagcttctgctttcttaggcaagagagcaacatacactgaattcagaaggtgaaatctagagacatctccctgcatcagtctactaaccgcagccataaaatcaatcctaattacttgccaagcagccttgtaaaaacggcttgtatagccatccggaccgggagccttatctgagggtagggacaagatgatagtccaaacctcatgctcagtgataacctgttcaagctcagcaagatccatgcccagctgatgaaaagtgtcaagcttcagagttacatctcttgatcctgcagttcctaaaagactgttatagaagtcccagaccgcttctttcttctcttgctcaaacagcagtctatcacctacttgcagcctggtgatgaagttatttttctttctatatctagcatggtggtggaagtaggaggtattagagtcaccatgcttcaaccagcacaagcctgatttcacacaagccatggttccctcccaagacgccagtgcaagagaatgatgtttaatacgatgcctaagccattcctcatgccaagacaaagctctaatatctctagccatctccaacaggtgcagaatctccttggcatacaaaatttgctgcttaacatttcctgtttttttctgactccatgattgtaaatgaccagccaacctcttcagcttgtcagcgaaacattggaaagggcactgcatatcaagaggtatggaccaagagcgttccacctcatccatgaagccagggagcttaggccagaaattttcaaagacaaaacgtcgcctaccttgagtgaattcctgcagtcccagaataagcgggctatgatcagacaacatagaggccgagctttgcaacatacagtctgggaacaaatcctcccaatccaccatgaagaaaaccatgtccagccgcaccggcatcggagcagcctgctcatttgactaagtgtatttccttccatgcagaggaagctcgataagatgcagatcattcaaaagcctttgaaatctccccatcattgccctattcaggttgttgttattcttgtcttcagcgcgataaatcaagttgaaatctccgccgatcacccatggcccaccacaaagagaacgaatagcttgcaactcttgaagaaattgaaatttgagttcatctgattgggggccataaacacccgtgaaccaccagctggagccatcagcatacacaatctcaaccgtgaccgaaaaggagtccaccctggagttgaggattttacatggagtccctttccaagccaataacaccaccccgagtgccaattgcagggagataaataaaaccatcataatcactaccaagagtagacaacaccaattgatgagaaatagattcttttttagtttcttgcaagcatacaaggtctggacaggtagagtcaatcataacccgcactgcatcatgcctagccttcttgttcagccccctcaaattccaaatcagtatttttgataaatccattggaaaaacaatagaaaaaacaaccggaaggagagggagattagtacaagtcctccgggttatatccccagagacaaccagcacctccagagcagcgtcgacctcatcaggaactgaccatccgaacagcgccgccagagcaggaatatgtgactgatagagtggtttagtgaagagtcttccatactcgtcaagggcttcctgactgaaagcctcactgtcaacagatatgcccagacgtcggccaaggtctgcctgaatttgcctgcttgcaatgtccaaagttttattaccacgcttggctatacgagagctccagcgcggcacaaagtctgaaggtagctgcttagttcttctcttctgaatgcaagggtagggaagtaagcacgtgactggcttcgttacactggtcacaaactgttgcacaggagtggcacctacatcctgggaaggagcaaaatccacggaaccagccgtcaaacaaggaaggagttggaaagaaaccattagcccgcctccttccatacaccaaataaccatccaccgtcttcctgcacctggcatcgttggtcagcctcgcatgttggggcgaggacagaacagacgtccccaacgacccatcataggcgggaccagacaacatcacggccttgcccgagcgctggggcgaggacggaccaatataaaaatgtgattgtgtctgtctgaagattcccatgtatagttgattttttttgaatgtatggccatcggagattcggtacctgtggatgggcaagatattcatagcaatctc

SEQ ID NO: 97309 - DNA, 278 bp, Zea Mays
aaagaattgagaacagattctctagcctgtttagctaatctatgtgccttatcgttgaattgtcttggaatcttgtagaattctgctggttgggaacctgagatgtttatgatctcagcaattgtgggtcaaatcctctagtgtgcaggtttcttcaccggattttcttaagtctttacaggcagcttgtagtccgatttttgcatctttgatttggagagttttagaagggcttggtgcagttgtgaaagtcatcaggtcatgggtttcaagcagcc

SEQ ID NO: 97310 - DNA, 557 bp, Zea Mays
cgccagcacatcttcacgaaattggatgccatcgccattggagcctataaattgccgaccccgcctgctccgctacgtaattgtgcaaccagtgaagcaacccgtgcctcgaatcatccactagaactccccaatttgggatttcccccaaatcaacccagaacaccgagcggtataacctcgtcgtggccaactcgattcaggtccgatcttgccctctgctttcttatttcagcacccttacttgctcctgatactcctcgaccaactcaattgagctaagctaccttagatcgccgggaacgcattagaatgtccgttgatcatacggtcaccgtggatagagcaggttagagcgcagttagtgaaattagttgaggggaaactcttgttagggttcgaatttggtctcagccatagtagagcaccggtcgttgcgtgaatcgaccggcacaagcttgctggagctcggccctgcgctgttcgccatcatggacttcgggctgtgaagaaatagaacatgggggatgtttttgtaaactgtcagtgactcgagg

SEQ ID NO: 97311 - DNA, 324 bp, Zea Mays
tccttgattcgggagaggcaggagatgagtttctcctcgtctcgcgaggtcaggtcttcgcttatcacgatcgtttgcttgggcatcaccggatcgaggggtattgtcttcgttccgtcgttgctctgtagctgcgcctttactttttcgtcggcgactgggcgggtcacttcggggacttcacgttgtgttgtaaggcattgtacgttccgttggcctggaacgaagtctctctcaatattacacgcagtctgttggttgacataaactgttatcacgccttgcggacccggaattttcatgcagaggtacagtccatgaatg

SEQ ID NO: 97312 - DNA, 572 bp, Zea Mays
cacggacaaggattttatatgtgcttatttttgtagttagaagcatctttttacgaatagaagataaataaaaataaaacttctatatcatgcttttattataattgtgcatttattttgaaattggaacgtagacctaaattgaatctggaatagaaaacagaaaagaataaataaaaaaaagaaagggagaaggctagaccgaattgcccaacccattcattcttccctgccgtcaacccaccttcttttcttcctattatttatttcctaactacaaaactatctcatcaagacgccatgatgttgttagctcatttacaactagtgccgcttacatgtagggccatgtcgtcagctgcatctcctctggatccaacagatcgcacctgcctgaattcgacggacgttggatcccttcgcaacccaccctcgcataactgtcgggattctagctagtttgttaggatccgcccaccgaatactcaaacaagggtcacgatgccggttccttggacccgttttcctctctacagccgaactcgagccaccaacgccttcgccatcaccct

SEQ ID NO: 97313 - DNA, 583 bp, Zea Mays
tcttgtcacaactgacagtggcttgatttctgtgtagtcaattcatccctaggatgacatctaacccttaagttcccattactactaggctagcggggaagtctatcccctttatttcaatccttagattaaggcaaattctatcggactgaacttttcccctaactgaattaactcttaaaggtgggatcattggttctatggggatgttatgtgattctacccaagatgtagaaacaaaagaatgtgtggcaccagtatcaaataatacttttgctagataggattcgactagaaacatacctactaccacgtcctgagcatcctggattgcttcggcctccagttggttcacctttccacgattgtaggcctgaccacggcctcctggtgcttgctgtggtgctccttgtcttgctggggcattgactgctggcggctgctgagctgctttctttggacagttcttcgcccagtgattttgttctccatagtagaagcatgcacgacctcttacttgcgctggagctgcttggccattctggttgggtgctggggcaggaaggagagctgcctagttatt

SEQ ID NO: 97314 - DNA, 343 bp, Zea Mays
gtctcggtgggcactgaaggaccagcttcggtttcatcttgaacttgtatagcttcggcttctgcttacctagtttcgatttcggcctgtgatttggttttagttggagcgactttctttgcaggagcaggtcttagtgcctttgtagtctccagtacaacatccagcacattcgccatccttctcctcttgggagttgcgacataagccttttgcaccttcggcagtgttgcctctgatagaggactcaggatttctggcattattgtcactctttccacctgtggctctttggccttattatcttcagccttggctggctcaactgtagttatcttcggta

SEQ ID NO: 97315 - DNA, 1611 bp, Zea Mays
tgtatcactgtagtaccgactaccaatcaaattattcaaatagatgtagtaccacatacagagggagagaatatcagggtgagaaatatttgttgatatgtcatttgctacatgttacaactgatatgcctggcattctgtggtgcttcattgttcagcacgagcagttgtttctttgcaggaccactgacaatacataataattcgtttgtagttttcaacttttcatggggaggtggcccatgttttagttgattaggtactgagcctgttctgtcatgtgcagctcatgtgtactttgcaggagtcatgacctcatgggacccaaccctgagatgagatgttggggatgactatgaatctatgatgggctgatgactgaccacatttgaccaattctttgcaaacatgagttctctgttagaactatatattacttatgatcaggtataaaaatagaatcctagagatatagttggtttagacctactacaacttaagtaacaaagtcctacaaggacatgtaacaattgtgttgactatatataatgaacatgggcagcaacctaagggcttaagatcttaagccgttccaactatttccacactatcaatcaagcattgctgcatgatgagatttgttgcacagttcggaatagttgaagtggctaaaacttgatataattaaaactgatttagagtcctagtactattcaatgtggcaccatctctttgccactcaaaaaggcgagcatattagcggtctttatattgggataccatttgctatataagacttataagtgttccagtggacagtagagtttgggtgttttttaccaaagaaatggaatggagtgccatttgtgacatgcagaaaaggtagcattagggaacatttggaccatgtaaggtgtattcagggggtttgaggcttagtgatgttagtagtaggtatgatgaatatatgacagatgactggtttatgttagtcttgtgtggctgctcactcagagtctacgccggaactgtttgttgcatttgcatctatgtcctgcacactcctgcacactcataggtcttgtcaccaagggctgtcttactatagcttgctcttaaggccatcattgtgaactaccgcatgcactgcacttgtcaactattggtacatccaactgttctgatataactatcttcattaatactgaatatgaaactggaatttaccacttgtttcttagtgtttgtagcatatgaatctgatcatttcctccatgtcacttttacaaggcctgctctctatttatagaatctatttgtggcaagatcagcacatgattctccattttctttatgatatatttatattcacaattttgtgtttgcttccatatatcaagattacggcagtaacacaataagctcagttagtggaagctacttttttctttaccattgctgtaaaagttgtattatcaaaggatttgaaagatgcgaaaggagacatgtcacatgctaaaattattgggtaaagcaaaaaatctggagcaactccagatgatccaaagttgtaggacagttttgatgtcagcggagtcttttgatcaatgc

SEQ ID NO: 97316 - DNA, 307 bp, Zea Mays
gaaaaatgccttgccaacatttgtgtgggcgatgagtaagactttcggggacctgattagggacaaggtggaagtgtatgtcaatgacatcgtagtcaagactaagagagggtcgaccctagtggaagacttaaccctggtctttgacaagctgcgggcaacatgcaccaagctgaacccggacaagtgcgtctttggtgtctccgcaggaaagttgctggggttcctggtttcgcaccggggcattgaagcaaacccagagaagatcaaagcgattgaggctatgaggcctccggcccgtatcaag

SEQ ID NO: 97317 - DNA, 380 bp, Zea Mays
ccaaaaatttcccgagactacgacgacaaggcgtcgatcctaccacgcacataaaagcatcacaagcatatttacggaacctatcggttaacttgatcgacacactacacatgttcttcgcccttcaaaatttatcgcacaaccgaaatcatcccacttgctactgacaccaacaatgcttattgatctatcattcacaacacgaacatagttacacgccgcatactagtttctaacataatcctcacataactcgtaattcaactactcagtaacaataaatcacgcatgacaactaccacatcgaccggttaatttatttggacaccgcctgcctagcgtaccactagtatcccgcattttgactcgacttataaaca

SEQ ID NO: 97318 - DNA, 411 bp, Zea Mays
caacagtgctgaaggcaaaaaaagttctgcgataacccctagaaggaaaaggatggtaaatgttttagacatttttggaaacaacagactccaaacgccgctcttccataaagaaggttgccgaaagcgccgaggcacaggctgaagctgatactaggcagataaaagataaaactgcagcaattgaggatgggaccgaagccaaacccacagtgcctgttgagacgaagcttgccacagccgagcaaggggccaaagaagtacctccaaatactgatatagcttttgagagaaatatgggcaaagaagccaaatcccctgctcccgaagcaccttctgaatatcctgattatatcattcgacatgcttcgggaaaaagattatctgaggaagaaatttttgaagctaaac

SEQ ID NO: 97319 - DNA, 510 bp, Zea Mays
ccgagggttggtactccaccgggcggaggctcgtcgatctgcgaatgagcctatcacatattttactgccagcggagggtccgctcttctccaggacatccgattccagaaccctacattacgtattcgtgatgctaggatcgatggtaatcgattcttgacccttcagcatgtggatttttataactctgtgattcttcccaagaagcatcatcctattctgcatcaaagatacatcaactgggaaggatgtgaagctattggatatccagaaatgacacaggctttgagggctgtgagaggaagaaatgaagaatataatgaccttccaatatgaatggaatgatgaggtcattgctcagttctattccactctttggatcaagctggccgatgaggaaagtccctttaactttccttatctaaatttctatatcgaaggcagctggtacaaggtgagctaccggaggtttgctcacattcttggattctctgatgaagacatttctg

SEQ ID NO: 97320 - DNA, 526 bp, Zea Mays
gttaaactacctttgtacgatttcttgcaatgtttacattgccactcctttgttccaccaacattttttccactcggaacaccaataatattaatttcatctagtagtggatgtctcataccagtagccgcagccgtagccccatcttcgtcaccgctgtctgcgtcaccatcttggatatctacaggcacctcttggacgacttgcacatcatcatcttctttttcatctgcacactttcttttgcttgaagaaccaaaaaccatgtctgcgactgcggtattcagactttgagttgggctgttgtggcactgtgcatcaatgaattgtgaggaggtctatttaaataacagcgaagcctgtacgcgtccaagtctaacgcttcagcttcctacgcggcggcggccggcagtcccactcccagtccattcctcttcctcatccccactgcaacgcaacgagtggccgatagtcccagtatattcctcttcctcttccccactgcaacgcggcgagcggccctaac

SEQ ID NO: 97321 - DNA, 494 bp, Zea Mays
ggactcatttttctcgttcatagttgttaaggtaggaatattgtcgttggcatcatttacttcatttccattggggttcatcatctagtcagatggtaaaagagttagtgagacagactgcataagaggcttgcatgacattaagataaagagctaacacaacgttttgatttccaatattagtcaaggaataagggtggtttcatatttctcctagcttcatcatactacaagagcgtacaagtgttataatccttaacatagatccttttgaatcttacaagttacagagcatgatatccaaatcatctttctgatccaacagtatttctttgagcacaaattgagagaaagacttaagcgggattttagggaaactagagtatcacattttttgcatatagcagatgacaccacactttattttctttataaagaggcaaaacacaataggtgtgaatgattctccaaatttattcatatatcacttagca

SEQ ID NO: 97322 - DNA, 887 bp, Zea Mays
cgcctaaggtcggctcagacatggaggagaggagaggaagcagagggcagcggaaggaaggcctggatcgaattgatcctggtcctccgataccatgtagagagttggtttaggggaaagcaccgcacacccaatcaggtgggtgacttctcatatatatagccaagtggcctggtgtacaaggatacaatctcctaaactaggaaggctgtcacctatacaaggtaaggctaaactaggaaggctgtcacctatacaaggtaagacagacggctatagatatatgcctacaaggtaagacagccggctatagatatatgcctaatacccggcaactgggtcgctggatccagctggcgggaatcgccccagccctctgatgctttactgttggaccaccttcctgggccgccggagacggcccgccctcatgtcgtctcacctcagcctgctgggtcgctagaaatgcatgagttggggcatgtctcgccccagttgacacttgtgcccctccctcctgtctcgccttgacctgctgctaagtcgcatgcgacagtgagaagagtggagagcctccacccccccactccctgtcatgcagacacacacctccataaccaaagtctatacaagaagaaaacagaacccccttcaggatcaagatgtggatgttggcttgacaggaggaagatgcaatgacttgggcaagaatcttagcgtggactttgccctggattctcaaactcataccaatcaggaccaagcttcagactgctgcatcgatagtggcattgatgcttttatctgcaagatcagcaggaagacggcagggcttctcccagctcccaagccttccctgaagactgcatcatctcaggtgattaatg

SEQ ID NO: 97323 - DNA, 620 bp, Zea Mays
ctttactgattaccaggttcgagtgcatgttcacgtgtgtgatggatgtcgtaaattgttttaatgtagatcacaatcatgttgtcacgtccgagaagtcaacttgaacgttgaatataggacaccatcaaagaaaaaatatatacttaaggtgataatttatatttgaattttcatatagtgcatcatgcatcattttattaatgacatatactttgcatctttctagagaggaatgtcatttgacgatgtagaatctgtagagaaattttataaggaatatgcacatgaaactggtttttatgttcatatagtgttttttgtgtgcaagggcaggatataaattaaaagaacaaactaaattcacagattcttctaggaatatgcgcagaaaaagggacacacgatgtggatgtgaagcttatatttatattaagcgcacaagtgaaggcaagtaccaaataacaggtctacatgagggacataaccatgagtttgtgacacccagcaaacgccacttacttcgatccaatcgttgtgtcagtgagcaggtaaaaactactcttttcaattgccataaagcaagcataggcacttcacaagcatacatgctacttcaa

SEQ ID NO: 97324 - DNA, 608 bp, Zea Mays
gtgccatattcaaactagactggtagatgttattataagaaaattctgccaaggaaaggcacttgtcccaatttttaccatagtgtagcacacaggctcgcaacatgtcttcgaggatttggttcactctttctgtctgaccatctgtctacggatggtatgctgagcttcttattgcacgggtccatagtgattcttggagcttctcccaaaagcgtgccacaaacagtgctcctctgtcagatacaatagtcttcagaattccatgcaaacgcactatttgatcaacatagatttctgcgtatttctctgtcttgtgggtggtatgcactggcaagaaatgagatgtcttggtcaacctatccacaatgacccagatggaatcatggtgccgggaggtattgggcaatcccacgataaaatccatacaaatatcctcccatttccaagatggtatgggaaggggctgtaaggtgcctgctaccttcagatgactggccttgactctctggcaggtgtcgcattcggatatatacttagcaatttccctcttcattctggtccaccagtacaaggatctgagatcatgatacatcttgttactgccg

SEQ ID NO: 97325 - DNA, 1060 bp, Zea Mays
aagatgtgaggggcattattcaatgtcccatatggtcatgcttcggcatcaggaggtcgtccattgcaattgggaacgaagtgcagatgtgcttaatggctttcaacacagtgtgcacctacattggtaccagggatttggtacatgagcacattgcttacaaggtgtggcctcttgtgaatgtttgggagatgccgaaagaaaccgctactggcactagccaaggtggcctggtttatctaagatacaccttctgatacagaagctaatttgatgagccgaatgacgattggctagaggctattgaggcaactagtgatgagcttttgggagcctacacgaaagcagaggatgaaccatgatcattgcctttggtgctcgagggaaaaagagactgaatagagtttttgatgtaatcaggtttgtttatcttggctattgcttccctgcctgaaaacaagggttcaagagaaaaatggcaactctgacctcttttggtgagcagaagccgaagagagccaaggtcttgactcataggccgaggctacattccgtagaaaagactgctgaggtgcctgcgacagagaaggtgaagtttattgaaaatgccgaagttgtccccttggctacggaaacagttcctgctatgccagtcgaagctagtgtcgatccggtaaaagagtcaggaccaaagaaaacaacagaagtatagccaaaactgctgagtctcccaactgtgatagagttgtcgaagctaccagctactgcaacaacgactagtgttttggatgttgttttagaatccacgagaacgccgactcctgcttctgccgaaggttctggcgagaaaattgaagatgcaagaggagtggtctctacgagcgcttcttctgttcatgctgaagcgggaccttcaaaagctacaccagtaaatctagtgggagagagtcttctagaaaagcccacaacacctgttcccgaagcacctccgcaaggtgatttgaactatattgttcgacatgcttcaggaaaacagctgttagcagagcaacttgctgaa

SEQ ID NO: 97326 - DNA, 494 bp, Zea Mays
gtctttcgcatttgtgtattttaatttgcttatgtctattaaaattaaattaaatatagtgtgttcgagtaaaggattaagggatacggtagattacatatttgtaacaaaaatactagatgcacgattatctttgctcataaactttagatttttagtcacactgtatgtgttcgtatgcgcgattgtacacaaattgctagtcatactagagcctcgattaataaaataatataacaactatgtccactataaactaaatagtagaattaaattggtagagtaattttgttctattaaatatcgagggtatgtgactttttaaataaggttcgtaacgtctactataattttcttttagaaagaaataataaaatattacccacatcctttccggtagaaatacaataattaattggttaattttctagattctataaagtttgaattagcgccatatttatgtatttttaaataaatctatatagtatata

SEQ ID NO: 97327 - DNA, 517 bp, Zea Mays
ctcgatgtagacgtacgggttgagcagtgtcatgtagtcgtcagcatccttcatgtccttgtgtggttcatcctaatgctccagacgtagtacctccgaggtatccacacatatagggaggaagcgtcgcgtaccgaatggctaggttcgcgatggtggcttggcgagggcgagaggggcgtgactgctggtttgctggtcgtgaattaggtttatccttaagcatgcccctgcccctctttatatagacgttctggtgggcttctgactttgaggcccatcaacaaccctaacaagcagtctaatttcggattcaaaccgagttaggcttccttctgcttaagcgtatgaccctatgggttcacgtacacatagacgtggcccgagtactcttacttggcctaataattgatagcgacctctagcaagacgtgacaactcctatgtgcacgtaaagatcatattagacgaaccattacaacattacgtacatattgttccctttgtctttcgatat

SEQ ID NO: 97328 - DNA, 300 bp, Zea Mays
ctcgcttgtatatgtgtgggggtttgtacgatgacgttgtgcgccctcgcgtgcctgtgcctgtgaggacgttgtgtgcccttgtctggtatggttggttatgctgtgctgttgtgattatagtcgttcttagcacggatggtttgatgctatcgtttctgcttttgttgtgctagttcggctgcgcccttaggcggcttctgcgcggagtctttgcgatagacttcgggttttttcgcacttgttgtgcttagtccggctgcacccttaggcgacttctgcgcggatagtcttcgcgat

SEQ ID NO: 97329 - DNA, 295 bp, Zea Mays
ctttgtatggccagaagccactcaactgctaggttagacacccctacttctttagaggatgcccaaaggtaaagagacactttagatattgtaccaaattctatgcacgatctctgaagttatgaaggcatcgtcaacagctaaacccaagagtagttcgaaggctgcaaaagagggtcccaaggataggccatcaaatccaagctacaccgagataggtcgatccatctttaaggaaaacagatttgccgacaatgaagaaacttgattatttcagcagaaaagtcgatgtgtg

SEQ ID NO: 97330 - DNA, 341 bp, Zea Mays
tggagatcgggcgcgaccgtggtcggatcggatcggatcctcatgcggtttcggcggtcaaagctgcctcatggcattgcttcgactgttccttattctggacgtccgaaacgaccttaagaatttctcctagttctaatacatctagaggaatgaatgaacgatgatagactgggaatgtaatagcatcgtatatggtaggtttgctttcgtttctcgacggttttggtgagttgagctcgaagcaaatggagttggccttgatccggtcagactatgtactaagaattgtccacagtggttgttctgtgaaaccaatgaagatgaacacagagtccgca

SEQ ID NO: 97331 - DNA, 830 bp, Zea Mays
gggatgtacgtgacgtgaggcacggctagctagctcctgcggtggcgcgcatcgtcagacggcgagggcatcagtcagatcacatctgatgtttagtgaagcactcgaacatcctctatacaattagtatgctccggctgcctgcctgtcgaaagctggtgttttttttttttttttttgcgtgcactgactgactgcagactggagaggccgggggggaagggacatctgtgtttcgtttgcctgtatgtggtggaatatgatcgatcttcccggtttggatttgcagctcaggtcggaccgcgcatcggatgcagttgcagatggctgatggatggtcctccagcctgctgctctgcactggatctattctcgcccgcccgcctgccttgccttttcttttcttttcattcattcatttagtagtactagtacctcgtccttctcccgtcctgcgctgcctctctctcctccgatttaataagtgctgccaatgggtggcttcgactagctggcgcccaaccatcgtcgtgccagcttccgtttgatgccatgccatgcatcggcttacaactggagttccagacatggcatgcgtaaaacttggctcatcacttccgtctccactcctatccacaccgcccaaatacatctaacgtatctgaacacccatttcacatacgatcgaaatctccagcaaacgtaccgatcccaactgggatttcaaatatcgcttaccacaggatgcatccgtgcatgccttcgtctctcgtggacgtggactcgtggtggtggtccggtcccactcccacagtgctcccggctttttc

SEQ ID NO: 97332 - DNA, 627 bp, Zea Mays
cgagacgagacgatcaagaagtcaaatgacgtgaaaacgacgtttgacggataaatagtgtcataggatgtttggaattcgaattgaggcacgagacgatatggaattgagccgatacttcacgaataggtttatataggtgaatatgagtgaagtgtgtgcttggtttgaatttaggcgaagaaaaaggaatttgggcactcggctcggaaacgatcgctctaaacgggaaatttggtgaaatttaagcctggaatctcggattggcgtgaaatttggcaagtaggttactggaagtgttgtgaaggtgcctgaaaaatttgggttcacttggagcatttttggctggtttgggcatttcaccgagcacgtggcgtgcggggaattagggtttcggtgaaacggctatttgagaagtgaaaaccctcccgaaggagctaggaacctgcaaggatgtttaaggcacacataggaacacaaatggccacatggtttcactggatttcacagagattcgagatttgcgcaagaggagagaaagaagggcttcactgccttcagtcagagaacaagagagaaggggagaggagagcggagtgcagctcaccaagagagggagagaacgag

SEQ ID NO: 97333 - DNA, 488 bp, Zea Mays
ggcgtatgaagctacgagggcatcctatagagaaaaaggaaggtcaaggcattccaaaactgaaacatactctgcagaacaactgcaaagtgctctcgctgagtaccaagaagatgcagcgctgttcatatttcgcttaaaatcattgaggcaagggcaattccatagccttttaacacaggcttctcgccatcatgctgctcaggtaggctaatccttcctccataacactgtcagttggcccaaagattggttgaatacataacctaactatcacactgttctttggactgtagttaagctttttcaggagagggctgaagtgtcttgaggcactcgaaccccatgtaaaagctatagctgagagacagcacattgactaccagttcagtggtcttgaggatgatgaatctgacaatgatgattacagctccgaccaggatgattgcagcgaagacggagagcttagtttcgactatgaaataaat

SEQ ID NO: 97334 - DNA, 519 bp, Zea Mays
tcactcgggcggcgaagcggtaaggcgaataggcgcattgcatgtcgatggcgcaggcagaggatatatactccgtggcgcagatgcttccgacactggtcactggccctgcaggaaggtaccttcagattaacgcataagccatcgtctgaagctgactgccggttgaacgccataatgcgtgctcaggaaagctgatcgcggcagagaacaaacaatgccctgctttgagatgtaaaggaaaacattcagtgcgtcaaagcattagcttactgtccatcgtttttagattattgttgacgcgctaagatgatttcgaatcacacgcctgcgagagttagcatgcccaccgttacaaacaatcatgatcgcagcaagagaaacaaggaagaggttgcgttaggttgaagagtggaggggaatgaaatggttttattcttattttctaaatgtttggttgttgaagttcccatataaaaatttaccataatagctgaaatgctcctgctccaccaaaac

SEQ ID NO: 97335 - DNA, 286 bp, Zea Mays
tgagttgttcctaaataatcttcactgcatcatcatggatgtaactactctttacttatttaacccaccacacgcgtatagtaagtaaaatagtagagttcgtggctactgccaagttcaagttcgtaaccgctaaaatcacattcccatggaaatgatcaagaacttacttcttttgagatggctgttcccaagatcccactttgtggctttttccttcaatacatcatttggaagctgtcgcatatcttgtcctcggagacacctaagcccgcccttgtgtcac

SEQ ID NO: 97336 - DNA, 521 bp, Zea Mays
aatgaaggttcaaatcttggtaatgaagatttacttttcagcagtagaggaactcctatgctagcatggctcaaagctgagatgcaagcgtcgaagtcgtcgttgccgcccgagtccagggcgctggcgccgcggaggagacgcgtggcgacatggtcgatctagtcggcgggctccttctccgcgacccgcacaaggccctccgctgccgacttagggaagacgacctggagcagcaaggtcgcgagaagagccaggacgacgccgcacattcacatggtcatgatctacagtaaccgaaggcgaagaaggtatacggatggacggacaggggttgcggtgggaggaggaagggagagagagaggtggagtcatgggagggcggcacttgcaaccacgggagagcgacatcagcaacaatcaaagcgcacgctgcagccatgacgaaatcgatgggagacaaatcgattttggctagggaagaggcggagagagcgaggaggatgagaaacgtcacagca

SEQ ID NO: 97337 - DNA, 379 bp, Zea Mays
gggctatacagacgactctcgcttcaagcacctcgatagcacagaagcggctgatagcggaggcagacatgctcctgaaggatgacctcctgatctcgaccttagaagcaaccccatggtcggccatacgaccaatcaaagagaccaagaaggacaacctcacccttccggacgtgtgtaagacgacaatcatcggctctagcctcaccaccaaataggaagacacgttcatccagttcgtctagtttcagctactagctagtggtgttgagcccctttctgcctcttcttgaggactagccattttctcgcttggtcgtgttgagacattgtccatttcttttgggaccaagctttgctcactctagatgacttattt

SEQ ID NO: 97338 - DNA, 400 bp, Zea Mays
ctcagattatttttgccctttcagagaaaccgtcccgtttggatggccaggatgcgtgcattggaagagcagctgctgcttgaggacaaccccacagtcgtgtacctcactgcctacctgctcacccttgatgcccagtatgatttcttggctcggcaccaccgtcagatgattgctcgagcagaagatgcagagaagcgcaaccgtaagctccatgtgaatctcaccacagctcaagcccatgtagctgccttggaaagtcgtgtagtctttgctgttgaagccctgaagcaagccaaggatgagcacgtccagaagttgatggatgcctacttggtaacccataaccaacgtagagccctacggatccaagagcccgcttcatccaacccagttcaac

SEQ ID NO: 97339 - DNA, 368 bp, Zea Mays
cctttaattccttctggaaccgcaccgccgagttttgagtcccaaactcggtgaaacccaccatccgtagtgttaggtggtttgaggttcaaccaccaaaatatcgtgagtagcgtaccgcatacgtgttccccacgtcttggacacgtgtcccatcagtcctcgacaactggtgacacaatccgttctgccacgtcctcgcgctagtacgtgacctaggtgtcaaccaccaaggctagtcacccgactgctttggtcccttagtcaagtcccaacgctcgttcttcgccgcttttggtccatcggcacaaatccacatgacattcaccttcgtcgtcgaccaccgtccctatgcttcgcacctgcac

SEQ ID NO: 97340 - DNA, 935 bp, Zea Mays
tgttatacggggtgttaggagtaaagctgccggctttgtgctggaagcttcgatcttttgtggtcggggatgaggattttgttgtacggattgagggctttgatcgatcccgtatcggttgacggtctggatctgggtgcttgcctacttggggctggggctcttgttcgcttagtttttttgtggtgtttttgcgcttcagggccacgagggaatcgctgctagttgtaggaaagaaccggggaagctgtcttatctcctatagtcttcttttgatttatacagcggattccgtcgatggtagttctaatacgtggatgctgctgatccctgttaagtacagaagtactaccatatggggtttgcatagtgcgcatgcttaagtttcgttttctctagttgtgattgttcatcttttaagtacagtcaccgtaaattgcatgaacttgcgtcatgctgcagcggtccattgtctgctcctaattgacgaactgggatttcatttcacatatttccagctcgagtgttgtgatatgttcattaattttcgaacattccacagattatctgcttatgttctgttcatttgaaggaggttttataacaattttggtctaactgataaaaccagagataatgaacctttcctgttccatttcatgaataagttcaacagtagttcagttgatggctgtctttaaactgcttacacactcgttcagcctacctaggacattggtccatgtttttcgaaccaactgtccaactgcataatctttcagttgtgtagaattccagaactgagctagccctgttggggacattgtttcagcctttcaggtcctatgttgatgaacttacatgtattaatattgaagttagttccatgaatttaaaattcttgatttgggagatctgatccatgataaactgac

SEQ ID NO: 97341 - DNA, 706 bp, Zea Mays
atttatatttacacaaaatttgtctatcaaagttatgaccgttatttagtcgaatgtttaataaagcttcaggttgttcgacgactaccatgatgaagatttttatgggctaccgcagaaatacagtattgtcgctcgggtagaaattaaattcccgattgaaccacgttatcgtgacatacaacatttctttttatctgacatcaatgtaagccaacaattctttaagtttcattttcaaagttacacgatcttcataccatcgcctcttctcctactgaaatactattagggagccaagatcgaggccataacatatttgtatgagacagtcaaacatttcaacaatttgctccatgaaaagcatgtttacaagatgcataacgtaaagtttggtcttcatccgggtgaatttaatttttgacatctaaatggtcccatggaattgtatctcaaccaataaactatcgtggagccatacatgttccaattcaaatggcgccattcccaaaacatatattcttgaaccttactgatattgccgagttgccaaacagaactttagtcggtaagaatatatcgatctcttaaaattattaaaatattgtttgcacaaaattcagtattaatccatttataaattgttatttttgtagacattatggctattgtagtccacttggatacaattcatcgcacaatgtgg

SEQ ID NO: 97342 - DNA, 1202 bp, Zea Mays
cctggggcggaggatgagaagaggattgacccggatccccctggtggggaagcggggcaaactgctcacgatcatcaaagtattcttcattttcttcttcatcttctggagacatgaaaggcaccccatatgcctgctagtgccactcattgatttctagaggaggcggatggagaggcacatcaggcgaacggggaccaaatggcatacccatagaggaagcttgacgacgtagattgtcgtcagtctcccgctgccgccgagccagctcatgtacatctgaagacatatttctgtatatggaaaagaatgctgcaatgccatgggccagacgagcacccatcccacgaccacgacctcgaccacgaccacgaccacgtggtgtgggagatccgcgaccaggagatggacacgagggtccggcagcagcaggtccacgggagctggagggcgctttcctcagacaccctgctggattgtttggatcaatccagaagggggtgtaagatagatgtcttgtgcctttctcatagcgaaattgagtgaccacttcaatcatcttcatgatgaagggggtgtggagacatcccttaagagggaagtaggcagcatgaataacttcttgccaaatcatgtcaaaaacgttgatgctttccgagctattgggcttcataaatgagagcaagactttgctctctcccaggatgttcatctgattaccccctttgggaatgagggtcattctacatagagaactaatatatctataaaacttatgcagatttatggactcccaaaatttaccagtctcagataaatgaagatcccgggcttcatccttggtgggttgccgaaagtcatgaattttgatcttgtcccaagaaatgtcttcatcagagaatcgaagaatgtgagcaaacctccggtagctcaccttgtaccagctaccttcgatatagaaatttagataaggaaagttatagggactttcctcatcggccagcttgatccaaagagtggaatagaactgagcaatgacctcatcattccaatcatattggaatgtcataatgttcttcattttcttcctttcacaggccctcaaagcctgtgacatctctagatctccaatagcttcacatccttcccagttgatgtatctttgatgtagaataggctgatgcttcttgggaagaatcaca

SEQ ID NO: 97343 - DNA, 608 bp, Zea Mays
gtgggggagtatctccatgaatctcttggtcgtcagaggagtcggattcaaccacagaaggattcctccgacgcaccatccttaaaaagagaagatagaacctttgatgagcaaggatcttaacaaacacgtttgagtagagacgcgtatgattttgagcatgcacttcaaccgttcatgcgagcgggtcaactacaacgaacaatatcaaaccgctaaactcaaacaatgttcgagacaaacgaagatagtctaagtgttgcaagcacataaactaaaatgtacccaacaaatgatacactagataatcaagaacgggtgagatcgagtaaaaagaaatgaaatagggtaatacctcgatccgaagtttgaatcacagaaatcccaacaagatcgagggagatgatggaggaagccgagatgaacggatctccaacaaaacttccaaagattggatggcacaagtgggttttttggagtggtgagagtatgaaggagagagaggaaaatgtgtaggcggcgtcggctgggaaaaaggaactgagaagaagagaagagaggaaggggagagaaataggggaggcaccggctggtcaacaaattgaaaa

SEQ ID NO: 97344 - DNA, 509 bp, Zea Mays
gtgacttcgggaagggaatatgagaagggataacagagggagagggtgggagcattgagcgttaccttcagaaggaagaaaccggaataggaagcgatggaggaagaaagcaacgaagaaaccggaataggaagcgatggaggaagaaagcaacgacaacgcgaggttgcctaccgtcgtccgcggcctaggcgatgttgccctcccgtcaccactcctcgcttcttcccagggcagagctttccagaggactcaggataggcatactaggagtgggagcagccagaatgcaatatagagctcctatggtcctatctaaaatgtaaaacattgaaaccagttagatgtatctctgaatactaataagataaggattgaacaataagcgagcatcatgctgctaaaaggaagtggtgagcttaaagataattttgtacattatatttaatggtatcatacaaacaaaatgcttaaactccatttgctgatatacaagatgaagttttttg

SEQ ID NO: 97345 - DNA, 417 bp, Zea Mays
tgccaccttccttgtgtgttgcatttgcctttgtctcgccgcttctcacatgtacgaactatcctcttctatcgggcttccttggattagaagtcattgtgtgttagggttgcttccttgcgttcctcttcattctcccctccatcattctagtctcatggaccacatcaacctaggtagaaacaaggcattattgttgttgctgcaatgggtgtgcgaacatgacacctgggaccatgccagacatcgtgttactggtgaggtccaacccttatagtgtggccagcttcgtggcactcaatggcccagataaggagttgatgctagccatgacggaccatagtgacaacggcaacagccctagcgcatgaagcagtgaccccaacagtttggtgctgctcgtccccctcacctcaa

SEQ ID NO: 97346 - DNA, 334 bp, Zea Mays
atcaaaacaaacgagatctaggctcttagaccatacatagatgaacaatgagagaagatgcaaaaaataatagggggtatgtaagatgattacaagaggctagcacgtgcatttgataaatctattgatgctaattttccttcgaatgaggttgaaaagagggaaaatacacatgattcatcggctgcaaattggcatgaccaatcccatccactatacaggatgccgatcaacacatatcctaaacaaccacaccctccaacatggatcgggggtaaatctaacgatctgcgcatagccagaccgtccgcgcatgagcgcggaccgcctagac

SEQ ID NO: 97347 - DNA, 370 bp, Zea Mays
tcccgcactgtccggcgtggatctcatctagcagttgcttcccagtaaccgaaggaatgcacttcatgaggactcctgttgcgccccttctgtacagtgcatccccaatgagggtgtagtgggctgactgccttgcgatgcgttctgctgcgactttatcatccggtccctcttcattctttatatatctgatgatgggctccctccagtcattagagtctgactctggctggctcaaaacattacactcttctgcttgatttggggaaatgcttgggcgtggcacctcttggacaaaaactctaggtgggacctgagtccgactggatcctagcttcgacaacgcgtctgctgcagcgttacgatctct

SEQ ID NO: 97348 - DNA, 399 bp, Zea Mays
tctttcatgtcctcatgcggttcgtcctaatgctccaaatgtatcacctctaaggtatccacacgtggaggatgtgtcatgtacttgactgctaggtccatgatggcggtatggcgagggtggggaagcgcgacggctggtgtgctggtgggcaaattaggttaaccataacgatgcttccacccttaatatataagtgtccttatggacttctgacttctaggcctatcaggaaccctaaagcctagtctaattcgaatattatccaaattaggcttccttccccttaagtgtgtgatcatatacgttcacgtatacatagacatggcctaagtattattacatagcctaataattgacaacgacctatagcaagacatgtcagctcctatgcctacg

SEQ ID NO: 97349 - DNA, 1058 bp, Zea Mays
aagccgaggaagccgcgcaccgcccgtgctgatcgaggcaccggccagtcatggatggcctggaccttggtcgcatccatagccacaccgtctgccgaaattgtgtgtccaaggtaggcgaccgaaggctccccgaacgcacacttggagcgcttgacgaagaggacatggcggcgtagctcactgaggaccgcgcggaggtgtcggaggtggtccgcccatgacttgctgtagatcaatatatcgtcaaagaaaacgagtacaaagcgacgaaggcaagggcgtagtacatcgttcattagggcctggaatgttgccgaggcattgcacaggccgaatggcatcactaagaactcgtagaggccatcgtgagtgcggaaggccgtcttgtggatgtcctcggtcctcatgcgcacttgatggtacccggagcgtaaatcgagcttggtaaagaaccgggcaccatggagctcatcgagtagctcgtcgacgacagggatggggtacgcatccttcaccgtgatggcgttcagttcgcggtaatcgacgcagaaccgccacgatccatcctgcttcttgacgaggaggaccggggaggagaacgcggagtcgctgcgcctgacgatgccttgagcgatcatggcgtggcactgcctctccaactcatctttgtgcgctgcagggtagcggtatggccggaccgccactggggttgcgtcgggcttgaggacgatgcggtgcgtccggccccgctccggaggcaggccacttggctcggcgaagacgtcgtggaattcccccaggagtgcgtcgaggaatggttccctggcctcgacagagtggagacgaccaggggtcttgggagcgaggccctgccagcacacagatctgcccgcatactggaatgccatagtgccagccgccaaattccacatgatgtcccccaatggcgccatccagttggttcctaacaccacgtcatagcctgcaaggggcataagaaacagatccacctggaacgtgagtccgtcgatgagcactggcgcgtgacggagcac

SEQ ID NO: 97350 - DNA, 875 bp, Zea Mays
tgcattcgccgggggttggttgcttgcaactgagggggcatggaaggagctctgactctgctgactgaactgtgacggggtgggtctagctggtctactgaagcttggtcccttgggtggaaatccaaaggatcgagttttctggtgccggtcttgctgctgagcccggaggacttgaaattttctcttgagatggcctttttcttcctcctttgccctttcaacttgcatggccttattagagaggtgagagaaaccgaggaagtcttggctagctagaattgtcttgagttctggcctgagtcccttcaggaagcgggccatcttcttgacttcggtactgacgtcatctggcgcgtagcgggctaactccgtgaacttgtgcacatattcactgacagatcttccgtcttgagtcagttcccggaattcgtcttccttgagctgaacgagcccttggggcacatggtgctcccggaaagccgtttcaaattccgcctaggtagcatctctgatggtgacgttgaaggtatcccaccaggctaaggccatcccggaaagttgatgagcggccagttgaacacgctgattttctgggcatccgatggcttccagcttccttttaatcgtgcgcatccaatcgtcagcatcgaggggattgctagatccggcaaacgtgggaggcttgagcctcaggaaatcccccattctgtcttgcggtcttccaccattcggacgttgatttttcagacttcgagtgaggacctcgatgagtcgggtttgattggctagaacttgggctagatctaagggtagttgtggaggtgcggggaggtgggtttcactttcctctctactggcttccctttcagctc

SEQ ID NO: 97351 - DNA, 285 bp, Zea Mays
gtggaaactaagaaaatgggtgctttatagcagtaaagaagatatgacatgtggacctagtgtgttttcggtggacctcaaaaatactcctctatgttttatttttatctctacctgttgtcttatctacgtctatctctactacataaagcaacaacttcgatggtcattttgtatcacgcgtgaagcacgtaggtttattcccctttccttatcggtgggtcgttaccctatagatagattactagtgagccattactccatagatagatagactgtaaaaat

SEQ ID NO: 97352 - DNA, 1226 bp, Zea Mays
ctgcggtgacacatctatctacggctcttgtcggtctggttactttagaggtcagtgaaccagacgccaggagtctgccgcctgctgatggggctgaagttcctccgagtcatgcctttgatatcattcccgctgatctcccctcatcaagcaatgtatcaacacttcctgctttgggtcttcccttgttcctctctaatcttcaggtgagtcaactttcgcttttttactgttcccactagcaaactagcttttttgcttatcttttcataatcataggatgttcttggtggtgtatctgcccaactgagatcctatggtgctcctgtccccaaccaagttttgtctctgatgcagtggaacactctactgcttcaaaaacaaatagatgatctgagggcgtcaaatattggttagtgagctcatagtttccttatctgctttcattactcgactcattctaaatcttgcacttttcttttgctgctttatcggatttggctcggcggtgctctaacattgaagagaagtattcccagagccaggctgacttaatataaacttctgctttcttggacggtgctcgctccttgaactcctctctgaatgcacagcttgactccgagaagatggaacatgaggtaaactctcatgactgctcctgttttgctcccattgcttcaatgcttagtgttgttcttgcttgtaggaggaaaaatgagcactcgttgcttgtcgagataatctagacatgctatatcgtgatgccagcacctccttgaccattctggagaggaccatcgctttaccatgtctgatttggaccatcatcgcgacgagctcgggcatctcaggatgaagtctcccgactcggcaaactgttgtccaccaaagattccgccatcaaggagctgcgcgcctccaagaagcttgtcatgctggagttggaggctgcccgcctcactatcaacgccttagaggatgaccacatcatcatgaaggcaatgtgcgacaaggccatggataaggctgttcgcgctgggcgaatcctgatgaggagacccggcgtcatggtgcatgaagacattgtcgccgatgtcgtggccgctcctgatgccgcaagccgtccatcttcttctgttgctcctgcaaacgatgcttcctgcaagaatactccagcgcaatgatttgcctgaaaaacacttgtttattgagttagcatcttt

SEQ ID NO: 97353 - DNA, 370 bp, Zea Mays
agagcagaggcagctgttgagtcacatcctttgttgccaagtcaaaggtaaccaaaacaagatagtagatgttttcgtctaacaagctacaagacctgttactggttaaaagattgcccagcgatgcatagaagcaaggcgatccttatttgcatagttaagtgctggttattatgtgcagctgtgcaggactaacaactctaagcaagcgcgtgcgatcgatgcaggcaatggtggcaaagggaacagcaacaacgacagttgatctgggcgctgcctgccttttgtggtggagggagctagattaattggggagtacgtccactttggaaaatatggcatgcatgccgtagcagaagcattcactttc

SEQ ID NO: 97354 - DNA, 401 bp, Zea Mays
ctggaggagattatcctagaagatcttttattggaacttcctcaaactgggactgctggcatccgtgcagaagtcctagatgacattccctcagctagtaatctagttgggcaagaaataacccggacagtttcccatgcttcttcgacctttgagggcggcctaatccataaggacaccttggttcctgatgttacatgcaaaggttacctggctcctgtgggtaagattgaggatactttagcccccgagggtgctgttgagggtgacctagcccccgagggtgctcctgagggtgagccagcccccaaggatcccgagctcgactcctcttcggctgcttctatggatgttcatgtcagatcaccaccagttcagtctgaggagccaatgttgacaag

SEQ ID NO: 97355 - DNA, 367 bp, Zea Mays
gctcaccatatcccacaaaaccaccttctgtattggccacgagcccatctatctgttgacaaatttcggcaccagtcatcgttgcaggtgggcggtctgtcactacgacacctttcgtaaagttcttgatgtctaggcggaatggatggtcaggagggagaaattgttgatgtttatctaaggacgaatatttgccaccctttttcaaccaaatgaacctgagagcttccttgcaaactgggcatgagaacttaccgtgaacacaccaggcacagaatagcccatacgccggtaagtcatgcatggagtactgaaagtctcctagagaagggtggataggcgaaacctaaaaattataactttacac

SEQ ID NO: 97356 - DNA, 423 bp, Zea Mays
cgcgggttcacgtatccgccggatatccgacatgttggatttgggcacaaaatttaacccacgagtctcacgcatacctgacccatgataaaataagttaggtatgagatttacctctcgcccatgggtatccgtcaattatgtgaagttgttcaattggttttttattacattagagcattgccaagaaagagtcctaaaaataggtcctgaaaggcaaaataggacctggtttaatttatttaggatccaacaaatttgttttactccaatagtgagttctataatcatgtcattttgttaattttggtcttatccgtgggatttggcggcatttttttcactttcccgccgcaccagattcggtaaccacctattgtctaattcataatcccttcaccaatcacccaatccccatcccag

SEQ ID NO: 97357 - DNA, 463 bp, Zea Mays
ggcaatgtgcttcgctactctgccagtttcaaacaacggttcacagatataatgccatttgtacttcttcactgacctggacgttaactcttacactttaactgacaattatacccttggctcttaacgttgttaactgtacacgaacgaagttggtgcctagactgactgcacacctccaaaactgtacacgtccaaactgctcacagtttcagagtttcaaataccctattcagaccaagcattcacacgttaattgtacccttggctcttttcacagtttctagcgcacagcattcacatgcattcagaccaagcaaaaaaatgcacatgttttcagcaaaaaaacagcattcaaatgacaaagctggcgcaaagttttcagcacaccaaacgacaaaattcacatgaaatttcagaggtgttcacagttcaaatgacctcatagatgttcacagtttag

SEQ ID NO: 97358 - DNA, 409 bp, Zea Mays
gcttggaaggagaggaactccagtctgggcgtcacttgttgcgccgaccagtgccttgttgcgccgtccagtacccaccagcagctcgcaatccttgttgcgcttgattcactcccagagcttacaaacgcgtggaggatttgccgcaaggagaggaactccagtttggtggccttgatatatatggtttatggtggcgtgtatggaggatgggtatgggtttctcgatggtaggggatcccgttcacctcgcggcgtaaggaagggagacggcgaagattgaatggcggatttggcgcggactccatctccggcaccgttgaaggaaagggaggcggcgatggatgagattgaagagcgttcccctctcggtgccgaagggaggcgacgaatttggggcggatttggc

SEQ ID NO: 97359 - DNA, 559 bp, Zea Mays
atgttttgtttgttgttgttgttgttgttgcaacacatgaacatttacatagtataggaaaaacaaacggaaacaagaaggtatgatagtctcctactcttcgtcaccttcagttcttcatgacggcacatatcgatcatccatatctgaagggttttgaggcgtccctgccctacgacatgaagatgcagaaaagaagagctaccttgtcacatgaatgacagtatcaagtattattagctaggcaaccatggaaactgcggtcgtcgtaatcaatacttgtatagttgtagtccattagcagagacatactactggccataccataccagagacaacagacatgttctgaaaccttcgtctcagaatctcacacgatcttcgttcttattctttcttttttttacacatgcatgttcttcttattcttcagctgtcgatcttcgttctgcaagcggccactactcaggcgcaaaatccttctccgtatcccgtcacatgcgaacgaacgagtggcaacagcgctttgcataagaaaacgagggcaactatcgacagc

SEQ ID NO: 97360 - DNA, 413 bp, Zea Mays
atcaggttccactcgtcttggtgaatcgccacgacttcatctgggatccagcagtggagccaacgcaagaattgtctacggtggcggcaactctccatctctccgacctctctgctcgcttctggcggcgtgctctcgatactcaggtttgatccagtgactctagtttgagggcaatggggagcggggtccgagctttatactgtggaaggggaagagatttattcggttgggatcataatcccaacgatcgcgttggatcataacaacccttgatgcattctgtttcagtttagaaacgatagaggagaaactggcaagagggtcccacctatcaacctctccgcagaaacacgcgtgcacggggagatcgaattttttgcattttggtccttcatcggaaacaaattcac

SEQ ID NO: 97361 - DNA, 419 bp, Zea Mays
gtcagagccaactttgtgtccaaagattgaaataaggacctctaaaaatggctagtaaaaaatcttatgcctgtctgaaaccaatgacttaggagttccatgaagtttcaccacattatccaagaacacttgtgccacaattgctgctgagaaagggtgtttcaaagcaaagaagtgtgcatacttagagtatctatcaaccaccaccaaaatagtatcacacccttctaacttaggaaggccttcaatgaagtccatagtcaagtcctgccatgcacccgtgggaacaggtaagggttgtagcaatcctggtgagagaactctctcagatttagcatgttgacatactaaacactgccgcacaaacaatttgacatcagctttcaacgctttccaccaaaacaacctcttcaccctgg

SEQ ID NO: 97362 - DNA, 442 bp, Zea Mays
gatttgttttatatataataaaattcctagtggacggtggcttcaatttctggaaaggctagggtgctctgtgcaatatttaggacctaaattaaattttcttactgctagataggacggcgggtttattctacagaactgcaagggtttatttgcaaacaacgcacggtgaaggggtatcgtgaagtctcaaccgcccgatctaacccagacggtccagattagatcgcgttttaatcgaaccggtatacgattcaagcccactgatcaagatccaaaggccaggattttattaaggcgcgatccgatccctgccctccaaccaggatctaacgcccccaaagcgtcccagccgaatgggtatacacgctctaatcctagccgcacgctaccggatcaacggatcccggttgtcttcttcaccccggccgacggacgcaag

SEQ ID NO: 97363 - DNA, 732 bp, Zea Mays
ctttttacccgcgatcataaccatgcgcaattgggctacaacacgcaattcatcgtgaccacgaacttaactaaagtcatctaacaagttgattaacctgagcaacaacctaggccgctatacaacatactcattggctagcctattattattgaaatccgagacacaacatataccacaacatttatataaacatacatattcacatgtattttcacacatccaccaaatcatacgacccataaaccactattctctaactcgaaaccatcatgtgcttacttcccaattcttgaacacataacgtgtattgaccctactcaagatatagagaaagcgatgactactttggtatttcaccacctctctatataagccaaaacaatttctactatcgactaagagttctaagtattaatcacattattactttacacgcgcaaataaacctcaacttaacactagtgacaccgatggatttttactaaactcatcatgcgcataaccatttaatctctaattggtactaaggtataattcaacattccaagagacatgcaagcttttgtttacttctaattttcactaactcttcttataattataaaatgggtgttattttagcaccatacgaaagtacctaatttggggctggaatttttatgaggaaaatgtaataacaatttatgactaatgtataaatttcacatgcccaggttttatattttattt

SEQ ID NO: 97364 - DNA, 832 bp, Zea Mays
gttggggtcgatgggaggaatgactaccgcagcagaactctggttcttccgcttgggcgccattgcaatctcgccggcggatcgaacaagggcaaaatcagaggaaaacagagtggttcgaggcggaaacgtgaagttagggttcagaactcaaaagcgcacgacgacatgagtataaagggggttttcccgggttaggcacagtttctaaaaaagtgccaagtcatcactcgggaaaacgagatttccgacatagctcggctgttgcttctaaaacgcgacaacatcaagcaccacttggttgttacctctaaaaaatgccgacagtgcctgccataactcggctgttatctctaaaacgccgacaacatcaaacaccactcggttgttacctctaaaacgccgatagtatctgccatagctcggctgttatctctaaaacgccgatggggtcaaacaccactcggctgttatctctaaaacatcgacagtgtctgtcataactcgtctattttctctaaaaaacgtcgaagctcaccaaacatgactcagcggttaccagttattgcttgataattatttctaataacgtcagcaacgttaggcacgaaggcaaaatatcaatcgactataaaggaagaatggcggaaaagcaaaaggttactcagaacaagctaaaattttcttggatatatagaagagggaaatttttcacaaacttaaaaaccaactcattatgagtcggccttttcctcctttctcactacactacaatacattactacattactcacaatatactacactactaactactactacattattctgc

SEQ ID NO: 97365 - DNA, 775 bp, Zea Mays
ccttggagttgctgcaggaacatttaatgcccttagcagctccgtctctcgcaacgaactcaaagccttcggttgctccgctgctttcttcaattctggctcctcggttgattccatcctactttcggcaggagcggagtaacttagctcagatacagaagacccctcaataggcttcagccctttggccgtttcaaagcgcttgggcaggtgtgttagaaccttcactttttcggcttcggcgttctagaaatcgctgaagcagcagtctttctcttcttttcttgctttcgtgaaggataacaataatctaggtatacaaacccgatgacatcaaaaactctattcaatctcttttttcctcaacccccaaaggccgttgtcatagcatcatcttcagccctcgagtaagcaccaaacaattcatcactggttgcttcgatggcatccagtcagtcatcattcggctcatcgaattggcttctatacttgaatgagtacttcagatagaccaaaccaccttcgctagaccaacagcagcttccttcgacatctcccgtccacttgcgagcggccacactctataagcaatatgttcctgaaataagtccctggtgcctatgtaagtgcatactgtattaaaggcagtctggcatgctagtatgtcgtttccaagggcagtggatggcctcctaatgtcgaagcaagaccagatagggcgttgaataatccccttaatatcttcccttgcaacaaagccatttttcacatagaa

SEQ ID NO: 97366 - DNA, 783 bp, Zea Mays
gagctactggaaattttgctcgaagtgcggttgtatcctcccaggtggccaattcaggtgccatcccggaccagcggaccttgacctgagcaatatgttcacctccacgtgcaaccatgcagcgatggaggacctgcataggaatttgcataggcaagtcattagttggtaagtgagacactagaacttgtccacgccccacaaccaatttcagttggaaacatgaaaaactgggtggatgacaaagccttttggaagctgcagtctgtatgcaacagttccaacacgctccactatctgaaatggtccaaagaatcgaaaggagagcttgttgttggaccgaacagctatagaagactgaatggctgtaatttgaggtacaaagaatcccccgcattaaaggaacgctctgagcggtgtttgtctgcatggcgtttcatccagtctcgggctcgctgcagatgtaactgaaccactttggtcattaactgtcgttcttcaagccactcatccaactcgggtatgttcgatgcatcaactgcaaataacccaaaatgcttaggagtgtagccatagagtactttaaacgacgaacgaccaagtgttgaatgcaaacttgtattgtaccaatactctgccactgaaatccaaaggcaccatttttatggacaagtttccagacactgattgaggcgcactgtttgtccgtccgactgacgatgataattggacgacatacacaactgtttacccgatagctgaaatagagtctgccaaaaagag

SEQ ID NO: 97367 - DNA, 396 bp, Zea Mays
ttttgtcgctacttcttctacccgtacaagataaattgtgtgccataggtgccatggttgtgggcacattgctgctcaatgtccaagtagaagaacaatgttgttgaatgaaaaaggtgaatggaatcagacaatgatccagaagatgatggaccgaagtttgatgaagaaattcaacaggaagagaatgagatctagccagaagaaggagatcataactgttttatctctcttcgagtgctaagtgtgactgctgaaagggaagaaaatggacagcgccataatcttttccatacccgaggtatgatcaaagataagctatgtcgcatcattgttgataatggtagctgcaacaacattgctagtcaacaattggtggacatattggaattaaaa

SEQ ID NO: 97368 - DNA, 867 bp, Zea Mays
tcgatcaggaaggcagcccgacgttcgcactcctagctgggtagagtcccccacttattcagaggtagctaaagccaaggtgctacttgctgaaatttgtttgctgaaggacagaggcctgactgtagaagccgtggttgctgactttgtcttcaagaacattcaacctctgaaggacagagtctatcctgcttacttgtacactagcgtcaacgattctacccgagtcactaacaggaaaattcccaatgaggacctgctaagccgacttgacatgatactgaggggtagtgtttcgaatgttggtgtccccttatcttattctgcatggaacctgcctccgcatagtcccttctctgattttgtctccaatcctcctgctcaagatggtagcctaggccatagagtgcgaccctccttagaggacattgaggccttaattgctcccctctgaagtcttcccgaggctgagaagcaaactcacttcgagatgtcgtccaacaccgatgatgctgagatggatgttgttcttagcctgctggctggagaatcatctgactctgccctcattgagccaatggcaattgcgattgggcaagagtttggcgaagacaaggaaattcaaaaaccagaaggtgctcgtcagaagcgttcacgccgagtgaaccatccagctgcacctgttgatgagaagaagaaaaggcgactccggcggttgtcatgcttggaacaagacgctgacccgtccacattattccttggcgatggcccagtgggcaccatcctcgagggcaatgctggaggttgtgatgatgctcaggctgctggcggtgtgcttgatgaggaagaggatgaagaaattcctct

SEQ ID NO: 97369 - DNA, 429 bp, Zea Mays
ttccgcgcttgttgggtttggagaaaaaagtcttgttaatttgcatgcctcatgtcttggtagcagtatcagattccttcaaccgtggtcaaaccaactgaaagattacagaacagtgggaaaacgaactcactataagtcgagacctttttgttctacacttgtcctttacatgagaaacatatatattatcttatcatcggctgctcttaccacagcatgctatctagagttccaaacaacaactccaataataatttcaaatccaataacaacaaccagtgtaataagatatctcagaacattttcaaattttgatatagctgctttgtattttttccaatacctaatagaaaaaataccgttatactttgtttcaactaatatcagtttgttgatgtaattaaatactttcatatgtgttcttta

SEQ ID NO: 97370 - DNA, 325 bp, Zea Mays
tgggaggatatttgcatggattttatcgtgggattgcccaatacctcccggcaccatgattctatttgggtcattgtggataggttgaccaagaccgctcatttcttgctagtgcataccacccacaagacagagaaatatgcagaaatctatgttgatcaatagtgcgtttgcatggcattccgaagaccattatatctgatagaggagcactgtttgtggcacgattttgggagcagctacaagaatcacttgggacccatgcaataagaagctcagcataccatccgcagaccgatggccagacagaaagagtgaatcaaat

SEQ ID NO: 97371 - DNA, 1205 bp, Zea Mays
ctctgcaagcttcctcggaagtcatctgttaggagttatgccaggaatccaacttttgacaagaccagtgcaggtgaaagtagcggatggaagaacattgtggagtcgatatgaggtcccagattgcagttggttatgtgaaggcttaactttttctagcaattttaaatactacctctagggggttacgatatgatcctcggtatggattggctagaatgtcatagccctatggctgttcattgggcacaaaaatggttggagtttgagtatgaccaaagaaaggttcggttgcagggagtgctgcccaacacacaaacctgcaacaatatcacctgtttgcagctgaattccttgatcaggcaggaaggagtcgagcagttactcgaattgcaacaaatggaacagacagcagcaactgaaattccggagccaatcaaacaattattaagtcattatccacatctgttcagtaaaccccacggcctaccgcccaaaagaacagttgatcatgccatcgatctgatacccggtgcaccacccttcaggctaagaccttaccgctatacacctcaacagaaagatgaaattgagaaacagatccaagagatgctagacagtggcattgttcaacaaagttctagcccatttgcttcgccggtattgctagtgaagaagaaagatggagaatggcgcctttgtgtggattataggaaactaaattcatatacagtgaagaatcggtaccccatgccgatatttgatgagattgttgatgagttggctggtgcatcggtattctctaaacttgatcaccgctcgggctaccaccagatcagactgagagaaggagatgaacccaaaactgcatttcaaacacaccatgggcattttgaatatcgggtcatgccctttgggctgacgggggccccagccaccttccaggattttatgaaccagttattagcatcgtttcttcggaagtgggtggtggtatttctagatgatgtgttggtgtatagtgctacgatggaggagcatgtagggcatttgaaacaagtgttagacctgatcagtcagcaacaactttatttgagggaatccaaatgtgtgttcggtcaggcaaagttggaatttctgggtcatattgtaagtgcagcaggtatcactacagaccccaacaaaatcagagtgatcagggaatg

SEQ ID NO: 97372 - DNA, 287 bp, Zea Mays
gggtgacccatgctcagggtcatggcctccgatccatatagtagatgaaaaggagtgaatccagttgcccggcattcagtcatgtttagtgcccagactacttcaggtagctggtcggcccatttacccttcctgtcgtcaagaagccttttcttgattgcagtgaaaatcttgtcgttggcgcgctcgacgacgccgttggattgcgggtggtataccgaggcaaaggcaagcttggtgccgatggagaagcagaagtccctgaagtcctagctgtcaaactgttt

SEQ ID NO: 97373 - DNA, 501 bp, Zea Mays
gagaattgtggtaggtatgtcatgggtggatattggggtggataataaggttgatattggggtggatgagactatgcaggtgtttatggtgtcgatttgacaacatctgggctgatttattcgactttgcttgttggaagggtccaattgtttttacttgcttttcctggtcaggtgagcgaggtcgctttcctggccgatcatgacgatcgactttcttgttaacatatttggacagcagctggtcaaaagtcgggttgactttaattagttgactaggtgccttagctgtgttttgctttcacgtacccatttcaggctgtcgaggtttgaaggtttatggtcgctattgcctctggtcgaagccggaccgtctgttcctctgggccgtaccgtccctgatgcatagaacaggggatttgatcctcccatctttttgtgcctgcccccagtgtgggaggatctaatattgatctttagcgtctctccctcgtctaatgt

SEQ ID NO: 97374 - DNA, 583 bp, Zea Mays
gaggaatcctcttgctatttaattttgaattttctcctctcgttattttcaattttaaatagagaagattccttttcataaagaagttgggcactgagttctacaatgttgacccctccaagttgagccttgatgcattaaacagctctagatcttccagcgctgccatccagaggcctcgtttttcgtctagttccagggacgagctgagtgcttcgtctgaagatcagagggaggtttcagaagaggatgatgacgcagggtcggctgggctgtaaggcttcgcctcctccctcgtcgcagccagtttccgctgtgcctcggttctcgcatcttttggtctgcttatgtatcgcaacaaaacttctctttctggtattgggcctgtcgtgccctctttgtcagcctcatcaaacatggcacaagattatgtcttttgggtgaatggtttgaactttcatgttataaggaaagtatgtggtttattttggcctttctgggttttttcatgtctgaatttcgaggggaagtgtttgctcgcaaagcctcattctctttggattttatgaattgatatgcctcc

SEQ ID NO: 97375 - DNA, 535 bp, Zea Mays
cttagagtaaaggcatgattagaaataccatgatattttcccaaggtatcacagagtctaaactccccatcatttttcattggagcacctgcacaagggtgtcactctcccttgatccacacaaggaccaaatgttctctataggttggttctttcccactctagcacactaaaccatccacaaccatgtacaagtcaagttgggtcacccataggctctttgaatgatcactaaactcccactcgccaccaaattgcctagatgatatcgatcaccaagagtaacaagcatagactctcacttgatctatccaatgctaatgagaataatggatgcatagtagctactttcaaggcaataatgaggttgttaatcacacaattatcaactctcaagcccctcattaggcgaaaacgctcttcctcatactccaaaggggttcttcagctgatcaaatgggcaagagagctagaatggatgatttagggtatatttatacacccccaactagctaaatattcattgcgataactt

SEQ ID NO: 97376 - DNA, 433 bp, Zea Mays
cccaacccaggaaaaccccatttatactcatgttgacgtgcgcttttgagttctaagccctaacttcacatttctgcctcgattcactcctctgtttccctaagattttgcctttgttcaatccgtcggtgagaatgcgatggcgcccaagcagaagaatcagagttctgctgcgttagtcattcctcccatcgatcccaacagccagatgtcgttcgcaggtaaccacatgtctgttgtctcagaatcagatctcctccacattgttgatgttggagttcttcctccaaaagagatttgctcttggcggattagttgtggggtcactgttccgacagaagatacccacgagtccgtcgtctacattccttttctcatctgcagccttgctcttcccatttctcccttcttccgcggtctccatgatttttac

SEQ ID NO: 97377 - DNA, 649 bp, Zea Mays
aagaggtgcaggaggagtcttcatgaaatgcatccacttggctactaggagacaattgttagatgaaattcatgttgggcagtgtggtgtgcataccgcatcaaagactctagtgggaaaggcttttagatccggtttctactagccaactgcgaagagtgatgctgccgagttagtccaaaagtgcgaagcgtgtcaattcttgtcgaagcaacagcacttgcccgcgcagcaactgcagaccattcctgtaacctggccgtttgcatgctgggggctagacatgatcggactgttcaagaaggctcagagaggctatactcatatattggttgccattgacaaattcacaaaatggatagagtacaagccaattgcttccttgacctcagcaaaagcagtggagtttatccaggatataatattcaggttcgagataccgaatagcatcatcaccgacctaggatccaacttcaccagctctgagttcttcgatttctgcgagaaaaggagcatccagatcaagtacgcatcagtggcacatccaagagccaatggctaggtggaaagagccaacgaaatgatactggatgcactcagaaaaaggtattcgataagagcgaaaagcttgtaggaaaatggattagag

SEQ ID NO: 97378 - DNA, 901 bp, Zea Mays
gccgcaactcctaagaggaggaggatggccagcgtgctggacgctgtcttggagaccacgaaggccttgagccctggacctaccaagaaaaatgctgaagctgccaaagtccaagacgaggccgaagctgggccttcagcgcccgttgagacaaaggctgtggcgcctaaagataaaggtgatcaacaaacttcagataccggcatggcagcaaggcaagacatggcagaaaaacaaaatcttctgtccctgaagccctagttgaagatatcgattacatttttcgacatgcttcggggaaaaaattatccgaagaagaaatcatggaagcaagacattatgcccaaagactgaaatatccgaaaggagccttagtgtttaatggcactaacgaagatgatttcctatactgtctcccgaacagcaaagaaatatccatttgccgggagatagctaaaagtatgggattttcgaagcttgaagaaggcctttcggttatgttgaaggatgatcttgctgatagcctcgcgtacaacagtataaaggtatagaagttaattttgaagttagaaagtgaagtattttatttccatgctcaattctttctttgtctgtgcagggcttaattcttagtaatgccttgagggcacagaagagcgccgaagacgaaggctgtacaatggctcttaacaaccttcgctcagaggtgattgaactgaggaacaaaggtctagagaaagacaaaattttgatatcattggtgagtaaaataaaagaagatgaagctaagtacaatgctcaggccgaagcccaaaaagccgaggttgaagaccttcggagacaactggccgaagctaaggagaactgcgcgctcgcacaggctaaccaagagattagtgaa

SEQ ID NO: 97379 - DNA, 495 bp, Zea Mays
gtttgctatttgcatatgtgatatattttcttaagaactgaagttttcagttgctttcctctgataaatgattatccgaaattgttcagttttaattacgcaggtcactggacgattatgtgtatttatacctgaacatgcggttattatttgttcgtggctcagacttataggtccttgattaagccagatgaaaaacctgtgctgctgttgtttacttatttgttcatggctattattgtttactcagagttgaggcaagaaataatttacatatgaaacattactgtttgctttcttctttcagttcgtgtatgctcatgctgctaaaaccttgtatataggatccaaaccttttatatctcagcatacaccttattttctccggaaggcctaattttaatagttgctgtctttcaagacatgtaagcaaatgccttgtaaaatatggtcgctaggctagtagttcattgagaagtgcaatagcacaccaac

SEQ ID NO: 97380 - DNA, 505 bp, Zea Mays
ctgaatctaccgatgcccttccggctattgattgtgactcggggcaggcgccagtggtggtggtggtggcaactaagcccaggaagcttgagaatgacttgccgaagcaacagaagtcgtaggctattgatttcctacatactctgggatatacggagagtagcatgaagcagtatgcaagacctgcttcagctaattctgtcgtgcttcggcttgagcaatttccttctacttctggatcatgacttggcacgtccttgttgtgtgtcccttgtcttcgccacagaatagtcagaacagtttcctaggctgattaccataccttccctcgaagcttctccccctctgcctctcggggctggtggcctgtaagaagtttattgcattcccgaagactgcgagttgtgttggctgctctgggtatggttggacctgtcatcatttgcattgggattgtggattgtgctgacatgcctggggagaagtcttcctctgaagcccctag

SEQ ID NO: 97381 - DNA, 342 bp, Zea Mays
cccgccgttgtagcgcaccttgccttctcatcactcatcagctcgtcgactcatcgggatcctgcacacaacgttgatattttgcctcctagtctgcaccagcatatgggcaagctattagtgggaccatggcgtcacctgtccctcgctaactcattagagtcccaccgcatcgttgcaacacgacaataggtgtcgcttgccgtcaccgtcatctaccgctacctcgcctcctgcactcgctcctcctacctgtcgttgtctcaccaacgccatctcacgacaaattcgatgactcgccagaacaacacgccgatgcggctgctctgccctagtgcctcg

SEQ ID NO: 97382 - DNA, 601 bp, Zea Mays
gaaagacttcatcctggttggtggatcatgactaatttttcgatccagtttgactcttttatccttcgttgatgaggctgatctctttccttcttgggtcttggtgcttcaatccgaattagggacttgtagttaaggaagctatgagtaggatagactctatgaggtaggtcaacgttggggatggatggactatgcattctaatactcattcttgtgaccatgactccactcgagttaggatcttgagccttatgacttggaccgtaaaactatatgatttaccatgatggattcaagtcacatccttatgtcatgatcttcaatgcaccatgcctcttctcatcttgatcaaccttgacccttgcaagaacctcttattcaccttatcttcaggtacctcagtcctcttgatcatctcccttgctctagtccctcgaagttcttcttgcctttgtccttggttcaatcaactatctccaagtcatatacattggatcccacttagcaatgtccattcttcaactttcttcatttttgatatccataattcatattcatcttagcttatttggaatatcacatttgactccatgtgtcg

SEQ ID NO: 97383 - DNA, 515 bp, Zea Mays
atctttgtgaaattttgtgaatcctgctggtggaatgcattgcattatccccattgtgtatccctgcaagttttagctccttcgggagggcattcccacctccaatggccgtttcaccaaaaccctagatccccgcacaccaagtgctcggtgaaatgcccaaaccagccaaacttgcaccaattgaacccaaatttttcaggcaccttcaccacacttccagtaacctacttgccaaatttcacgccaatccgagatcccaagcttaattttcaccaaaattcccgttttgcgcgatcgtttccgagccgagtgcccaaaaccctatttcttcgcctaaattcaaaccaagcacacacttcactcatattgacctatataaacctattcgtgaagtatcggctcaatcccatatcgtttcgtgcctcaattcgaattccaatcatcctatgtcactatttgtctgtcaaacgtcgttttcacgtcgtttgactttttgatcgtcctgtctcgtg

SEQ ID NO: 97384 - DNA, 383 bp, Zea Mays
cccgttacaagtcggtccccgagttaatcctacaggtttagctaacaaatcccgcaagaaatctagaaccctaactgattctatgctcgcgtggatggtccgtgccgctatggtggacagtccggaccgtggaccgtctggcctcagggccaaaccgtctgcctggacatttctgtgctcaacatatgccccccgccttttggtggaggttgacgaaccaaaagcatatgcactaattataggtaccgagttatattcggtactagggtggcccgatcttcacggcagtaggttgataatatgatggttggctataaaggtgacagaataacaaggtaaatttgctgaagaacaacgggtaatagactctatacctgatcaag

SEQ ID NO: 97385 - DNA, 928 bp, Zea Mays
gagtctggtgtcagtttaaaatttatggattaagagaatacgaattcggaagctcgacccactcttacgatttttatcccggacaaattaattggaacttgacgatagaagtgttgcaaaaattaaatcggactgagataattacagccaggacccagtattcataattaatccgtttctctgattgtaattgtagaaaactaatatgtgcagcccaaaaatcgctttagtccaaaccgtttatattcaccccaaacctactgctagaactatatatatatattattcgaaacagatggggtttatctgttttcaactagattcatgatagtatgaaatattctggccgatctcgtttggttcggtccgtatgttccttgcctagatccaaattttcagatatagataagagacaaaaatttatctaattcgaagtactcatcaaatcaaatctcatccaaatactgtcatcgatctcctttaggtacattttcaaaccctaattttagcaccgggaattgtacttattttttaaaaaaatgagaagtgaaaactctaaatttttctttctcgtttccaccgcctaaccttctccttatcctttctcacgtcgatctcttgctgatactcacgtcaattccatggaaaatttcctaaccatccttatctcttctccatgtcacttctctcatccaaatatggctcatcatgcgtttcctagaaccctactggctccttcacgtaatatttttattctctttgttatccctacagctgccgttccctcagatttttatctgccgccgctcaccctctagtggatattatctccccgccgccctgctctcttctggtttcttcagttcacgagctcattttccctgtcaccagagttcctaatttcgtttttttcctcctagctttgtgc

SEQ ID NO: 97386 - DNA, 1331 bp, Zea Mays
ttcttcactaacttgggtagctcattcttgaaaccacttcaatattccttgcagatattacatccttgattcaattaactccatccaatttttccaacactttagtagataccactttagtggatacacatgtggtcaaatcctttgttgtgagatgagttttgtgtaactaaggatctaaccccttatataatccataaatcttctcaggaattccaaagttaggccaaatcttttccaaaagatatttacccatttcttgttctaagtagctcgcactaataacaacattatctttggatgttgatcccttaagtagtaactgcctatcttttaatccttgcctccttggtaacaacacctcccttaggatgagaatcctggtttgactccaatgatcatgttgatagctcaatcccaacttagttaagttctcctttaggttctcataatccatgtagatgttactcttataatccatgctaatgtctcacttatatctaatagaatcatatttccaagttctgacaatacgaactggtcattccaaatccttgtacttactaggtaaacccaacttgctttggttaatctgatgctagaccatcacctccgtcttcatgcaaagacacattccaaaccaagacaatgtgcataacactagataatcaactcttgcattccactaagctgaacacgtaggttttacttcaacctttcattaactcctttaaacttatccaaaaactatttgttgcaacatacttgataccttctccaataatcccacaacacatcttagtatccatggaactccaagtttactttatccaagagagaacttccttcaaccaaagtccaattatcaagctaggtatagtatggatgcttctaattcttcataaaacaaacttagagatatcaagtatctacttgcatcaaaatatctccttgtccaaagtatgtggaaaattgaactctcttatgataatatcttgaattgaagaccaatcttgatgaaaccataacttccttgtggttgatcccactagctaacaaactttgaataaacattcctaaccttgatagtagattctaagccatagggatttccatcatctccaatagaaaccatacataactttcttagctgtatatgtgataaacttattcccatggttcaaacctgctggtgtagtcttattttgctaacttccttggatctgttcctttatgaacactctgttctcactccagttattgttgactcaggctttgattctcctccgcaatcttacagtaccactattagtgtaatgttccaatatcac

SEQ ID NO: 97387 - DNA, 357 bp, Zea Mays
ttcgacaccaaggtcgtaccagcaatatccttatccttggcgtcgtcgtcttcgtcgtcatcagaaaaaaatgagctcattactaaagccatatgttcctcttcttcttcattgtctaggagcggttcgagagcagtaactccttgagccttcaaagcaatggcctcctcgatcttcgtatcttgggcccgagaagtaatagattccatggtctctgaagttatgctaaccagggcaatttctctaatagtaggcggtgtcgcagcttcgagcgcaacctgcaaaaagctaaaaataacaaagtcaatgtaatagttttaagtttaaataatagatttcaatagttcgacgtaacgg

SEQ ID NO: 97388 - DNA, 893 bp, Zea Mays
gtaattttgtggccatgggaatgcctgaagctgtggtgcgagagggcttcgctcatcaaggtagttgagcccttggaaggcagctggtgaaaatggtgtaagttttggttagttgcgtcggccgtctggtggtgacgaaaaacttcgcactacatatcaacaatttcttgctctagctctctggattttgctcctcatctaggatcatttgtcttactttggcctacatgttggtttgctacctcttggctacgagtatctccctttgtttggtagtggattgtttttatgcgaagtgctcgtaatttgtgttgatcttccactaagatgtcgaagacttcaccatcttccgcgatgtcttcggcctccgggggtgcggggtaaaatctgatgggacgtctcgagggaggtcttcagaactgcacgtgcgattggtgcattcagaagtggttgggtcttcagttcagggatgcttgttattcattgctcatttattgttctcgggtgtggcctgaggggtgtcatcagtgagggctgcttcgcctttattttcagcgagggtcgccttcgcagtgtcgtcgagtgatgtgctggtcgtagttgtcactttcttgggggccatcgcgggtttgttgtttcatagcacaaatggtaagcgccaaatgttgggaccttctgacacgtgaacaggtgggcccaatcactcggaagacaagagaacttaggtgcacaacgtgacggcaggtagggaactgtagcgtctcgttatgcgtgtcccatctgtgtacaatgcaagggtatttataggtaaatgagaggggcattgggtccccaagtgctgttataacccctattatctgctacattcctggaatattcccctccacagggtc

SEQ ID NO: 97389 - DNA, 304 bp, Zea Mays
gcgggatatagaagtcatccctatatgagtaatcataattacgtcagatcgccttaagtcgctgctgacttaagtcgattattttcgttaatagggcgtagtggtcaccctgaattgcataggcatgagcatgttgcaccggcttaagtcgccactgactttagccgattgctccattagtagggcatagtggtcaccccgagttaagtaagcgtgagcatgttgcaccgccttaagtcgttgccgacttaagtcgattgctccgatagtagggcatagtggtcaccccgagttaagtaagcgc

SEQ ID NO: 97390 - DNA, 437 bp, Zea Mays
ctcatcgcagcaacattatggtgccccaccagcaacacattataaccatgccataccacctcatggacacatggctgaatactgttcgaccactagagggcctgagaggtatagggcaggagctggtgacattaataggacaactaacacacacctcagacgtccctaggaggaaagcgatagagtgatgtcaggcaacctgagatttccacccacaaacttaatggatggtcgcaagacatggcggagaggatcagagacaaggtaaccgggatgttcagggacaaactctgtgttagtgtgtcaggtagagggcaatcgtatcagaagccttatagccaccgattcgacactgtgccatatccacaggagattaggataccagacttctttaaatttttcggtgaaggtgggaaaagaacgcacgaacatatgaa

SEQ ID NO: 97391 - DNA, 366 bp, Zea Mays
gtggaattggattattttcattgagcctctcagacagtatatagaatttacatgacttgggccaagccagtacacaagaatcctaacaccaactaactctatcctagtcgtgatatactctaacaatgttaagtgcaactaagaacataagtagattcaatcaagatcctcagtcacaagaaacaatgtatagtttgacaaagcaaagttgagatcaggtccatatgcacctcaacactcgcaagaaacaacatatatgtttcaatcccaaagaggccaagtacatttttgggatgtcgctgcatttccatgacatggtgatagaattagaaaagagtaactcagttgttagtatgtcatctaaat

SEQ ID NO: 97392 - DNA, 435 bp, Zea Mays
gtaatagatcatctatagtgactttgatcaaaggagcacgtcacttacttcttttgacggttgaaaacgtcttaaaacacacctgtcgcgtgttcgttgctatgcccccaaggaaaacaaaactctgttagctgccgcccagaactagctaatggcttgtctagccagcttctttaaatatagctccctctcctcccctttctctggttcagctagcacaggcacctcactgcctcatcctagcgctgctcggctagcccagcagctaccctagctcggagcctccctatagagctggttgcacccatatggctgagctcccctctgcttccctatgcccgcatggtaaaacagccaatggtggtcatcgacctcaccaatgccaaggactccatccctccgccagcaaggacgtcgagccccaccagaaatcct

SEQ ID NO: 97393 - DNA, 555 bp, Zea Mays
gtttctataaggtggtctgttatccacactacaatctacaaacttcatcagtacatcctcatacaagtgcagatcaaattgcatggtgaaatgtgtacttacaaattcgtttgtaagtgaacttagctaattatatggatactcacatagttttttggataccgatcataccaataatttacgaggaggtgcacccattcagcttcccagtatctaattgtactatacactccttccataggtaagtttataaataaagcttcgttttccatacaatatgattatgctcctttttatgtgaactgcaatattggtcactctatatcagtaaagattgagtgttgcacatgtctaacaatgtgcagtgactgtaaatttgcatcccgcttatccagctgatcaacattgtgattggtttacattgcaggaatttctgtaaggtggactgttatccagagcacgtacttcatttgtacagccttatacaagtacagattcgaattgcatgatgaaatgtgtattttcaaattcatctttaagtgaactcagctaatt

SEQ ID NO: 97394 - DNA, 482 bp, Zea Mays
cttttcagtactctgtgtagttgaagcagtttcttttctttcggcagcagaagatgtccctgcgccaaactcaggaaccagggccggttcaatgtaacgtggccggtgggtaagaaccttcaatttttttcccttcggcataggcttatctaggctgtctggagcagaagttttcctcttttcccttgttcccttagcgggtagcggtagtcagggtatacgaagccgatggcgtcgaaaactctgtttaatcttttctttctccggccaccgaaggctgcggacaaggcattgtcctcggttttggattacgccccaagtaactcgtcgctagtagtttcaatgcacttcagccaatcatcatttggttcatcaaacttatctccaaacctgaaggtgtatttcagccggaccaaatcaccttcgctagaatcattgatggtttccttcggcatttcctacccttccacaagcggccacac

SEQ ID NO: 97395 - DNA, 1573 bp, Zea Mays
gagtgagaggcctgatgcggtgactgtggctagtattctccctgcttgtgctggcttgcaggcactaggcattggaaagcagctgcattcttatgttttgcggtgtggaatcaagatcaatgtgtatgttggagcatctttgattagcttgtactctgagtgcggagaatttgatgatgcgagagttgtcttttccaccattcaggagaagaatgtcaatgtgtggaatgagttagttcaatcatataccagagaggggaggatggacaaagcttgggatgtttttgacttgatgcaggaggatggattgaagcctgacattgtcacctataacactttaattgctgcatatgctaaagtgggtcagaatgaacaaacatatgaactgttttcacgcatggctgacgtcggcttaaagcctaatgtggtctcaatgaatgcattgatttgtggtttgcatcaacatggcctttacacagatgcacttgaagctttcagatacatgcagcgttccagtgatggaaaagcaaagggttggacatttcttgataatcgtggcccaattcaaccaactggcacaaccattactggtctcctctcattattggcagacctcaagttagatcgtcttgggaaggaagtacactgctatgctttaaagaatggtttggcatcaaacatctacgtttcaagcaaactagttgacttctatggtaagactgacgacatgacgtctgctgctaatgtcttccagaaaatcaggaataagaatgttgtcacatggaacagtctgctggcagcctacaagcataataggaagccagaagcaacactgaggctgctcgctgaaatgctcgagtctaattttgatcccaatttggtaacaatacacatagctcttatgtcgtgtggtatgacaatggcattgggatatggtagagaactgcacagctacatcataaaatgctggcctggtggttacccagctactcttgcaagtgctttgatagatatgtatggtaaatgtggtaatattgaggatgctaggttggtcttcaagtccatggttccaaaggacgtagcagtatggaacgcaatgatgagttgctatttgcttcataggatgcctaaggatattatagatttgttcaattatctggaacagtcaggtattcaaccggatcacattactttcattttacttctttcagcttgtaagcaagaaggtctgttggaggaagctcagagctatttctacaatatggaagatgtatatggcataaaaccatctttaaagcactatacttgcttggttgatatcatgggatcagccgggctactggcggagtcactaacacttatccaaaagatgccgcttaaaccggatgcgtgcctgtggtcgactgtgcttaaagcttgtaagctgtactcaaatctagagattggggaaaaggcggcaaaagctcttttcgagcttgaaccaaataatacttcaaactacatggtgctttcgaacatatatgcagacacaggcctgtgggattccaccaaggctgtgagggatgccatgaca

SEQ ID NO: 97396 - DNA, 467 bp, Zea Mays
gctgtccaaaaaacagatttgcaggtgggcgaacaacagtagtattagcagtttctggggatttttcgtgggtaattagtgataatcagtatgataatcatggagagctttgtcatacctttccaacaatacttatgcgctcgattcggagttatattttagtagatatcgctgtttgaatccgggtatgttgctgtccaaagaaacagatttgcaggtgcgcgaacagcagtagtattagcaatttctggggatttttcgtgggtcattagtgataatcagtatgataataatgtagagctttgtcgtacctttccaacgagtacttatgcgctcaattcggagttatattttaggggatatcactgtttgaatccgggtatgctgctgtccaaaaacagattgtagggtttatcttgtggactgttttgggctaattagggtgtggaatttaattatcatttgaa

SEQ ID NO: 97397 - DNA, 326 bp, Zea Mays
ggaaatacctcacacgcaaccggggatgactttcatatatataatcaagtacaacttggagtaaaagtaacatgatatacacgcaatcaggggtggctttcatatatatagtcaagtacaacttgaagtaaaagtaacatgatatacatgcaatcaggggtggctttcatatatagtcaattacaacttggagtaaaagtagatatacatgtgttagactatacatgttagactatacatatctctgatacccgcccacagtcacagcgtgagggaactagatgtagagattgaacctaaagtcattgaacaattgtacatgcagt

SEQ ID NO: 97398 - DNA, 473 bp, Zea Mays
aacgacgtgaggcattgcaagcgaatgtggactagactctgtccaaacacgtacacggtgcatccggaggccagagctgttcctggtcactaggcccccatgaccaaaaacttgcgaggggatgtcacggtcacgaccggtgtgtgcttcagtgcttgcatgtgcagcttttgtattggagcttggaggaggttgtagcccaccaagaccaacccgcatccgagcttgcgagtgatacaacgaggagctgaggcaaaggtcttgggtgtggggtgtttggtgacacgaacttgaattgtcgagtcgggccagacagtgaggtggaccgtaaaagcaggaatacaaccaggaattttctcggacgaatacgggaaccattaataccgtcgagaaacaaccattcctgattctgtccccattcccacaaatgtttttcccatttcccgtatctcctaaaaaacaatatacattcg

SEQ ID NO: 97399 - DNA, 343 bp, Zea Mays
gggtaatcatcccccagtgaccttgttccccacagtggaaacatctatgacctattgcttgcactggagctgcttggttttcctgattggttgctggggcaggaaggcgaggcgcctcgttgttctatcgctggtaccggtttcctccctgttgattgctctcgtggttctactgctgctaagggaattgcctttgatgctactactggtgttgatgttgatgctggtgctggtgtcattgagggtgaccttgcttgaattgttggggtgggttgcctgagaaacttggactacagctgctcccagcctgtggtccactgatcttgtgtttctggtcttccat

SEQ ID NO: 97400 - DNA, 870 bp, Zea Mays
gtgttagagaagtttggggccaaggaatatcctagagccatgaggagattgttgggtataaggcagagaaggggagtagaggagtacatcaaggagtttgaataagctagatatgttgctgtggtgcacaaccaccaactggatgacacctttttgagatctcagtttgttgaaggtttgaagggtgaaatacaaggaatagtgatggcttagcttccaaagtggcctaaaccaatataaactgttgtgcatcatcgatgtgctcctgcacgtaccatcaagtcacaagcaaagacgtcatcctacccaaaagcatcacgtggataatccagtggtgcgcagtcaggtcacaaacaccgacaccatctgaggtaaagccctctgaataaaaaacagaccaaaaggacatcgcgagtgtggaagtaagtttttctagcaagagtttttttaaataacagaacgttgggagtgtggaagtatgtttttctagcaagagtttttttaaataacaacatacctaacgtttcttttatttatgttcaaaaaagatgcaggtagagcttgatatcgattaaaccccactggtccctcgcctcacccatgcaagagccaaccatttgaagtcacctttgcgtacgggagagacaaggcagaccaggaagcaaaagaagcagaaaaaaacaaagaaaaagaaagctattaaatatgataaggatggattcgagattttcgatgaatctttgatttcagcattcgtccccttttgagtgtccagaagagtggttcactggcgctaaagaacatgggtgcaaaggccaggtgtcaccttttgaccctaaaatgcgtcgtaaacttgctgattaggtgaac

SEQ ID NO: 97401 - DNA, 451 bp, Zea Mays
cctgcctagggatgaaaacgggacgaatacagccagatatagggtcatcccatatcctaccctattgtatttctctcggatacgggaccggatacgggtagttaagattcaggacggatacaagatgggaccgggtaataatccggacgggtaagaaacggataacgaatactactcgggtaggtaccggataattatcgggtagttcgtccgatgatattaattgtccaaccatccaacaaacacataagttaagcaatacataatcatgtatatgatggaacaaatgtaaaaaaggaaaccgataaaattgacatcatgcagttcaaagttacttatcacaaggacattgtagaaccaacaccgcaatatttaaaattcataaaatattctagtttcactcaaaatttacaaataagttacaaaaactaataaacattttatataaaga

SEQ ID NO: 97402 - DNA, 657 bp, Zea Mays
gctggttccactctgaaattcaggtgttcagtgtaacagagtcagctttgggtgtgaattcaagcttgatttattaagaattgaaccatggttgctatgacaaacttgtagctagtttatagctctacaatattgctgcagaaagttaattgagttgccatttgaaattgggagtaaatcagcgctaaacctgctctgtcaggcgctctgatgaagcagtgccatggtacagtgtccgatatggatcagactgccagcgttggatcctcatcgccggtgacctccctgcgcaaggattcgtgctgccaccgcccggattcgcgctagagactaacggataacatcgcggggagagggaatcttcgccaccggtgagctggactccactccggtgaccccccgcacttcccctctaccctgcggcttgagctgatatgctcgccagtgaaccgccgttctccggccttgcgtcgcgtgtcccaacctcgccaccgcatcgtcgtgactccctctagcttcccgtcgaccaccggaattactgccacgacattgaacacgtattcaccgcgccagggttctttcttatctccggccgcccgcgatgttcgatcaaattaagcgccaccgtcgaaacctcctataaattgagcccgagac

SEQ ID NO: 97403 - DNA, 420 bp, Zea Mays
tggttctcctacccctgtcgggattcagcacccttaccgttcaccgccccgtcgtcacttcgactatggtaccctagaatgcaggacctggatagatttggatccctagatcgacagagtcagagtctgtaataatgcttagttcagtgtcttagtctagtcagtcttagttagagttatcttgttggatgcttgttatgatggacatgtactgaagttggatctttgtaatgattgtcaccaaggtgtgggtgtcccctgcaacttggtgtagttattaataaagtcagttatttagttgggtaacccatttatttcaatttcctctttatctgagaagctgtcagtgaagatggtcatttgttcagtgctatgaagattttctatacatcttttcttatgctgaaagactgcagaaag

SEQ ID NO: 97404 - DNA, 304 bp, Zea Mays
acctcgtttagagtcggtaagggttgtactaagttcaatactatgcagtactatgttcaattccaacagcaatttttgtggtttcgcagataacccgatttgaaacagttcgtagtgacctcgcccaagccattgcaaagatgcatgtatttgggaaggagttgaaagatttggccgaagacaagattatggattcgccagatacggccaaagatgtgtcagtgaacttcgcaatgtggcgcgtgtatgagcttgctcagccacttgaggacgaagcacagcgtttagaagatctcgaagctgg

SEQ ID NO: 97405 - DNA, 753 bp, Zea Mays
gcaacgaccagtgcttcggtgtggcaaacacctaattctacccctaacgaccatttcccctcaatcaattgcaaagttctagctcctaatctctctgaccacgttgacagcgcgaactacggatgaaccgaggcgttcccggtgatcctacgtgttctagttcaattggccgggtcgagaagcatcaagagaacacaagagtacttaaataagagcgaggagggcgtgatcggacctgtggagagctggccacatcgagctcacacacggtggggttcttgactgatttgggggaaatcacaaattggggagttgtgagggacgattggaggtgagggttagttcactaggtgcacaattatttagcggagcaggctggggcatcactttatagtttccaagggcggtggctcctaattttggcatggcgtgttggcggatggagaggaagaaggtcactggtggctcagtcatggcgttcaccggtgcagcggttctaagatggtaagcccaggcgtgccacggttactactccacactaaagagccacgacgtggcataattgaggtcaccggagtttccacgacgacaccggtggtacggccacgtcgcacggctaaaggcacggttgataagcttcaccccgcgaccaaatccgctccccctccgatcttttcacccgcctggtattatcctgttcgagtcctgcacgaatcgccacgatcagcgtgaatccttgcgcagaggtcactg

SEQ ID NO: 97406 - DNA, 334 bp, Zea Mays
gcctcacccatctctagcgatgtctccatgccatatctagtggacccatattgtctctatatctctctggctatggtccttttgcttgtttatactctttggtcattgttgtttgcatgtgacctctatcgtcgtgttccccatctccaacgatcgctccactgccaaaacttgctaatctcatctcatcctcctcttcttttttcatctcatactatcatcctctagactcctgactccccacctgaaaccctagatctcgttgttcaccattgtggtggtgctcctaccgtagcttgtcttcatctccacctctatgctctctagctctggg

SEQ ID NO: 97407 - DNA, 525 bp, Zea Mays
tagagatcctaaatcagaggagattagtttcccctttctgttgcaccttaggctatacagccttgtagctggctcctatgagagacaagcaataacacagtcatttcctccctcatccctaccactctcaagccttcagaagaggggtaaaacctcaccggagaagacggaccgagggtacgacctacgtagccgacggcccccttccctagactctaaggcccttgacaacttggtatcacggtcacgtcgatccgagacttccagttcttccgctacttccgccgcaaccagccacccagcagccctaaacaccgccaacccacactcatcacccacctccactgcaccccagcccagcgccatgaccgaacccaccatcgccgacctcgccaagttgatcgaggggctcaccggcaagatcaatacccttcaaaccgacatcgacacgatgaagaaggacaagacgtcgtcctcgggcgcccaggtgtcgagcggcggtttcgacgggcaacaccacaccga

SEQ ID NO: 97408 - DNA, 721 bp, Zea Mays
ggcggagggatcgaccggtacaagcggaggccccacaataggatccaaagactcggcgccctaaggcgaaggctgcggccatgacccacgcttgtcaacaaagcgggcccatgcggtgccatgctggattgtttgggcccacctgtaagccccagtctgggataggattgatggtgcgttagtccaagttatacttaaccatactgtaatgacctataatggcccttgaaggggaatatttcggggataatttaggtaaccagggggcataattgtacttataagggtgagaccgccctcctagttacgtataaataccccggcactgtaccttgaaaggacaggctaaacaacacttttgctctaaaccattgagttgcgaagcatcaaagcgttctcatatgtcattgcttggacccactcggccatgtgtcctcaagttccaacacccatcttcttgaaaaatctttctgtcatatgtgtccgggtctaagtaataaccttcatcatttggaataggtaatttaccatgtggtgataccttatacaaaacatctcaacccttatgatgtaaggtggaatcctgtcgaatttcgactagcccaagattcgaatgtgtccgctgtcggtgtttaagatccaatcacgcaccacgggagtacccacgcggtgcttttgggtacgacagtgtcgttgatcgcgactcgatggtttggggtga

SEQ ID NO: 97409 - DNA, 473 bp, Zea Mays
tatttagttgggaaatccatttgtttccactttcctctttatctgagaagttgtcagtgagggtgatcaattgttcagtgctatgaagatttccgtatatcttttcttatgctgaaagactgcagagtcaaatctgatatgtgtgtggtttctacagatgtctgagaacaggcgcagaggtgcgaggcgtggttagccagagcaccaggcaccccaggaagaggcagctccgcagcagcatttgccaccgccacccccgatgaccattgagcagatgttcttgatgcagacccaaacagtttaggcaattggtcagaccttagcagcgatgcagtaggtgctacatcagccaccaccaccacagcctctagtgcaagtccagatgccgcaagtgcctagagacaagcgggcagcgttcatgaggggccatccccctatctttgcccactctgctgatcccatggacgcggaag

SEQ ID NO: 97410 - DNA, 564 bp, Zea Mays
tccgagccgaatcatccccggcaacaccctcgggggctgggtaagcgccaacaccatccttgagggccgagttctctgcagcagccacctctaaggctgaaggtccctcagtcacttccatgggagcggggcaatccaagtcagcttcctgaccctcaagaccgcgctccaaggtcgatgaggcgcgggacgctgcccaggatgatcccaacccggtgtcgagcacatcagcacaaacatccatcgcgtcaccatctgccggttctgataacagatcctctggaaccatatcttcaagagtttgatcaaagttcgccagagacaattcttgtagaccaatgagggcagacaaagcaggagaaggaactccactactttccccactggctatgtagcgtcgactgttcttccgaataagagggatttcatcttcttcctcctcctcatcttcatcagcaacacggacagcacacccattggggtcagcgtcagatgggtcacgtccattgggatcagcttcagtaaattcaggcacgggcacttcctcagcagcaggagccgaag

SEQ ID NO: 97411 - DNA, 434 bp, Zea Mays
ggctactctagtgtccttctctgctagataagtttgcaaactagtacaagtctgacatgcacccaacaagatagatctagattgtaactcatcacgttcatcgagcaaggtgacatacttggtctataatttggtaatattcgacatgtcaagagcacactcatgacattcaatcttatcggacaacaccatagaagctctaacagactcaaactccgtaagtgtggtctcaaacttgcatttgtactctctcctctcacatgtcgcaaacctaagtaacttgtcctaactagctaaaactactgtcagctcatctaccttagtgtcaagttcattggtggaagtaataccttagatgtggagtcattgccaatgtctgtgctatcaccgctcaccgtgtcctcaccagtgccatggtgcagattcctccagcg

SEQ ID NO: 97412 - DNA, 410 bp, Zea Mays
atcagattgaggaacgaagctgcagaaaaagataaaattccgttttccttggtggacaaagtgaagaaagacgaggcaaaattcaatgcacaatctgaagtccataaagccgaagttgaggatcttcagaagaaacttgccgaggctaatgaaaattttgaacttgcaaaagtaaagcaagaaataagtgaatggtctaatgttaggctagaaaggaatgttaaggagcttcgtgaatccaaggagagatgctttgagaaatccttggattgcgtaagaaaattaaaaaccagctttgccaaggtgggtgcgtattctgttgaagaaaagttcattcgaggtgatcccgagggggtcattgattggataggtgaagaagccgaagcctttgaggagatccttagtgatcg

SEQ ID NO: 97413 - DNA, 709 bp, Zea Mays
gccatatccaaggtcgacggatcctccaccatcacctcgcttcccataatgtggcctgtgccatctccaaggtcgatgcatccaacgccgctgctacccgatctccaaggtcagtggatcctcctccgacgcccaccccacaacgtcgcctacgccatctcgtcgtccatgtcgtgtcgcccatgttggagctgttggggctggccaagtacggcgccactaggcggagggaggttctagagtctggcgacatgacggtgctgctgcggcaagcggaggcgaggacgaggcattggcccagacgctgctacacctcagctggacagtgatgaaggggtctgcggtctgccactatgaaagattcgctcggtgccctctgaactgcattggcatgtagatagaatggaatgtttatgtttgcgttggtgaatgtggtccctttttttgttctgttatttgtagatccgttcttgtgcttcttggcttttaggtgtccaagaattttgaacgccagataaatctaacataaaatacatgttttaggtgctccaaattctaaattggttacttgttccaaattctaaatttcaatactatgctttactttttgggcactatcatgttttatcgagaaaggacctaatatgttctcagcatacatttttattcaatatttttactgacgtttgatatgttgttgacatttaac

SEQ ID NO: 97414 - DNA, 504 bp, Zea Mays
aagtaccctgggttgctacaagcgttgcttattccagatcaagcatggcaggtcatttctatggacttcattgaagccttacccaagtccaacggtgctgactgtatactcatggtggtcgacaagttctctaagtatggtcattttatccctctggctcatccttatacagcctccaaagttgcacatttattcatgtcgacagtgtacaaactgcatggattacccgaggctattatctcagatagagatcgtgtttttaccagcactttttggaaggaattattcactatggcaggcacacagctgcgtatgagttccgcttatcacccccagtctgacggacaaacggagtgtgtcaaccagtgcttggaaactttcctccgctgcttcgtgcacacctgtccatctaaatggcatcagtggctctatctggcagaattttggtacaacacatgcttccattcagcattgggtcgttccccattcgaggttctgtatggc

SEQ ID NO: 97415 - DNA, 391 bp, Zea Mays
cacatcttcaatgcatgaaccacaactgctaattccaagtcatgagtgggataattttgctcgttggcctgagtgccatggatgcgtaggcaatgacccggttatcttgcatcaaaacacaacctagtccagtgccagaggcatcacagtacacatcaaatggcttgccgttgtcgggttgcgctaacaccggtgttgtggtcagatgctgtgtcaaggagtggaaagcatcttcgcacttctgaccccagtcaaacatggctcctttcttcaacaattcagtcatgggcttcgcaattcgagagaaatccggaatgaatcttcgataataaccagccaatcccagaaaacttcgaatctgatggacagttgttggcggcttctagttcat

SEQ ID NO: 97416 - DNA, 429 bp, Zea Mays
tgatgttccattatctccttcaaagtgcaaggtcaagagggtgaagcgagcagattgttggaaatattttaaggtggtctaagttcaatcaaagaagaagtttggggaaaaggtgacaaaggccaagtgcaagttttgttacaaactatatgtgtatcaacctgggggggcaacatcacaactgaatcgacatcttgataagtgcactgcctaccaaaacaagttggctgagataaagttatcacaatcacacttgacaatgcttcaaataacgatactgcaatcaccaatttgacatccaagcttcttgctagaaggaatgcacattttgatcctttgtattttcatgttcgttgtgcttcacacatagtcaatttggttgtaaatgatggcttgcaacttgtcggggaccataattaggggtacccc

SEQ ID NO: 97417 - DNA, 535 bp, Zea Mays
acaaattctatgaattgttttatattaaaaactcattttctaattcattttcctgattttataattctctgaactgggcgtcattttctgggaagtgcaggggtgttggtgcaaaagatcctaagacacatatcactctgcgcagaggaccgcgggttgaatctctaaacctataaggggttttctgcaaggtggatacgcgaaagggtatcggccgagcacggccgttagatccgcaatcgtcggtccagattagaccgaggtacacttgaacccgagatcgcccacatacgttggatcccaatcctacggtccacggcacactatccatccccttcccccacggccgcacgattatttatcaatggctacgattgatgaaccgaacggaggcctcaagatctaatcctagccgttcacgggcagatcgacggctggtagtgttttccccaatccacagctagcgacggcggcgccgcccacgattcacggcgaacctcgccggtgaaatcccaatcaagtgttccagtgccct

SEQ ID NO: 97418 - DNA, 287 bp, Zea Mays
cgaagtcctccgcgaagactatctgtgcagaagtcgcctaagggtgcagccggactagcacaacaagtgcgaaaaaccgaagtccaccgcgaagactatccgtgcagaagtcgcctaagggtgcagccggactagcacaacaagtgcgaaaaaccgaagtctaccgcggagactatccatgcagaagtcgcctacgggtgcagccggactagccgaaagtgcgaaaaatcgaagtcctccgcgaagaccatccgggcaacagcagcccaaaggcgcagccgaacgaa

SEQ ID NO: 97419 - DNA, 413 bp, Zea Mays
gaggacaatggttgcaagagaccttcctcagacgtccgctgaatcagccatgatagaatatacattactaaacgccttgcctcagcccccttggtgcagaatacgctcacccggaatcccattgactaaaatctgagtagaagacgtagccaacagcccactcataatatcacaccaaatctgcccaaattcaaacttcttcatgacttcaatcgagaaatcccaagacactgagtcgaaagcgtttgtaatatctaatttgaaaataacgcagggctgcttcttttggtgaagaaaacaggcttttgttgcactaacatgaagttatcctgtatgaaccgtttcttgatgaaagcagattgggttggggtaaccatctactacagttttccagctagcctattagccaaaag

SEQ ID NO: 97420 - DNA, 1047 bp, Zea Mays
cttgaatcaagtatgaagtgataagaaggggaattgctccctttattaactctaaagtagcttattaaagaatgaacaagatcaaatcttttggcttcatacatgtttttgtgaaattatataatggagatagaagggcaaagaaggggacaatgcttcaaccctagcagctgcattctttataatattacaagaccttcggccgaagaagtttttctttatgaagcgtgaaaagaagggaaggtgtttttttgccatcggctcgaacacggtacgtacatttatttcacgccatataaagaaatattgtacacactgcaattttgtagtgaatacaattgtttttacataatacaagacaaacacatggaaatgtttttacaaactccataaacatgagattgaaaataatttttacaacaatctattagtcttcgttcaggagtttctcagcagcttcatttagcactatatcaacaacttcgtctattgctgcatacaccaccttgaattcagcaaggatttctttcaacgctggatcgtcttcggcattataaggttctggtagtggagaaagttctgctgtgcaaaaattgttttgttacgtattacgaaggtgactaattatgaagtaaaattcaaaaagcaaataagatgtacctatgcgtctctataactgtgcagcatgttcaactttcttggcttcttcggtggcccgatgagtctgtaaaagccgaaatagtaatttgatcacaaaagtttaactaaaaattcgaataataagaatctagtatccaaaatgacctcctcttcactctgtttgatagcttcgtctgctatctctcttccactatggagccaaacttcagaataaaaccttcatatcatcaattgagactatgaagtttggttgaattacaacctttacatgtttgcagccagcctttttaagcaacgatactgcccctcgggctcccacgtacgcaaaaatctcctcaaccagtgaggactttgtcaaaagcctcaattttgccttctatccatttt

SEQ ID NO: 97421 - DNA, 578 bp, Zea Mays
cgaaaaccagggtcaagtcttccactagggtcgaccctctcttggtcttgactacgatgtcatcgacgtatacttccaccttgtccctgatcaggtccccaaaagaattactcatcgcccgcacaaatgttggcaaggcgtttttcagaccgtagggcatcacgacataacagtaaagcccatccactgttacaaaagcggtatgcttcctatcttccctagacatctggatttgatggaaaccagagtaagcatctaagaaagacaaaaggtcgcacccggaggtggaatccacgatttgatctattcgcggaagtggatacaggtctttgggacaagccttgttaaggctggtgtagtcgatgcacatctgaagcttcccatttgccttgggggacgatgactgggttggccagccacactgggtgatggacctcttcgataaagtcggtgtctagcagcttctggacctccttctggatgaagtcctgccgcttgatggactgtttgtgaggattctgactcaccggcctggcgtcagggttaatcttcagatggtgctcgatcacctccctcag

SEQ ID NO: 97422 - DNA, 446 bp, Zea Mays
gagccagctcctactgagactagaggagttgaatctgctgttgagggggaggccacttcctcaagggaggctccacaacatattcagcactgtcacccacctcagcagatgatcggggagcttcacgagcgagtcactcgctctaggtcacatcatatttctcattttgctcacttagcttttgttgctacttttgagccccgggatgtaggacatgctttatctgatcctaattgggttaatgctatgcatgaggagcttgaaaattttgaaagaaattaggtttgggttttggtgccacctccttctaactgccatcccatcggtacaaaatgggttttcaaaaacaaacaaagtgaggaaggtttggtagggagaaacaaagcgagattggttgcccaattgtattgccaaaaagagggaattgattacgaggagacctttgc

SEQ ID NO: 97423 - DNA, 567 bp, Zea Mays
cctgaatcaaaaagtacagtagcgggagtaaattcaacaaggaactcaccgagcactactcccggagcttgctgagcctcttgagcatcgacgtggtttactcgtgccctgccatgatactgggtcttgttctgctggctgatggaggagggtgccttggaggcgggcgctggggcactcttggggccattcactgagttggagtaagtaggtcctgatgccttcaactgagggcagttattcttgaagtgactggggttccatagtgccaacaggcattagctggtggtttgttgcttgcaactgagggggcctgaaaggagctctgactctgctgactgaaacgtgacggagtgggtccagctggcttattgaagcttggtcccttgggtggaaacccaaaggatcgtctctggtgccggtcttgctgctgagctcggaggacttggaatttcctcttgaggtgacctttttcttcttcccttgccctttccacttgtatggctttgtttgagaggtgcgagaaactaaggaaatcttggctagcgaggatggtcttgagttcta

SEQ ID NO: 97424 - DNA, 404 bp, Zea Mays
cgatggtagacccaaggcagggggagctatgtcatggcttgacgggggaagatcagtaggaacaatttgaagggcattgtcaggagtgatctcagccccaccagcacataacatacttctcgcatctagctcgccaacctctaaggcgacttgtttgttcaaagctgtggaagcatgcatcgctgtcgccccatcggatcgaggtggagacgacccaacatggacgtccatggaggtgtgggaaggagagcccacctgaacaccctcgggggctgggttgcagcttgcgctacccaccaaagccggatcactaccggcaacaccctcagggctgggtaactaccagcaccaccctcgggggctgggtcttctgcagtagacacctctaaggatgagggctcctc

SEQ ID NO: 97425 - DNA, 440 bp, Zea Mays
cctcaccggagcaacctcgccgtcggtaagcccctccgcccctttcttccgccgcggtcactgttccattagggaaggatcgcggcttcaatttcgagaaaccctagggggtttcctgcagagccgtagactcatgtgaatagtgcaccgaggacatgtctgtaattcgtttaaaacctttcgccagggaccccagtgcaaaatcgtttttcctttatccatttctaattaatctttttaaattcagcagagaacctagaaatttcatatcttgagcaatactccaccaaacttagtcaaaccaattttgctggattcaaaatattatggactatcaattaaaaatactgaaccctatgctttctgttttaaaatttagagtttggaattaattaaggaaactgaccaaaccttattaaattaaagaaaattagttatgc

SEQ ID NO: 97426 - DNA, 434 bp, Zea Mays
taggtggatgctttttgtgggaaagtgtcatattgggtggttgtggtgctctaggaaggggtcgctagagatctcgggcaagatattaggtgggttcttaagatggttaggtttgggacaccatgcttgtttttgaggtggtactcttggtggctcctcaaacactctgtctctcacagttggggtggcagattgggtggagtgaatttgatggaatgagaagtggttgtaagtttctataaaggtgtcaagccactacactcaccaaccttaccataacaagtgtccttaccatccctagcagcaaagcctaaccccagtgatgggaatgatggtcttgatcttccatcaggttcacgatcattatatatatgttggagattggcacaactatccggctccagatcataaagacccgaaccctgcaacctttg

SEQ ID NO: 97427 - DNA, 912 bp, Zea Mays
caacgagctctactcctccctccgctccctgctcccggacgccgaccaaactgtacgtgactgtactgtactattcagcatgcgaattagtcgatggatccatcgatcttgacttgacgacgacacatgtggtggtggcgcagaagaagctgagcatccccaccaccgtgtcccgagttctcaagtacatcccggagctgcagaagcaggtggacaacctggagaggaggaagaaggagctgaccaacgccaactgcaagccgggagttctgaaaaccaccaaggccgtaactcccattgtttctgctacctgcctcaacgacacggagatcatggttcaggtcagcctgcacagcgatgtggccgccacagctctccctctctccaagtgcatcaaggtgctagagaacgaaggccttcatctcgtcagctcatcaacctactcctccgcctttgagaacaagacattctacagcctccatcttcaggtgcatcactgcttcttcttttttttttgaaagaacgactgcttctttcattagatgcatgttcaatgttcctgccttcctctgacgttgacttgaatttctttttactctgtctaattagttagtataattgcactgatttatacaatctaacactattaccacagtcatctcaatttccacccttgcttttctagatgcttgctcaaaaaatacatgcagttccaagctccgaatcctcaagcaagaggtgtcactggatcactgagcatcagtagaatcagagaacgaccacaacagacaaaataaatacagacaggaaacaaatgaactcatcaaactaattaaatatgcaaacaagctataagcatgatcactatgattaaatctagaaagaatccattgagtaagtacaacactaaac

SEQ ID NO: 97428 - DNA, 801 bp, Zea Mays
caaggagttcatccatggcatggttaacaaattctgtcccattatcagcttggaagcatttaatagtgtagctaaactgtgtgcgaacataaggaataaaatcagcaatgtgctgacggacctcagacttgtgcttaaggggaaatgtccagcaaaaatgtgtgaagtcatctagtaaaaccaagtaatatgagcaccagatatactaggaaccggggatgtccagacatcacaatgaactatctcaaaaggggaaacagtgtgggaagtagatgtactaaaaggtagacgggcatgtttgcctagctaacaggcatgacaaagagtgtggtctactttattacatgaaattaaatttttcctcttgagactagataagactgctggaccggggtgacctaggcgacgatgccacactgaggaggaggctatgaggagggcgctggcagtggactgggcggctggtgaaagtgtgtagagatcgcccgagctattgcagcgaagaatcactcgccccgtcctgggttccttgacagagaaaccaaaagtgtcaaattcgatagaaccgccattatcgcgggtaaattgacgaacagataataaattatggactatggaaggagcgacaaggatgttgttcaggacaaatttagtggagttgatgtcaaggatcgatgagccgcgggtcgtgacaggaatacttgcaccattgcctaccatgatcgaagaagcaatagctgggagatgagaatgaaggataccttcagaggagtgcatatgtgtagaggcaccagtgtccat

SEQ ID NO: 97429 - DNA, 504 bp, Zea Mays
ggtgtcccaaagcattcttaaagcttcggacaatttggaacttttttctactttggcttcaacattttgtttcaattctttggcttcatgctcaaagtggcttacaatatctttaagttctttgctcaaccgtgaaggaactagacactctgattggttctgcgggcaagcatggcctggcccatttgagcttggcccactagaaacaatatccatactacgtacccatgcatgtagcattttcgcctgcactacacggacgaatgtagccctggcctccacgtaagtaggtaaccaaagagagtctgtcacttggtcagtgcatagggagagtccgaatgcgcacgtctaggtaaccaatcgtgcaaagagtgaaccgttgaactcagtcttagactagcttcaacgcaacctatgccgcctcccttacgacactttagcgacgacactttagcgacaatagaaagcacgacaaacactacatagtataccccttcgtgtccc

SEQ ID NO: 97430 - DNA, 334 bp, Zea Mays
ccagctttgaacagtacacatcatataccagcagcttcctgtaatatgtcaacatgtaaatttgtggcagaccgcgagtttctcactctaccttcttttgatctggtggttgggaagtattacatttttaccaaacagcctccatggccaccacctgtgcagtttgtgcttcatggtgggattgagcaagaatacatatggcgagtggaagagctattgtttcaagttgctgtacatgaagatgatggaaacatgataattcagtatatgcaattgcatgatgtgttctacagattacattggcttgacagttatgcaagcggcatgtattaca

SEQ ID NO: 97431 - DNA, 392 bp, Zea Mays
tggggagcggctcgctggtaaagccttaattaagtcagtgatctcttggtcagtgaatggggcttccaaatgtgaaaggtcatagggtatgtagtcgagggatgaccagttaaaagccatggtcctaacagagctcttccctagaacattctggaaatgtgagaatgtcgcctcttctttttcttcctaagtgaatgccattcctgagctagtgttgatgttcgtgatataaatttttttccgcctgaccgttgcatgtatttggaaaaagaggtgtttgtgtccccttggcgaatccacgatagtttggaatgttgcttggccctggatttttggatggctgctaatccaagggcctttgttttaagatagtgacggaactccagttcctc

SEQ ID NO: 97432 - DNA, 416 bp, Zea Mays
gcaccggattagcctccgcaacctcgggcggcgcgccgaccagacttccaaagtcctcaacgtcctcggcatgctccatctgcagcaacagcacattcactcagcaaaaactatacataaccacacgcaaccaaccacacaaaaataataaccgttacctgctccctcgcctggtcggatcgctccctgacagcctcccgaccatgtgccccccacatcctatcaaaaagggcccccgctgactgcttcacaatggggtcttcggccttgaagatctcgcgctcaaagctctcgtctgcctggtcgaaaacttcatagtgtttgcagccctcacgggacaacgcatttatggccccctcgcaggtgacgagggaggcaaaggacatgaaaccttccacgatggttgggagtaccag

SEQ ID NO: 97433 - DNA, 438 bp, Zea Mays
gaaaatatttttcgtgctatcgagctttgtgttgggtttgtcattttggctttctatctccgcaaccataattgcttttgagcttcggctttttgttgcaatcatcgctgaaatggccaaagagaagaaaaatgtggatcccgcacttaccgaaacaattgtgttgctttgttcttgatgtatagcattcgagaacaagaccaacataggcgcccaccgtgggtgaactcatccgaccaccttggacaagcatcgaccttcattatgccgccgaagaaagccgggccagtggctgcactgcagctgctggatgttaatgaggagacgctacgcgaagctaggagccagaagaggaaggctaccagcccaacacctcaggaggaggaactggaccaagagatcagggaccttgaagctatccatcaacaggttcaaaag

SEQ ID NO: 97434 - DNA, 793 bp, Zea Mays
gtaaaagccatgcacctggggataactccggtgactcaccgccgtacccctcgtgctccgcggctgtggaggataagttcaccgacgagagccgccttccggccttgtgccacgtgcctgagtacctccaccgcaccgtcgtaagccttagtgactctccgttgatcgccggaatgaccgccacggtagaagccacgaatccattgcgccagtactttcttccacctccggccgccgcgcgtcctcctcaaaattcacggccaccgtcttaccctcctataaattgagcccgtgactagctccgtgaggtcgtcagctaactagccaccgctaatcagccacaatcatccaccagcgagcttgaatttcacagttcccccaaatctttttccgccaccgtgaaacaagcttccccgtcgtcagccctttttccggtcagtccaaccctccctctgcttcgtttaagcttctcctcgtgtctgtgatgcttactaaaccgtccaattgggctagaagtcccctgaccgtcgggaacgcatggatctttggtccatccgtgcgctctccgtggccagaccaaattaatccaccaattgtgcaattaacttaggggaatcgttggccagggtgtgaattcggtttcgaccgaagaaggacgtcagtccttgccccaatcggccggcacagacagctcgccggagctcggtcgtgctccacgccgtcggggaccgtgaaacgtaaaggaatagaactcgagggactttcttgcaaagtgtcagtgactctgttaaat

SEQ ID NO: 97435 - DNA, 351 bp, Zea Mays
ctttgtcaccaccttctccccatcttcatttacaagctcaacgtacctcgacttcccacattttaagcatttctgctctctaccatgttacttcccaaaaaagcatacaattgtcctaacaaacatcaatattctcatactccataccaagaccttcaagcaatttcttggactggtacatgtctttgggcatcttgtgacctgtaggaagaacctcgctaatcaaatccgcaagctccttgtaacaattaattgagaatgcaaacttggacttaattgacatcagctgggtcacgaattcgaggacggtcacgtcagtgtgcacgtgaagaggctcttctgacgctttga

SEQ ID NO: 97436 - DNA, 578 bp, Zea Mays
aaaaaggttagaccttcatactgcattcatatgctaccttcagaaaccacttgtaatcctcaacctcaaagcaatacatccaccagaaactcacaggatatagggtgttacacatctaggcagtctgaacctgtataatttgtcgtgttttttcgtgctgtgcacgaaccatggagttgcgatcaacttcgccaccctcccaaaatcactacgtggtatatcctgtagtacgccgtcgaaaccaaacaccaatagctggcgcgccaggtaggggttagaacgtcgattcacgatagctctatgtccatcttgttcaacatcgtcttcaacttcactgtcgatgaggttttccacttcgggtccctctcctgcgtcgccgactgaaagggcgctccacaccgtgtagcgggtgtggagaaagatgctccgaggtctcgtgtcatcgtctcgacagagaagatgccattgtcaagattggggatagccccggtgatggtcgtgactaaatcctaattggtcgggactcgacccatgtcggcacgtccctagacctaggggacccgacttacccatgcgcg

SEQ ID NO: 97437 - DNA, 1051 bp, Zea Mays
acgacgcccaagcgcacgaagacgctaccaggtgcaattcagcgcaaacacaacaaatgaaagacacattatgttacaattataaggtgcgcactatgcataagatattcaccccacatagatgtccccatagccgtcctttagcgaagggggagagggcagcattttcacttatcgtcgccaaagaacggcgatggcaacactcattattacatcggttcttgtttcggaataagaccagcttctcggaaattaaacaacatcaacctcaactcttccccatcaaaaaggtcccgcagatccccctccctgatacacgacccggacatcggcgctaataagtcatgatgggtcccctgatccagtcgtggtccgatccgaagacgcgacctctccatgcccattcgacgatgccttctaacacctcgcgaagactctccgacactttgtttcgatacccccatcttcttttcgcccccgcgggtcaccagggactacaccgatcgaagtccgcgacgcatcacgggggcgaccctcaacagagactccattgcagctaaatctaacgccgcaaaataatctaaaccatcctccgaggattcgttatctatccaagaaaaagggctccccaactttccaccttccgaagacaacgacccaacatcagattcgccagatgcgtcactactaggaaacactgcatttccatccatcaaaatatcatcaatcgtgtcatcgtcacggtttgcttgtgtaggcccagacaccggaacctgcgcagcaatcgatcttcagtatcacgcacaaaacgaacactgtcagtctattccctattacactctcgcaacctacaccgaagcgtctgccattgcaggaccctcagctccacctccttggagcaaggattgctcttctgctcccgcctccactgcagcatccttccgggtcaccgagctttcacggttggcgaggtcctccacatattcttcgttcatcgcctgcgaagacaacacaataacatttcaaacaacgaacacacacaacacccctc

SEQ ID NO: 97438 - DNA, 414 bp, Zea Mays
gtcgattggttttgtatctattgtggctatgtatacttacttctgttctattaatatcctattaagcccgcccggtgctgttgtttaatagatgtgtatcttttgacgaacaaatgtgaaagtgattgccaatcttaagtgaggaacggagggggatgcttggataaattttcctgaccccatatactgtgtcttgttctactcattcggtgaccatatactgtgtcttgttctactcattcgaattgttgtatggattgtaaaaaatgatgcactggtttgaattagatgaatgctctgaccctgaaaatgagaataggctgtatgaatggtccaatggagctgttgatttattataaaaactaattaattaatattgtgaattgaataattaaatttgtggaactaactaat

SEQ ID NO: 97439 - DNA, 506 bp, Zea Mays
tgcgctccaccctccattcagcacggtatcatcaagaagttgggagctgaattttgtaaggtggacccatccaaacctaatcttgttgacttgagcagatctagggccactggtattgctattcagaggccagatgctcctcccagcagcaaggacgatgagcctaggacttctaatgaccaggcggtggactccctctttgatgataatgatgatgcatgatctagtgccccggcggggttgtaaggcttttgcctcccctttttgggccttacagtgttatctgtgccccggttggtggatattttggtggtttcccatgtatagcaacatgataaatgttggtgatggtgcacatgtggcgctatttttgtttgccgtaacaaactctgaaagatttgatgactctttgattctcggcatggataattatggtgtttggaatttctattatttgttatgttggctccttttggaaacttctagtttggcccctttgaagtttt

SEQ ID NO: 97440 - DNA, 650 bp, Zea Mays
tacgaaactaacacaacttgaacggatcaaaacggagttaaaatgcactagatatggattatctaaatttgtttatataaatattatgcttaaaatattccccatgggctgttttgaaacttctgtggacctagttgtgaaattcaaggacttatttataataattccctgcttgtgtggacggcgggttgattttacaaaagccgaggggctctttatgaggtttggctcggctgtattagccccgtgcacatcacaaccgatagatatgagatcaatgtcacatattcaaccaacgaaggggtaagcgcctagtctaattgcagccgtacgattttgatccaacgactttgatcactctgaccgaaccgtcaagctgatctaatcccaaccgtttctccgtgaatcaacggcccatgattgtcatccttctactgacatgagctccgcggcggagccggggtatctacgacggcccatcgctggagttgggcgcccctcccaactctgaacaccccatcgaccaacccccggtgtaaaacaaatatctcgcatcgaagaaaaatgtgaggggcttcttacgtgtgattacgtgatgccggtggatacccacgccacggggaggtgcgttctgtggcagaacccgaaac

SEQ ID NO: 97441 - DNA, 370 bp, Zea Mays
attcaatccacatagatcaacgaaagcgaacaagcccttatgtgggtgctccaacgaggactagtggaaagtgttgactcctctgttgcctatgaccattgccttgcccttgtcgagcctaggtggttgagagggatcctactcatctcctctagaaaggggtggaccaaacctcttggtccaaaccatactactgactatcaatctaagcgattaccattctctgaatgctaatagattgtcctttggttgcccactggttgtcctctgactaccaattgacctcgaaatcccaaagaatcactcactaaacttcgtgaggcttggccacagtctgtacccatgatcttggccccgagtgaatcagacc

SEQ ID NO: 97442 - DNA, 626 bp, Zea Mays
gtcaaattaatggatgttccttgatcgtcctaggtcggtgaagcctccccgatagttagccttagcagtcgtcgccggccatggccggtatgggccgcgtcagagacgaacggcgagcgcgccgcgatctgggaaccattcggagaaggaatagaagtgtgagggtatttctgcaagatgtcagtgactgttaaaacagtgttctggactccttcggattattcaaacctacagggtttcatttgcaaagtcaccatcgcgtgcgcgggcgcgtccctgttctggtgcaggctgggccgtttgggctactttcggcccagtactatttaagctttttccttttctttttctataaaactagagaaatctgtagaaaaatgtataaaaatggtaaaaatgtcaaaccaattttcctaggttccttattttccatagtatttaataaaaatagttttatgatttttaggtcaaatagggaattttggagcatttaaaatagcctaaaaccttgttcctggaattttagaaaataaataataatcccacaaatcccctaactttttagatgacccttatacattatttagaagccttgggtagaatttggtatgatttggaccttgttt

SEQ ID NO: 97443 - DNA, 407 bp, Zea Mays
atcaggctcaaaccaaggcctggcgcgacaacgcagtcgtcccaagagaattcaacaaaggagacctcgtactcgtccggaccacccggacagaatcacggggcaagctggagccgaaatgggaaggtccattcattgtcaagtcgaaggcatcccccagcgcgtataggctggcaacatcattcggcgaggacttagagcattcctggaatatcgataatctctagaaatttgttgcttaaatctcagggcctacgcgcctatgtaattctgcaaacaatgttgctcaggcccatgctcttttcctcccgggggtgaggtttttaacgaggtggagtcatataatataccagtgaaaagccctcgcaaaaatatccaagtatcaccatgtcgaaacagaccgcttc

SEQ ID NO: 97444 - DNA, 446 bp, Zea Mays
caattatatatttgttcaaatatgaaatctccttttgtcatgaaacaatatgatcaattagagggttgtgttaaagctaatcatatcgaacatttcacttgtccttctttgtatgtttttcaacaatagggtcaacttcaagaaggggagcaaggttggatgatatgaagcactacatcaataccttatgcaggaaccaacgactttcagtcgaggacgactcaaaaccaagaaggggagaatgatgagtacatggacttcaactatatggttaaggtccaatcaatcattgattcccaagctcaagagaagtttaagtccagtttattcgcgaatccggttcggactacaggagtgggcctcatgaaaacagacgcccaggccacatacggactccattttcaatgttttagatactgttggaaatctaagaagataagctttcc

SEQ ID NO: 97445 - DNA, 534 bp, Zea Mays
ctaaattcagagttacggttacgaggatatgattttccaaagatttaggtgattaaacaataaaagataaattatatgttaattaatacaaatcatgtgagaattaattaaactttaatccgagatattacttgattataggttgtatttttagtcaggttataatcatgaacaattaactttgattagcaagataaattaataatcataggataaacaatataaaagtaagtaatatgttgtaaataatgttgttattgcgtagacaaatttgatacaatactaacgcaacttgaacggactaaatctgagttaaaacgagcaatatagggattaatttagtttttggtcatttttataattaaatcgagctctagggacttatttgcaattctcagggactgctaggtaatcatcttaccgcataggtgaacaacgggttgattaatatagagcaccgagtctcttttgcaaaagtagacggccgaaggggtatgagcttttgtagaccgttagatcgatagtctacggtgc

SEQ ID NO: 97446 - DNA, 670 bp, Zea Mays
gtttaccccgactaccgctacccgctacggggacaagggaaaaagaggaaagctactacttcggccaccccagatgaacctatgccgaagggaaaaaagttgaaggtcctaactcaccggtcgcgtttcatcgaaccggccgcgatacctgaatttggcgaagggacctcctcggctgccaaaacaaaaggaactattcctcccgagaagaggactgaagaaccggctataatgtcgaaggtacctacagtgaaggtagttgaaacgaaggttgataaggctaaaaagccagaaactgaagaaataacgaagatgtcagaggttttgagccctccagtaaaggcaacagtaccgaaagtacaaacgggttctattgtaactcctaaaaggagaaggatggtaaatgtattagatgtgttggaaacaaccgactccataagtcccgctcccacggggaaggttgccgaagctgacaaaatgcaacccaaagctgatactaagcaaatagaagttgaaactacaataacccaggctgaaaccgaagcagggtccacagtgcctgctgagatggagcttgccacaaccgagcagcgggccgaaagaataactccagatagtaatatagcttttgagaaaagtgcggccaaagaagacgaatcccttgctcccg

SEQ ID NO: 97447 - DNA, 511 bp, Zea Mays
tccgggcaaagccaatgttatggcagatgccttgagccgaaaggctcagtgcaattgtatgagcatggatgtaagagttaccaccctgtgtgatgagttgtgcaagctgaacctggaagttgtttcttcaggtgacttaaattatatctcggtggagcccacagtacaagagcaaatagtcagggcacagattgaagacaagggtgttcaggttatcaaagaaatgatcaaacagaaggcagagaaatacaagtgcttccatcaggacagcaagggaattctatggtttggagatcgattggttgttcccaaggaccctgagctcagaaagaagatattggatgaagcccacctttcaaaattctccatgcaccccggcagcaacaagatgtatcacgatctcaaatccttatactggtggaccagaatgaagatggaaattgccaagtacatatccgagtgtgatacctgccagaggatcaaagccagtcatttgaaggcagcaggccct

SEQ ID NO: 97448 - DNA, 291 bp, Zea Mays
ctgggtcaaactatctctcaggcaggcatagttgttgatcctgataaggtgcaagaggtgatgaactggaagccgccaacaactgttcgtcagattcaaagttttctgggattggcaggttattattgaagattcatttcagatttctctcgaattgcgaaacccatgactgaattgttgaagaaaggagctaagtttgtttggggtcagaagtgcgaagatgccttcaacacattgaggcaacgtctgaccatagcaccggtgttagcgcaacccgacagtagcaagcca

SEQ ID NO: 97449 - DNA, 484 bp, Zea Mays
atgtgcatcctctagctccaagtgtaccctagagaggtccagggtagcactatccaggtcggtgttaagacctgccaccacaccagctaaggtgttgaggcgatcttcatttgctccacccagaacaatgatggtctggttctctccacgaatacacagaggaagatgcttgtacttcatgttgtgcagctgctgccggtaggtgtggctgagagaccacagcgttcgcctagcagcgtcgctgaccgaagcagcgtaggtggatagcggtgtcagagactcatgtgctgacaaagtcctgaaccctctatcacctacatccattaccctgacatgaatgcgagtgatgtagtagcaagcccgaggaggctcgtacactcgccttgtctcatacaggggtcggacgtaggttcccaacacgtgcagaacatcctgcagcaggttagggaagtgccctgtctcgaacattgaggtgtaatgttca

SEQ ID NO: 97450 - DNA, 382 bp, Zea Mays
gatgtatttcaagttggagcgattacctagaacttcacgggaaagcaatggctcttcaatcggggctccaaagttcgcaggttgaaggagcggagatggattgaagcggcggaagacacctggcaagtcgccttggccgccggaatggaggggtttccttcctgtttggcagatggagaagatagaaacccctatggactcgcgcgggtttatctctgttgattgcgcgaagacggttttggaaaccaggaaacgagggagacatgcgacgctaactgagacagaggctaacgacgaccgtgactgtgtatatgctgaccaagtctggttcaaccaaaagtgcatattgactggcctaggcttcctctattattggaagccc

SEQ ID NO: 97451 - DNA, 439 bp, Zea Mays
gctctctgaattcccttggcacatccaagttattatgcttatccaaatagcaactcttcagagctcttgttgtcaccaggtattcaagtagttcttttgttagcagtgtcagtttcctgtacgcatttttcaggttaaaaacctgtatggtcactatcaactctacctttctaggtgtattgttcctactgttgtttatggatctcttaattctgagatgttattatctctatttatttggcgatgtaacattaatattatgcattttttcacggttaattgtactaatgttgtctcatgatatgttcatatgaggtcaattgtgtgttaataaccatgctacagcctacagctcttgtaatgggtgatttttcatatttttaactggtttgtgtattgtttactgtcgtttaagtgttatcttgcttctgcctccccc

SEQ ID NO: 97452 - DNA, 1241 bp, Zea Mays
ctccataatatggttagtcccaaggttaagtacacaataagctcaagaatgtaatgcattactcataaaaatcccgtctgaagaccgtgactcaaatttatccaaatttccctatttaatcatacatcatttacaacggaatgccctaaaatggcttatcttgggtggtaatccaaatcgtaactcataaaaagttttgtccaagaagacttattaaaaaatatgattagacacaagctgtgtagatccgttcatcccacaatattctaggagttctatgctcatcgagcatcgtccaagacatctcaacaatgttctaattcttccattcaataatgccatttcattgagttacatacatcgaggaaatttgatgttcaagacttaaggaagcacaaaaggtcataaaatgagtattcctgtttttttgtcgttgtcgctgcaaatatctttcatgacatttttcataaactcattatacaacctaagaatcaaatcttgagtgtgagaaaaagtcttgttatttgcctccatgaaaacacccaagagtagcgagaaaagtcatcgacaataattaaaacataccactttcctccaatagagaaaacccgagctggaccaactatgtcgttcgtttgcttggtcatcaccttgatgaccgagcggtgtgaaacgacaaccatctttctatcaagacagggatgaaaaacaagatctttctcatattttaatttggacaatccttaaatgcgaccaagtgagcttaattgaaccaaaagataaaaaccaaatgacctaacatcctatgccacttgagaggaagatcctatcataagacatcgagaaggaccagaagaatggaaaaaatagctagaattgaaaaattagctagacaaactcacccaaatgagaaaatttgataaacaagatctctcttgtcatccaaaaaccttcataaagtgcacctcgaaacggtcctgaaggagttacgaaatagaaaacaaattaaaatgcaaattataaataaatgcaacactcttaagaataacgctctctttcatccaaatatcccacgagctacagaattattctaaaagtgttgtactcctttccaatcacaaaggcagaattagggaaccctctagtttttttcatcatgtggcgcgaataggcagaatctatgagcccaacctccactgattgacatacgctagccgatcgagatggcatggccaaaccag

SEQ ID NO: 97453 - DNA, 448 bp, Zea Mays
aggggtcgagaactttcttggttgggaccaatatttcggactcttctaaaccatcaatgggttatgtgcattcttgagtgctgaccaggcattaataccaagaggatggtctttttctttgacgagtttatactacaacaaagtatataaaagttgattatcattttgttcaataaagagcttttagaagaatatttgagattgattttgtttctttgaaggatcaggtggctcacaaatttctaaaagctttgctatatgactactagagaattttaagcataatctaaacccaaagaatgttaagattgaaaaatactgaattctccacttgacctaaagaatgtctctttacttttaccacttgaccactgatttctccaaacttacagcttgaccactgaattctccaaacttaccctggtgcgaccgtgttttagggtcaaag

SEQ ID NO: 97454 - DNA, 345 bp, Zea Mays
gcaggtccggtcgcgagcgaagacgaagaggccgcaaatccgattccgccgaggttcgtcgcgaccgcttccttcgtttcccgctccgagcatcgacggcttcctcggatccggacatcatcacttcgattcctcttgtttcggtcgtaatcttcgcttcttgaggtacgcccttcgtcttctatgctttgtgtacttcatgcgcctccgtttgatgaactaatttctacaccaatcgactattcctgttaaccgaacttcattacatgcgacaacaatcgattaatccccggtgcaaacatgtacacggatctggtgtgccttttagggtttaatttttatggg

SEQ ID NO: 97455 - DNA, 593 bp, Zea Mays
atttttctgtcggccttcattttcaggattggattcttcgcaagtttaatcgtccggttaatcctcttccaggcaaatttgaccgccattagttcttccttgtcgtttctttcggcagatgttcctcgcgtttgtgtgaagagtcggtgggtcttctgcttcaatccttcattggtgattctacgaagcttttcaggccccttcagctgtcagaccgggtttttcgattttcgctttcctgcaaggaagtgggcttcgcagtttataggcgccattcatttagttgttcatccttcaaagcttatctccatctttggaattctggcggccctaattggatcaaagaatggcagctcttttcggatgaagaatcaagctcttggactctggtttcccgtggtcacattccgaaagcttcctatgctaatattgctcgttcaccagttctgtctggcgcgaatttggttcccctgggtggacaggtcagggcagggcgtttgaaaccccgttcatcagtgttcaatcggatctctttcccggttcgtcatcatgttgatcagccggtcactcactcatactctcatgaacagatt

SEQ ID NO: 97456 - DNA, 340 bp, Zea Mays
gaagcaaggaaagaagagaaagactgctacttcggtgacttctagcgcgccgaagtcaaaaaaggttaaagttttgacgcgtcgacccaagtgcattgagacggccgaagtgccgaagctaattgaagggtccgcttctatgtctgagccaagtcgctctgtgcccgtcgaagctaggacagaaccagctgaagagccgaaactggagaaggcagcagagcagctgaaggccctgagtccaccatgcataacggaactgccgaaggcatcaaggatccctacaacaactccaaggaaaaggagaatggccagcatgctagacgctgttatggaatctata

SEQ ID NO: 97457 - DNA, 397 bp, Zea Mays
ccactttctggaagtcccttatcttgtaaggacagggtaacagagtgcaatgtataggaagttggggatcaatgaaggttgattccatattgattaggttatgcatgcatcatgttaagaatctactaataaatcttcccatcttatggagacatggcgcgtacaagcaaaactgcacgcaagtctactggaccttttggcgtgcctcgccatcagctagccccagacatgaagggagtagtagtggcaacactaacccgattggagacttggaggccaaggtggaaccacttcggtcagagctacgtcaccagaatagggcatgggcgcaggacagccaacgcatagctgaattgtcagctgacgtcagccgcttgcaatatgagatatcagaacg

SEQ ID NO: 97458 - DNA, 698 bp, Zea Mays
tggagttattcggtggatcagcggtgaggccaaagcttttgacaaaattttcagtgatagaggagacttctgcgccttcgtcggcatccgtggagttgtgtcactccttgagaaggttggatgcgagcatgcaaaggctacagttcagccagaattctcggtctcagccaatgacaccaagaacccttcagccgaagtcgttgcgctgagtggaatttttttctgatgtctagttgagaggtggccgggagatagctgacgaagcttatcagaaaaaatgaggagtctcatgctgctttggaagaggcgagaaaggctgaagcagttgaagagcgtgaaagacttatatgtatgcatgtcgtgattctagcttcgtaaattgttttagcttttgaactaaagaacacttatactatggtggagccaaactttctccccctctagagccatatgaccctaaagctgatccatctctgaagggggctcttgaagtaatcaggatggctaacgaagttgtcgacgaagctgtagataggcttctaaacgaagccgctgaaaaagtcctaaaggaggatagttaggccttgcttgcttgaactgtagaatctttgtatgtagtttccctttttaagaaacaattattaactatatgtatattcaatgatgtaatatatttctttgtggagcgtgaaaccttc

SEQ ID NO: 97459 - DNA, 511 bp, Zea Mays
gtaatgaatgtcgtcttcagaatgtccgaaggtcgaatcctgagatgatgataacctgacctcagatctatctttgagaacacactggctcctctcaactggtcgaatagatcttctattctgcgcaaggggtacttgttcttgattgtgacctcattcagagctcgataatcgatacacatccttctggtgccatctttcttctccacaaataggataggggcggcccaaggcgaggtgcttggccggatgtaacctttctctgatagctcatcaatctgcttcttaagctcaaccaactctggtccaaatactctgtaagctctcttaaagatggaggcggttccaggaagaagctctatagcaaactcaacttttcgctctggtggcatacctggtaagtcctttggaaacacatctaggaactcggacacaaccttgatgatctctagtgggtctgcttcactgctatcaacaaccatctgataacaacttcctttctttggctcag

SEQ ID NO: 97460 - DNA, 354 bp, Zea Mays
tttcagagcatgatatcccaaatcatctttctgatccaacagtatttctttgagcacaaattgagagaaacttgagcgggattttagggcaactagagtagagcatcacattgtttgcatatagtagatgacaccatactttattttctttataaagaggcaaaacacaataggtgcaagatattctccaaatttattcatatatcacttggaacgattacacatcttgaaaggggcaacaacttgacatttttttcgtgagacacactccttctagctaaatggtatattattcttccttgtcagatgtaccaatctgagctggaggtcggttgtcttcaactactattgttt

SEQ ID NO: 97461 - DNA, 959 bp, Zea Mays
agcaggagttgatgtcttcacagactccataacaacatctaacacgctagccattctccttttccttagagttaccgcgggtatgtttgatggcttcggcagttccattgtgcacaatggactcgatacctttaacggttctgccgtattctcttgtttcggctcttgagtcagatttgtcttagcttcgactggcatagagtgacctggatccgtgaacggaaccaccttttcacttagctttggcacgtcagccgtctcaatgtgcctaggtcggtgcgtcaaaactttaacctttttcgacctcgacacactagaagttgtcaaggtagcagctttccttttcttcccttgttttcgcatgggataacagtagtctgggaacacaaacccgatagcatcaaacaccctattcaatctctttttgccccgagctccgaaggcagttgtcatagcttcatctttgtcctttgaatatgctccaagcaactcatcgctagtcgcctgtatagcatctagccagtcatcatttagttcatcaaactggctcctgtatcaaaagatatacttcagatagactaaaccattttggctagagccagcgacagcctccttctgcatttcccatctatctgcatgtggccacactctgtaagtaatatgctcctggaccaaatctcttatgtctatgtaagtgcacactgtattgaaggctgcctggcgcgcctgcacgtcatttccaagggcagtgggtggccttctaatgccgaagcgagaccatatagggccctgaataaccccttttatatcctccctctgactcagatcaaccttcacataaaaccattcttgcatccaagagcctgaccattttttccgaaatgtcggcataggatagctgtcctcagcgcgatgcacgaagctgtagcagccaaaattgttgtgatattgctctttcc

SEQ ID NO: 97462 - DNA, 526 bp, Zea Mays
caagcgcctgtgccatggatccacctacaatgtcaagcacgtgctagcgcccaatccgcacttgcccagccgcatttcgcgccatccacgccatccgctccatccgcgtctgaagaagacaaaagatgccttcataaacctgccggtgagtaacaactaggggagaagtccccaccacccaagaggaccaagcccataacaggtgtgtattcaacttcactgtactttttggattcaacattgtctacctacacatgattgtgagcatttaggagaatctgaggaaggaaccgaggaaggagacgaggagcaatccccgccaaggagaaaccgcccaagagaacctattcattttatgtgtgtactgatgctacttgccctcaaccgttctgattcatgttgtcctctgtataattagagtaaaccaatttgaaaaatgacacacttactatcggattggtgtctactaggatatcgaccttcattgttttccacaaggctaattatcctgtggttgattgagacc

SEQ ID NO: 97463 - DNA, 581 bp, Zea Mays
atcatgagctacaaagttgcagtggcttcatctgggggagacgacaacacaatggcaaagtccttcatcatcaccctggagggacttgccttagcctagtacactaggctgccttcgctgacgattgatttatgggtagcccgtcgggagaaattcctccttaacttccaagggtacatgccgcagaccgatgccctcgctgagctatcattgtgtagacaactagagaggcaaaaccttcatgattactataacaagttcctatcgctcaagtcccagttgtcgttagtagaggatggaatcgccattcattatgccatcagcagcctgcacgccggccatttatatagcactgcactcgagacccaccacaacccttcaagagttatatcaattatccgaaaagtacgcacgatacgaagacctccactaccacaatgttgaggcacaacgcaagccaaatgatccttcgcatccggagagctccaaaccatgggcgcgaacgcaacacccttcgccacagacccaaatccacaatattcagtagcagcaacaacccgaagacacccatcgtagctacg

SEQ ID NO: 97464 - DNA, 793 bp, Zea Mays
gttgtacaaggttaaattctcctaagattagccacagggagatgcaactggagacgtccaggaggtctgtaagtaaggaaggggactcattgtggttagagggggcatagacattagtcacggtgagggggtgttggatgcgcacatggagaaggtggtggtcaggcagaagggggaggagtggcaattctccaagcttagaacattgtcgttccagatcgtgaccacccctccacgcttgccacaggtgtcaatggagcgaaaacaatttagattacgggggaggaagtgttttgctttcattgcggagaggtcgcagagcttagattcttgaatacacacaatagtgggggtagaagaggactgggtacccctaaccacggtgcatttctgaggatcaccaaggccacgaacattccagcacatgatagaatatataggaggaacgaggattagtcattagaaacaaaacaagcactagtacaataccaaagttttgtataaggcatttatgatcctccacacaaggggagagcaatagggagggatcacagctgataacataagcgagggggagactcagccctagcggcagagagaagggtctagcatgatcacacattcggtgaacaagggcctcaccggtggatgtaaacttcggaccaagcttcatttcgccatccatgacaccacgcccaccgcatcgacggacttgcaccctagcctagtagcaagggcaagcttgcgaagcacgtggatgaggacagacacctcagtgtgggagaggacattg

SEQ ID NO: 97465 - DNA, 460 bp, Zea Mays
gccaaacggggcaaagactagtgccctacttcggcagaaaccgaattcacgctctatccagtgtttcccctaagtcaattgcatgaatggctacctattcgtctctagccacgatgacagtgtggataatccaaagaacactgcgttcccggtgattggtggcggtctagctcaattggatgggttgacgagcatttcgggggtatgaaagcactcaaacgagagagcagagagggtgaactgactggaattgcgctggccacggcgaggttgttttcacgatggcgaaaaaccgaattgggggaaacaagaaattcgcgagctctagggaatgattcgaggtacgagttgcttcactggttgcataattacctaacggagccgagggtgtgctcaatttataggctctgggggcagtggctggtgaatcagggatggcgcggtggcggccggagagaag

SEQ ID NO: 97466 - DNA, 428 bp, Zea Mays
tggcgagtgctccatcagacaactgacagaacgatttgcaaaggagttttcttccaatttcatgtgacaacaggtccaagtctctgcatcaaagttgtagtgctacataccagctacaactcaactatagggattaaacttatttgagcactggatcaaggttgaattcatactcaaagttgaccctgttacactgaaaagctgaatttcagaatgaatccagcctgacagccaaagtttgagcatgattatctccaaatttttcttaacaactgagctcacatccttaagcaaagttgttctcctataattgggctacaattttgatgtggtgacctaatatgaattctcactattttgaaagctacacagccccaaagttgggtctataaccctgatttcagacttagcataggaatcaaaattgg

SEQ ID NO: 97467 - DNA, 439 bp, Zea Mays
ggagagggttctctcgccggagcctagcatcttgttcagctagctctcgctctcgatcctgagcctatcggcgatcacggcggcaggagttacgtctttctcggtgtactcgtttgtcaggagtttcccccatttcggaggcttcgtcccaggacacgggctgcgccagatcccgttccccgacttcatgatgtcgccacacgtttcgacatctgtttctttgtcgccggcatcacgctggggaggttgctccccttgcatggtaggctcatcgtcggagatgggcgctgactccaatctcccctagatgaagaggacgtcagggtagaaaggagccggcatgatggtgttcttcttcccatcctcctttaagggcggaggtatcagaaaggtggcttggtgtgttctccttccccgactcgggatgtttacttccttc

SEQ ID NO: 97468 - DNA, 736 bp, Zea Mays
gtggattgggtttgtaacaaagaggaggagctcacagtgtgctcaatttatagggatcaattgggaatatcacaaatttggacaagatcatgtctaccggagcgattggataactccttggagctcgtgctccgtggcgcgtgggtagcttagtgacttgggcaatatttttacttcctaccacgcttactacgatgtggtgaaacatatcgtcgcgtggcgcagcagcagtgaacggcgacctttggcgatgacagcttggtcggtcatggaacaagtgggtatggtggatccaacgcatggattcatccccctcgtgatcttttcacccctcatgtaatatccactccaagccctgcacgaatctccacaatgagctcgaatcattgtgcaagatcaccggcggcgaggtgcacttcacatgatcttctttagtttactgtacaagtctggttgacttcttctaacgtgtttgacagagcaattttgggaacattttactctctattttgtgcagcattgggtccaactcttcatagggaatttgttcactaatataagaactccagctttgttataatgatcatgctccttggctcacttgatcactcacaaaacaactccaaagttgggcaaatgtcaatgattcccaagtttagagcagtttcttgtcggagagccctagtttgagggtgttttactccaagttccatatagttttaggggcaaatacttt

SEQ ID NO: 97469 - DNA, 764 bp, Zea Mays
cacggactgtctggctgcacattttagtgctcaacacatgccccctgccttttggtgaatgttgacgaaccaaaagcatatgtactggccttcgagaaacaatagatctcacaagtcaccttgttcccgaagtaagaactaagaatgatgtaagtcaccgacttttcaatctaataaagtgattattcaatagagttctaatgcataaaggttgtttagaattgcatctttctcgatccttactacttgatcaatggatcaataagtacaaatttgtggtgccccaacctgaataagcaaagagataaacatgtagtacgagttcatcaccgcactactccatgtttgaactagaaaatatatcggtgatgaataggctggtgaaaagcaccatgtcatcactggataaataggcaacacttgttgtgtcgccttttgggccgttttattcggccatgtttgcctttgagggtaaccggagttgttttgttggaagaccgcaagggataaccttttcaaaagcagggacgacttgaaccagccgactagaagttttagatgaattatgcttcgacgtacctgtttctagttgtcgatgcttgaaggcgcgtggacgctacgacctctggttgctgccgaaccgtctagcaaaatgagccagactatccgtgcgggttccggatcatccgcgcgtaggcgccagaccgtctgcgatgcacgggataggtagttttaatcggttggccgatctcgcttgccccctg

SEQ ID NO: 97470 - DNA, 302 bp, Zea Mays
ttgctagagacaattcttgcagaccaacgagagcagacaaagctagagaaggaatatcactgctctccccactgactatataacgctgactgtttttccgaattaaggggatttcctcctcctcttcctcgtcctcgtcaataatacgagcagcacacccattgggattagctctggtcgaattacacccattgggttcagcatcatcaaggtcacacccattggggtcagcgtcatccgggtcacatccattgggattagctccagtaaaaagctccactggcaattcctcggcagcagga

SEQ ID NO: 97471 - DNA, 684 bp, Zea Mays
gtttgtcaaagagatccgtctatgaactcaatttagcgtcttttaacttgtgaatacttgcagggccaaagagatccatctatgagtgccgagttgagacaagtagccaatgactttgcttatagggtcaagaaatattctgggtatgacgttaatggatacctattcctaacgatgaagattataacttagactaggacaaatatggtggagagttcttccaagaagatgggctagaagggcgatttgagatagacttaaccgaagctatcggaatggaagtagatattgaaatggttgttgatgaggaggatgatgaggtgcaaaatgagaatgacttagtaatacttgaaggcaatgacattaatgacgaacttgcgccttcagatggtgttgactatgaaatggttgatagtgatgatgagagttatgatccggctaacctcgacgcatacgaagattatttttaatcgatgtaacactatagttttttatttcacacctgtttctaaatacatcttttttatatgtgcttatttgtttactcttaattgtaggttgttggaaaaatatggtgggcggttgactgtggaggagggggaggaggagcagggtggcggaggaggcacagcaggacgacgacgtccagcagtaggtggagcaataggacgacgacgtccagca

SEQ ID NO: 97472 - DNA, 406 bp, Zea Mays
ataaatcctacccctcttaagaggaatctcgacctcgagattaagatgaactaggaaagaggtggggaaaatctactcccagctcttcttctctttcccaagtagcttcatcttctccatgatgactccattgcactttgcacattttgatcactttactccttgtaacccggatcaaagtatcaatggtcttgataggatactcagtataagtcagatcatcttggacactcaattcctctataggaagttgctcttctggtaccctgagacacttcttcaactgggatacatggaagatagcatgtacatccgcaagatggtcgggtagttccagttggtaggcaacttctcccactcactttaggatcatgaagggtccaataaagcgaggggacaacttccc

SEQ ID NO: 97473 - DNA, 310 bp, Zea Mays
gagagagagagaaaacacatctggagaagcctaggggatattaacttgtcaacttgcataaaccccatatataggccattgcaagtgctaagatcataaaaactaacccatgtggcactacagttttttatttagaatttgcatagatgacatacaatatatgtcagtaaacaggtagattgagcatcctggcaagaaagagacaatatattttgtgggctggcgaattttattgtttatcccatatgtttttaaagaaattttaattccaagaattcgttgactatttagaagttgtaagcaagcacaa

SEQ ID NO: 97474 - DNA, 566 bp, Zea Mays
cgaggacaaagatcaagggcactgtagaatcggatgtgtccgagtgatttggggtaaggatcgactgcagggaggtagcttcggacgtgtcgcgattccgcggacctagctagagcctagccggagataattcaccggcggtcaccgtgactcggtcatttcgaccgtcgtgtcacccattcctcgctcctccctcattgtgtctcttcacgtggtaaccatgcacgaacgatgtaatccacgaccgtggatcgctagccggaccaccgcgcctataaatagccccgccacccacggcgaggtattcacctcttcaccagtgagctcggttgaagcacaaattcacagcatcctctccagctctcccaaaattggtggtgcacggtgaatccgtagttcttcgcgaccgtgtagccccaacctcacctcctaattccaccagaacccgtcgcggcaccgttttcccccttctcagtcaccggcgagtgaaaatcctccgcgctccgtggctagccactcccagttctactcctgcttttcttaatcatgttttagtatccatacat

SEQ ID NO: 97475 - DNA, 419 bp, Zea Mays
gccagagggatttgtgatgcatggacaggagaacatggtgtgtagactaaggaaatccttatatagcctcaagcaggcgccaaagcaatggcatgagaagttcgatagaactctgacgtcagcgggctttgtggtaaacgaagctgacacttgtgtgtactatcagtttgttggtggtaagggagtaatattgtgcttgtatgtggatgacatactaatcttcgggactagtattgatgtgataaatgacgtgaaatcatttttatctcaaaattttgatatgaaggattggggagaggaagatgttatattaaacataaaactaatgaagggtgagaatgggattattctgaaacaatctcattatgtggagaacattctaaaccgctttgggtattctgactccaaagattctccaa

SEQ ID NO: 97476 - DNA, 454 bp, Zea Mays
ctgggtcactggatcgttgatctccggcgtgatcaccgcatcggcacggtggcgccgccgtgcgcggacagccggaggggggaatagtgcttaccgttgatcgatgggggaacgactaggattagattcttctgttactggttggggtatggaatctgcaccgtctgatcgggagagagcgggtgagattataggaagtgtgccgcttcgaccacattcgttttgagccgtcgatggcgtgataagcgatcatgagtgagatcaagacacgaggggtggtgctgaccgtcgacatttgatcaaacgactactatttggtaccggttcggttatgagcttgatctaatctaggccattgaaagcagacccgacggctctggatggctcgtaccccttcggtcgcaaacaaatgcaaaagaaccgatgtcgttttaccaaataaacccgtcatccc

SEQ ID NO: 97477 - DNA, 803 bp, Zea Mays
cgagtatcaggagcaagtaagggtgctgaaacaagaggacagtgggcatgaacggacctgagacgagctggccacagcgaggtcacaccgctcggtgttcttgggtgatttgggggaaatcccaaattggggagctctagtgggtgattcgaggcacgtgttgctctactggttgcacaattacttagcggagcaggcatggtcggcaatttataggctcccacaacggtggcgtccaatttcgcgaagatgcgctggcggtcagagaggaagaaggttactggtgctcgagattagtggctttcaccgtggcaagctccccggcgaccaccggacatgcaagacgcaattcacagcgacgtggtacaacgcttgagcacgtggcgcacagcggtaagtggccaacgacggcgaggtctatctcggttgatcggcgagcaagtgggtacggtgaaactcatccgcgaccgagcccgagcctatctggtgccaagattcttactccgtcgtgattatcccctcaccagagagcacgaatcgcggcgacaacgcaaatcacggcgcaaagatcaccggcgacgaggggggctgaacttgtgatctgtttcagttactgtaccatggtggttaccatcagagtgtatgacagaccattttgttggactcggatctcgatttttcatgtgatgacttgctaatccaccagtaacaaagttgttacctgatgatccagctacaatcttgctatagcatccatagccaaactctcactagatcatggttgaattccagtccaatgattg

SEQ ID NO: 97478 - DNA, 505 bp, Zea Mays
aggaaggcgggtgaagggacaggacagtgggtcgacggaggggtgcccacggcagtgcggaaaacggaattactcgggctatggtggatgactggccgaggttagagttgcactaggctcgtgatgaggagacgaagcaagggaggtactaaatttatagaggttgaccacggttattccgaatttgggaagagagcgaagcacggctgcgacaagacattgtactggcgggtccgtcgtggcgccagcaggtgcaatggctccgaaatggcaagtccgggcgtgccacggttactactacgtggtaaagggctacggcgtggcgtaattgaggtcgtcggcgtaccacgacgacaccagcggctcggccacgtcgcacgtctacaggcgcaatcgataagtttcaccccgcgaccaaatccacccccccgagatcttttactcccccaccgttatccactgcgtggcaagcacgaatctcccccagcgaactcggatcttggca

SEQ ID NO: 97479 - DNA, 462 bp, Zea Mays
ttttatacgatgacacgtcctttgcagttttagcttgaagaaattgaaaaccactcaagtgttttaatcatcaaataggtttcctcccaaattatgatactgtatgtagaattactttaggctaccaatctatttaagattttttttttgcttatgaggaacctctaaggttatgaccagtaaatcgtgcatatggccgtgtaaaacacagtttttcattgtagattgcactagtttgaaatgaaagatgagaatgagtaaactgctggagatagcataacaagtttatttttagcagtttcacataaacaaaaaacatattataactaagcactctcttccgttcaaaataagtgcatacctcatatatggaggaatccttttttgctaagtttgactaaatatatagaaaccccggacgcaaatcaaatgtgtgctagtatcaagtctcacacatatgac

SEQ ID NO: 97480 - DNA, 1225 bp, Zea Mays
gtgccactcggttgtcgctaagaatctatcgattcttgacattgttggatcattctgctcatttgaccatgtgaacaatctcccattaaggtccaattccagaagttgcagggaatcaattgtattgttgaagagtctcattaatcttctatttatcggtcctttgtttttctcattttttcttcttatcatgttgaaatcacctaagatagcccattcaggcctcatcaatctttggatgtttcgcaactcagagaggaaagccaatttttcattttcattctggggaccataaactccagtgaggtcccattcctgatcctctgatctagatttgattctgactgtgattgaaaaagttgatgcataggcaattgtactcatgtcaaaaaatctggaccgcatgcaattagaatcccacctgaggctccctgtgagggaagatgcatcgtctgagcagctaatctgcatcccaaagtttcctgcagcaggttgttggaccagatactgtttttgtctcctagaggcatacaatggttgcaccggaagatatgatggtttgctttacactttctcgcttgactgggtcatttaagcctcttacattccatgaaaaaatcgtacagtttgtactcattaattggggactctccacttaaagcaacattgtgaaataattgatgtagcatgctgaccacatgatagaacggagcaggggcattgtctgacaagcagacccgaccccccagcaagccccaacacatcaacatttaagagcagaacaaaccacattacacaccaatccaccagactaacagcaacaggatacaacgacatagaagacattgggactaggtttcgctggccccttacaacaccacagcaatctaagacttccaacatgacttgactgacccccttactaacactagtgagagaaaatgcagacactaacatggtggttgagctccactatggctgtaacacttcccatcagatcctctgcatagttttgattgatggaaccttcacaggagccaccttgcatccacgccttggacctcctacctttttttctccctgatttaccaactccatgattgcctccatctgatctttagtgagaggtcttgtgaactggtttgcgaactgctcaaaaagagtgtcatgggtattagaatttgaagcagatgagctacaaaaagatcttgctgctgagttgtta

SEQ ID NO: 97481 - DNA, 367 bp, Zea Mays
gacgaagagaaatatagcattaattgcgctcaagggtggatctgaggcctaggccacttgggccatggcccatggtgtggtccgtgtagtgataattgagtagggtggggagatggtcctagggtttcacttctccactacagaaacaatagatcatgattgcatgagctaacgaggggcaatggcatgcaggtagacggcgattggggcacacaggcaggcaatggcacgcggataactgcacggacggtggtggtgcagggcacacaggcagatgcagcgacactggcgcgtgaggcactatgtggctgcgtagacaacagtggtagagggcacatgggcagccgagcaactggttgcaggcagc

SEQ ID NO: 97482 - DNA, 995 bp, Zea Mays
tcagcatccaccaacctccgacttagatatgtcaccacatgctcctttccttcagtttcttgtgtcagaacagcccaaggaccttatctttagctgcaatgtataatctgaatggtactcctgcttgtggtgcttttaatacgggagccgaagacaagtattttttaatgagatcaaatgcttcctgctgctctgccccccaagcgaattcggcatcattcttaagccgaaggataggggtgaaggcatcaatcttcctggctaggttagaaataaaccttcgtaaataattcaccttgccaagaaactcctgcacttcgaccttacaggtcggaggtcccacattccgaatagacttgattcggtcagggtctatctctataccatgttcatggatgacaaatcctaaaaacttaccagccgacactccaaaagcacatttacgtgggttcagtttcaacccacaccgacgcattttatcaaaggctttgcgcaaatcagctacatgagaactaaactcagccgatttgactacaatatcatcaatgtagactacgtgggttcagtttcccaacagctcatgaaagatcaaattcatagccctctgataagtagcaccagcatttttcagaccaaatatcatgacaacccactcaaataaaccaatgaagcctggacatataaaggttgttttagacgcatcttcttcggccataaaaatctgattatatccggcattaccatcaagaaagctaataattctattccctgatgcgttattgattaatgtgtcggctatgggcatgggatactcatctttaggagttgctctatttaaattgcgaaaatcaatgcatactctaagcttacttgactccttctccaccggcacaatattagagacccactctgcgtatctgcaaggtctaataaaattagcttctagtagctagtggatttcgtccttgattcgtgggagaaggtctagacaaaat

SEQ ID NO: 97483 - DNA, 507 bp, Zea Mays
aggagatgggaggacatacgagatcactggcattgccctttcatcaaacactattgaaacactagcatgagcctgcccacttctagcaactacccgaagtgtggaccacggaggcagaaggccaacaaggtttcaatgtttcactgtctaggcccgatgacacagcaagatgaacgaaatggaccattgcacaaaatgggtcttgatgacgaagaagataaatatcaccaaccatggtggtgtctagatggcctcagtcacacctagaagcatagtgtgttgcatttgcggaacctaaaagaagctgaagcccgccccgaactagcggtcaaggagcgataccctaggagagcataataataccctcggaggagggagtggcgtcccaagcaaataacagataatgaggaggcaaatggggaggtcgctgaggaagttgatgaggaggccgagggaacgccatcggccaatgtgaatatggtgtttgtactcgcctagagtttcatg

SEQ ID NO: 97484 - DNA, 507 bp, Zea Mays
ctctgtcagatatgatagtccttggtattccatgcaagcgaactatctagtcaatgtagatttctgcatatttctctgccctatgggtggtatgaaccggcaagaaatgagttgtcttggtcaacctatccacaatgacccaaatagaatcgtgttgtcgggaggtattgggcaatcccacaatgaaatccatgcaaatatcctcccatttccaagatggtatgggaaggggctgtaaggtgcctgctacctttaaatgactggccttgactctctggcaagtgtcgcattcagatatatacttagcaatttccctcttcattctggtccaccagtacaaagatctgagctcatgatacatcttgttactgccggggtgcatggagaattttgaaaggtgagcttcatctaatattttctttctgagctcggggttcttgggaacaaccaatcggtctccaaaccatagaatccctttgctgtcctgacggaagcatttgtattttt

SEQ ID NO: 97485 - DNA, 362 bp, Zea Mays
cgcgtgttgctcaacaggttttggtccattggcggggtgaaccggtgacttcgacaacctgggaggacctcaacaatttcgcgccacgtacccagatttttagcttgaggacgagctagacctcgaggaggggagagatgtcatgtggggctgcacctatgcacgccaacagtgggcccacatcggtgcgcataaggaaggcacaactaaggaaagtggctagattgatggctaaattgataggccttaatggtagggggattggttaccaaataagtaattgcctaattagttgttgcctagttggtcggattggtttccaaataagttagttacctaattagttgttgcctagttggtca

SEQ ID NO: 97486 - DNA, 482 bp, Zea Mays
gcacacctgtgataacagcttaatcaaactctgaaaaggtgtacaccttcctagggcagggttcatcacttttcacaattgctactaggcaacaacactttagggcgctatgcttcaatctaggtgcaaggtaaatgccccttatatagcacaaacaatagacccaaaacctccctaacgagacccaaattacgacacttcataacctagcctcccttttacgcctacctagtaagctaccgcactactaacaaatattttcttaaatgctaaacggtaaacagtcagtcacctatcggtttagtcgttattcgaactaaacatatcattaaatgggctacaccgccaaataaaaagggataaaatacattaaatggaaacaacacactgtagtgtagcgtttacatgatgtttaaacaagctaaacgaccatttaaatgaacagtgctactaacaaaagatttgcttctatgacaaaccag

SEQ ID NO: 97487 - DNA, 484 bp, Zea Mays
tgcaccttcggcagtgttgcctctgatagaggactcaggatttctggcatttttgtcactctttccacctgtggctctttggtcttattatcttcagccttggctggctcaactgtagttatcttcggtactacacttggctctacagtgctttgcataattggaacagtttcttttgctttggcagctgaagaagtaccttcgccaaattcaggtatcacggatggttcaacataacgcggccggtgagtcagaaccttcatcttcttgcccttcggctcaactgtgatggccaaagcagcaatatttcccgaagcagcaatctttctctttatcccttgccctcacagcgggtagcaatagtcagggtatacgaagccaatagcatcaaataccttgttcaatcttttcttattccgacccccgaaagctgcggaccaggcattgtcctcggccttggagtatgcccccagtagctcatctc

SEQ ID NO: 97488 - DNA, 608 bp, Zea Mays
ttcaatgtagcggaagacaatcgattagtacttgttgggacaaaaaattatgggctcaaacactctagcgcggtgagtaaggtggcacgacaaaatagtaagctgagagagcgtaatgtcttgccaagcatgtcctgtgccgctacaggacaagatatttatatgggaagctagggttggtggacctaagtacaattatacccctgattgtcagttatattcttgacatgcactatacaacggggtaattacatggctattagtacaagtctccctgttacactagaatttataccctctctagttgctgacaggtggactcggagtagttaagtaccgtatcattgcggtcgtacgacgtgaggacctggcgtatgcctcctgtccgtgtccatgaagacgtggacccactgctcttgctgatacgatgaagttggccaccttcgactctgttaggccttcgtgtggtattcgaatgccaacccattcgtaggtgagtccagtcgtttgacctcaccgtaggggcgaaggggtagatctcatggcctttgggatccgtcaccgggcctttgcttcttccctatttgaatggccttgcacctgacact

SEQ ID NO: 97489 - DNA, 369 bp, Zea Mays
acaataggtttggtttagaattttagtttctcattgggttttggaaatcaaagttttgttcaagtttttacataacagttagtagacgatttggaacatatggatattgtatgtctagccatctattaggtcagatgaggtacggttatggcatgtaggggttgtggcaagtgtataataaggaaagacttcatcctaaactctggacttgattcttccgacgatccaacttgatatttgaatacttgagttgattcttatcctcctttgacttggttggtcttctttggcctttattcttggagttgtcatccgagttaaggacatatggctaaggatatatggttaggataggcggggtacatgagg

SEQ ID NO: 97490 - DNA, 545 bp, Zea Mays
accagggacttggtacaaaaacacatagctttcaaagtatggccccttgttaacaaatgggaaatgtcgaaggagatcactgatagctcaagcgaaggtggcctggtttatttgaaatatacataccgttacataagtcagtttggggagcaagatgacgaatggctcgaggctattcaggcgacaactgatgatctgttaggggcatatacgaaggctgaagacgaagccatgaatactgccttcggtgcccgtggaaagaaaaggttgaatagagtgttcgacgttattggttttgtgcaccccgattattgctttcaggctcggaagcaagggacgaagaggaggattgcatcaactatcccttctattgtgccgaaacccaaaagaatgaagattgtaactcatcggccaaagtcttattttttggagagggctgctgcactacctgctacagaaggttcaaagatagaggctattgaatctgccaaagctaccctctcagctgtggaggtaatacctacagcgacagctgaagctaccac

SEQ ID NO: 97491 - DNA, 564 bp, Zea Mays
cagggacgttggtgctatccaatcgagagatgtctaaacactatttgaaagaaatgtagaaataaatgctaaatcgaggcttccattgcagaggcatacattctagaggaggtgtcaaacttcacaacaacttactatggtgacaaactgccgagcgtgcataatccaccccctcgttacaatcatggcggcaatgaatcgaacctcagcatatttcgaggccaactcggaagcgcaagtggttcgaccaccaagaccctgacacatgaagattggcgacatatcatgctatacgtattgaccaaccttgaagatgtgacgccatacatggaatatgatactcttcatgaactctggcatcgatcaagggacctaactccacaggaatatgacactcttcttataaagggtgcgagaaatggattgcccgatttcatttcctggttcaaacgtaaggtacgtgcttagtttgtcaaagagatccgtctatgaactcaattgagcgtcttttaacttacgaatatttgcagggccaaagagattcgtctatgagtgccgagttga

SEQ ID NO: 97492 - DNA, 539 bp, Zea Mays
gctaagtctctcaaactcaaatggatcgaatgtggcatgtgagtggcttttaatgcgtgggaggtgttgcacttgatgtatagtaggttggagtggttcatgtgccttcaatatgctggttggggtatttatagcccccaaccacacaaatagtcgttggagtaaatggttgaaaagtgcactgcagggtggtgcaccgaaccccatacaatgtcgatccgggggaccaaactgcctgaacttgtcaaagcaggtgaacactgagttctatcagccacctgctaggcgctgtcagatggttcatatagccaccggatcggtccgatgccccagctccagaaagccttgaaaacatcctctttacgtagacgtttcggcgcgccagcctgagaaaggctgctgcttggcctcctagcgcatgcggtacagtgcaccactgaaccagtccagtgcgccagactacaaaccaatttcttatttcttgtccaagtcttcttcagatgattttgactagtcttgaggatgttcctatgacttgg

SEQ ID NO: 97493 - DNA, 386 bp, Zea Mays
agattcagatcaatgcatggatccgctgctggtatgtttgtggttctctcctgcaatgaatccccccaccccacacacacacacccacacaaacacatgaaatcttctgccactgataccgtagtgacctgaatccgattgatcgatcgacctgtcgtttgcacgtcagcttttaatcctggacggaaaggaaataaaggaggctgcagtagttggagtctgcgtgtgtagacaggtgatgaagagcggacgggagggaccacgctgcaattggatgaaaggactgacggatcacggacgagcacgaggacgagaaagacatcagcttgtcatagcagcaacgaattgaagctggatgaggcaccaccgcgcgcccaactacccaa

SEQ ID NO: 97494 - DNA, 510 bp, Zea Mays
atgagctatgattctcgtcttttatatactacctctcaacaataaactagaatatgtactacgccctccatattataagatgtttttgatttctctagatatgtaggttttcctattcacttagatatacactatgtctagattcatagtaaaagttattgtatctagaaaagataaattgtactataatttggaacggagggagtgatatcctgtattagacatctatttgtttcattctatgtatctcctttttttgtttataaacaagcatacagaagtttccagttcactgctatggtgctcaactagaactggtttaacccctgtcgcattttttgtacaaataaacaacttgcaagttttcttgttgaaatttgtacaaggttcagtttcacatatgtgctgaacgcttagaaagaaaaatgacatggtggttcaggttttacagcaccttgtacactgatgaaaagttcccttactttggctgacaattacataaccttaaat

SEQ ID NO: 97495 - DNA, 795 bp, Zea Mays
tccttcacagtaggagacctcgtcctccgccaaattctaacgggggagggacggcacaaactgtcaccactatgggaaggaccattcatagtagcagaagtcactcggcctggatcatatcgtctcactcaaatggacgacacggaaattgggaactcatggaacatagaacatctcaggaagttttacccccagctatatctcaaaagctattgggacgacaatgtattctgtaaactgggaaatatatcatcaataaaaagacttcaaaggcactcaaattgtttactgtcaacctgcttgcttacttaactcagggtgaccactataccctactaacggagcgatcggcttaagtcggcaatggcttaaggcggtgtgacatgctcacgcttacttaactcggggtgaccactataccctactaacggagcaatcggcttaagtcggcaatggcttaaggcggtgtgacatgctctcgcttacttaactcggggtgaccactataccctactaacggagcaatcggcttaagtcagcaacggcttaaggcggtgtgacatgctcacgcttacttaactcggggtgaccactataccctactaacggagcagttggtttaagtcggtaatgacttaaatcggcacggtgcactcacgcctaattaatccaacacaagcacgtttgcaattactcatcttagggcgacctctatgccccacgaaatacgaagaaatttcaaaaccatcacactacatttacttctgcaattgtagatactgttgtattctaaca

SEQ ID NO: 97496 - DNA, 751 bp, Zea Mays
ggaaacaaaactacaaaacgaaaaaaggaaactacaggcccattcacactcaaaccccattaaggcacgagtacggcgaattttggtacccatagatattttattggactatttactatacatatctagtatgttggacatgagtatgtcatcgcttgtcctatacctgctacccgatgagaaaccatctaacctatgacatgtgtgtttgcattgttagaagtgttcaatataaaattaaatattgaacttgtgataaaaataatgttggctttgatgaaattattatagtggacacaaagatagtatgctattttagtatctttcattattgatgaagtatgtgactccaatattttgtatatggtatttaattttaagattaaaatataattatatctattttggtgggtatgagtatgcattaattttatagccatgacggataataagtatggtaggtgtgatagatcatttctgttctcttgtgtatatgggtctggactttgtgcctacaggatgttttgcccgttgtcatccctaatggttgtcatgcaagctttgatgttgttttaggaattatttagaaattacaataaatttatcccaataattcaaacatgatggaatgagcaatcaaaacattcgtgctgtcaacacaccatcgtttatcatcaaccattaccatctggagctagccattccacaaatgctcggcttgtgtttcaagtgcgagaagccacgaatgcgt

SEQ ID NO: 97497 - DNA, 305 bp, Zea Mays
gggagggatgaaggatgagagatggtctaaataatattgtccattggatttgagtggataatgagagggagttatttagtgacctgaaccgttgattttgatggcatgtaaagtctggatgcaattcgtttggtgtatttagtgaaggttatgggcgtgggggtgattttgttggataggttttgcaaagtttaaagtgatggattatacagtggtatagatatagattaagcaaggcaattatttgcatctgcttttgtagaaagaatcatggttgaaccaggagtccagtaccgatggattcc

SEQ ID NO: 97498 - DNA, 482 bp, Zea Mays
gtttacagagcactccatgctaaaattttcaaatgttagtatgtagtgttctgttccaagtttgaaatgaaactcatcagtcttagaagaaaaaaacgaaagttatggtttgtgtgcttgtcacatatcctaagaacggaaagcatgtttcagctgtcactctgacttttgggctgatgttacatgtttaaatttaattcctaaattgggtagccaaatttggatgaaatatgtgtgggtttgataaatgaacatctagaaattcattatttagccatgaatcaacaatatttctgacttgaatatttctttttttccagctttgactagtggctatcattgatgtcttattttacagttagctttaaattttctaagcctttgcttaccatttgtacatattgatgatatctgctcctttcttgtgctgcagaaactactgaaattgtggattatagaaattatggcattatgaaatatgc

SEQ ID NO: 97499 - DNA, 346 bp, Zea Mays
gtagagtatggattcaattttaatgtgaaacatacaaaaatacagaggcagaaccgccagccatagagtggaggcctagccacgatccaacaaataaccaaatcacagcccactaacccgatgacagatggcccacgaatggactattagcctagcttgttggattggacacatgcacgtgacgtacaactccttgcctccttgctacagcctgctctttgtcccctgacaacgattcatctcttgtttgttgtttcgacggtgagtcggcgacactcccaattccacctaagggctgatttggtgcttggtgatccccagggaaaaaaattctcttactattcaa

SEQ ID NO: 97500 - DNA, 323 bp, Zea Mays
accgccttccacattctctcttttctataaataccgctctagtcgtcgcaaaacctcctgtcttcccccagatccagatcgtttccccagattgcaggcgtgaagggcagcgcttaccaggtacgcagacatccctcctcttgtttcaaatcgccaaaccgcctccgatttcccgagacccagatcacacgagcatgccccttcggttaccagcgacgcaggtaagccttctcttctcccttttccttccggtggcgtgtagcagccctttcccccaacgaagccctcccacggacgcctgtctcgaagcccattgccggcgg

SEQ ID NO: 97501 - DNA, 349 bp, Zea Mays
agtaccacccaataaccaaaacaaatttgcatagatgtaatgcagactcatcttggttagccacagtatcaacttgtttagcactgcttgttcccccaaatttcgcactgagcaaacaaactgcatcatttcccccagatcccgataaaaccaccaatggcacgaaactaactcgaacaggatggataacatcaaatacgttatcaaactggccacttttgatcaaaaatagacaaaaacaatagacacaggcaaagcaaaaaaatggacagagaaaaggttaaggcattagaaaatagaagcagagcaatcccaaaattttaaaaaacggagtggatcaaaaataaag

SEQ ID NO: 97502 - DNA, 305 bp, Zea Mays
accgtgcagaagctgatcccaatgggtgtgaccgtgcaccggatattgttcgtattttttatgaggacgaagaagaggaagaagaagttccgctaattcgtaaaaatagccggtgttacagaggtagtaggggggatagtgatattccttctccagctctgtctgctcttgtcagccttcaagaattgtccataacggattttgatcaggtccttgaggatgtcgttcctgaagatatgctgtcaaagccgactgctggcgacatgatggatgtttgctctgaaattctagacgtgggattagag

SEQ ID NO: 97503 - DNA, 308 bp, Zea Mays
ggaagaagacgacctactgggagaagacctggtcaactacgaggcttctccagagcgtccaggtatggacgtaaatgttattacattttccaccgattgtactattgtcggcgacgatgaacctattgttgcccagtttgattttggtcctaaagaagccgcctttactaaaccaaaggaatctgtaaatcatttaaagccgctcttcgtgcacggtcacattgatgggataccgattgctaaaatgttggtagatggaggggcggctgtaaatctaatgccttactcattatacagaaaattaggta

SEQ ID NO: 97504 - DNA, 966 bp, Zea Mays
attgaatactctctcaacgtagatcccaccattagagcaagaagaagcttcaaaaatgttagaagataaagccgaaggtacaagaaatgaagtcaaaagactccttagtgctggagtaattaggaaagtcacttacccagaatggcttaccaacactgtaatgttgaagaaagcaaatagaaaatatagaatgtgcattgacttcacagatctcaacaagacatgtccaaaggatgagttccccttacctggtgcgccaactgtcgtggtttcagaaataagggacaaagtagaatttgtgtttggtgggggaggctagcgcggattcattcaagtatagggtttatactggttcaggctcttagcctagtccagtatagtgttgatcatagtattcattaaggaacatgttacagtagatgcttgtgtaagaatgagggagtggaggactcaggatgaatgcccatctccttggtcgtttgaccctctcccttttatagttcaagggggttcttagatagggacttgtccaaaggagggtgcgaccttttgtctacggtggtcttgctgatgtagccctcctgaagttatcttctagttcgtgtgcggtcatacgttcggtatggcggattttccatctacctggtatgcgagccaatgtagcgactctgatgctgagtttccttgtagcgacgtctgatgggactaatggggtcagagttagaggacactaaaggtcgtacgtggcgacgccccatctcgtcatcggagactccatcatcccactggcgtgttgtggcgtcatccgagacggtgtgtgatgatgtgtcgtatcgtgactgtcgtgggacaatagtgtgtgccttgtctccacgtcagctacctaggcgtgatcctatcgcgcgcgtgacaggagggcatggtgttggggcccacatgagtacgggctcccatcgtgggtcttat

SEQ ID NO: 97505 - DNA, 382 bp, Zea Mays
ttggaaaatacatcatcaataaaaagatttcattctcaaagggcactcgaactgtttattatcaatcagcacgcttactcggcatagggtgaccactataccctactaacagagcaatcggcttaagtcggcaatgacttaagacggtgcaacatgctcgcgcttactcggcatagggtgaccactataccctactaacagagcaatcggcttaagtcggcagtgacttaagacggtgcaacatgctcgcgcttactcaacttagggtgaccactataccctactaacggagcaatcgacttaagtcagcaatgacttaggatggtgcaacatgctcacgcttactcgacttagggtgaccactatacactactaacggagc

SEQ ID NO: 97506 - DNA, 1019 bp, Zea Mays
gaaatccggcacactagtcccttgtgggtactgggtggagtcaaattggtggtcatatgatttctgatatgactgttccgcgccagacatactgattcctagcctatttctgaataatttgggtatttcttcctgaattttatccatagtagcctatggtagaggaacataccccataacatgaagctcggatgctcgggtgttgttatgtcatctattcatatgagggtagtctatggtgtgtggtggtgggagtccctttaattgcatgtgcgttgggcaatgctcgggcttagatgtagcaatgcttcggctttggtgcgccgaaggtggagcaaggtagtgctattgtggtgggtagaaaactgtatatttttgtgcaccaccttgtcctatgtggatgtacctgaatggtctggcctgggtgctcggacggttcgcgaaggaaatggacgatctgtgattatacctagactatctggtaatgttgggaatcgcttgtgagccatgtggtaggctcagcatctctcaaaactgtctagcttagggtttcggacggttcgtgaaaggaccaggcagtccgaggttataccttcgttgtccggttgtgccaagcatctcttgcgagccacatggcaggctcagtgtggctctagactatatggcatagggtgtcggatggtccgtgaagggataagacggtacgaggttatatccaggttgtctggttgtgccaggtatcacctgtgagacatgtggtaggcttagtgaggatccggacggtccggtactaggtgccggacgatccgctatgaaactggacagtttggggctatatttgaactgtctgatagtgtttggaactggctatgtgccatgtggtgaacttagcactacatcagatagtttgacatatggagctaggtggtccacaagagggctggatggtcttagactgtacgtcgtatgtccgagcatactcatcgtggacctatcgtaaagtgctgacggtggtagcg

SEQ ID NO: 97507 - DNA, 314 bp, Zea Mays
aaacaagtgatgcgatctggatgatgatgggggaacgaccacatccagtgcacgcgcgttgacggaaaaccaacagttgcagcaggaatcctgcactgtgtgagcgtgtacgtgcggtgaacgaacgacggcggcgacagcgacccccgacccatcgatggatcacacctacacctagctagtgacgccgagatctcagatctcggtgctagcatagcaaggtccctctcccctcacgcaccgcgtcgttagctaggctgtcgtcggagcaaagagcaatcattcatgcaggtgcgctgcaactcgctcccttc

SEQ ID NO: 97508 - DNA, 536 bp, Zea Mays
attgcgtagcatccagtagagtcgagtttagagcgctgggtctctgggtctgggtgtccggcgatggcgtccgccgcgggagggcgcacgtcgccgcatttctacgccagagattgagggaggattctgcgtcgttgatggaataaccgacatccacgattagagtgcgaggggtaagcgcctcagccattagatgacatctgtgcggtggagatcatgcggtcagagcgattcgcgggggttcgttttggaccgtccgatctaataggatgtgatcgaagtaaggaggttacagagccttagatatctgatcctgcggttgagattcacgtacctgttcatatgagggtaggcctgatctagaccttccatttacgatcgggcggctgtagtgaacccgtaagcgctgggtctggacattttgtgtatgagtccctaaactttagaggaataaacctgccatccacgcagtgtgaagtaattatataaacaccctatttctttgatttagacccctgagcttcctggtattcgtg

SEQ ID NO: 97509 - DNA, 676 bp, Zea Mays
cgagttaagtaagaatgtaggtcgatcatgaacaaactgagtattcttgaagccttttttattgatgacatatttccaattttacagagtacattgtcgtcccgatagcttttgaaatacagctaaggataaaacttcctgaggtgttctatattccacgagttcccaatttatgtgtcgtccatctgagtgagacgatatgatcctggccgagtgacttctgttactatgaatggtccttcccataagggtgacaacttgtgtcgtccctcccccatttgaattcggcggaggacgagatctcccactgcaaaggatcatcgtcgcacggtcttgtcatgatagcgtctcagagtttgctggtattgtgctgattgaattactgtgttcagccgttcttcttcaagtatatcaatatcctccagcctagtagcttcggcttctgctatgctttcaaagaccaaccttagcgccccaaacttgagatcagcgggtaatactgcctctgacccatagaccatgaagaaaggagtgtttccatgcagagctcggctaggttgagttcttaggctccaaacgacgtagggcaattcccttatccattttcctacgaacttttcatttttatcgaagacctttttcctgagtgcctccaatatcatcccattagctcgtt

SEQ ID NO: 97510 - DNA, 809 bp, Zea Mays
ctaaatccctagtgccaatatgcccagccaccacctcgaattctacttcggccaattgacagggacaccctagttgcatattgcacaaaggtcgagtcatgccgaaactcagcttcaggggactcattaccattgtcggtaccctgaatcaggggtacccattactatagtatgaagacacagtgcccgtgcggctatctctagccgagaggtgaacatcacccgaccccaacacgtgggcagtcccaaggacgccatgtggacaggagaggtgatatactccaggataccatcagtaggtccggacctcctcaagaaatcgtcggacccctgtacacatagcccggacctccgagtacggtccgggactcccaagtgagcaagccggaccccttggatgaggtttggacccctctgagtgaggtccaggccacccacagcaaagtcccgggacaaggaataccctggcctaggtcaaggacaggcgagggtccagtactgacacatgcccaggctttatccagtgcgcttccactccccgctcaggcggaggcccgatgctgccacgtggactatcgcctgtgacgtaagccagcgggcggagcctgacgtaaggcctctgggtcgcactgcctctgcatttattgcggagaagacgcgccgcctgtctatcccgctgacagacgatgtgccccctcagcatttaatgtgtcctatccactccgctggcaggcgacatgcaggccatcctgcaggcggcgtgcttgtccagtccattgtcaaacagtacgcccgtgctgcgaggtgca

SEQ ID NO: 97511 - DNA, 1042 bp, Zea Mays
gaattttcagacaaacagtgcaactcttgagactttgagcatggattcaattatgatccagcatggatctgcccatggcagctatgacaaacttgtagctggttaatagctctccaactttactgcagagcatggagtatgttaccatagggatttgtgagcaaatcgagcctaaatattgactgtcacgccaactgaatgagttagcctatggtacagtaacctgcttgggttcagaacacttcatcgccgtcgatcactcctccgccgcgattcgtgccgccggcgttaggattcacgctcggggtgggtggataacgtcgcgagatgaaagatctttgccgtcggtgagctggaggtcactccggtgactcaccatcaccttctcctttctgttttgcgactgagcagataagctcgccggggaaccgtcgtcgcacgaccttgcgccacgtatccgagtacctccaccgcatcgccgtgattcgttttagcttcctgtcgatcaccggagtagtcgacatgacggttgccacgagttcacttgcaccagtaacctttcccctctccggccgccaccgcgccatcatcaattcaagcgccaccgcccctggaatctataaattgagcccaccgttagctctgcaacctcatcacgcaccacaccgtctagtatcgctcccaatcttgcaaccgtgagctctaatttcaagttttccccaattctgttctgaaacaccgcagggtcgagctcaccgtggctagtcctccacaggtttaatcataccatccttgttcttgttttagcatctctgtgtgctggtgatgctcaccaactcgcccaattaagctaagatcccatgaatcaccgggaacgtgtagcttgttagttcatccgcgcgctcaccgtggccacagacattggtgtagttgtttatgaaattaacttggggaaaaccttcactcggccctgaatttggtttagaccaacgtagagcgccagtacttgccccaatcggtcgacctacgtgctcaccggagc

SEQ ID NO: 97512 - DNA, 473 bp, Zea Mays
agggagatcagcgtggtggctcactggggtttacggcccccaatcagatgatctcaaaatacaatttctacatgagcttcaggtgatccgttctgcttgcattggcccttggatgattggcggtgatttcaaccttatatatcaagcaggtgataagaataatgataatctgaacagggcaatgatgggaaggtttaggcggctgcttaatgatctgcaattaaaggagttacctctgttgggtagaaaatatacttggtcaaatgatcgggttaaccctactctagttcgcctggatcgggtcttctgtacagcagactgggatgacgatttccctaattgtgttcttcaaagctctgcctctttaatttcagatcactgccctcttttattgggtctgaatgagctcacccaaggaaagaggagattccattttgagagtttttggaccagattggagggtttcttggagg

SEQ ID NO: 97513 - DNA, 303 bp, Zea Mays
cttctaaatgaactaaacaacgcacgttgcaaacattaaccagtttgacctctgctggttgagttcatcatggcagatgcagatatttcagtatttgagtatttaattctttttcgtgccctagtgacttaatttgtacatgtgtagacaattaataatttaacttgacaaattttataggaactgtgactatgaatgactgcatcatatattttgttgagccctctatggtagtataattcccgatgatgttataattgatagccttcaaaagatgaataatcacactgcataatgcttcta

SEQ ID NO: 97514 - DNA, 376 bp, Zea Mays
tcaacaatattcattatatttttttggattgctaaaaatctaattgagtaagtttgaaaaacatctaagtgactaggattaaaagatatcaacatctaaattgagctgaatgaatacggagacatttttcttcttccttatctagtctagtgtaagactgcctgcagcgatgcgcgccaccagccctctccccttcatttagcgcgcacaggaacatgctaccgcccgcagttgtgtgcgctaaaactgctacagtgcaagcgcgttctacacggatccgctagatctggcgtgtggaagccgccccctgcccttgaataccgtgcacgacagtgttgttttagtagaggaaaaattgataagggtaatgaataag

SEQ ID NO: 97515 - DNA, 715 bp, Zea Mays
caaggaccccccatgttctaattcttcgcaggccgaggtccacgacggtgaacagcacaggccgaactccgacgagcatatgccggccagataccgcaacggctggggctccagtgcgacagacacccgattggacctttcccgcacttttcccctcaatcaattttaccaacgaggctttgaatcaaccggttcacggcgacaatgcggatgatcggatggataaacgcgtttcgaacaaccgacgacatggatgaccaaattgaagcttggggaagcttcacgggttcaccagaggttatgtacacactagaatttggactgggcaagagtagaaaagtgggtcgacagagagggtgtcgcggcggcgttctacggagcagaggagtgttccggtgatgggactctggcaaacttcaattggtcggctccgagagcaataggaagctataaacaagctagaacaggaagcaatcggggagttactgacctgaggagtgctggccacggaggagttcttcacgacagcgcgaagaacagggcagaatggttttgtggactgtgtgagttcttctggtgaaattgagtcgattgctcaagtgcttgtatgcgctatgtggtgaagaagtaggattcgagctcaatttataggccgatggctggagttggatgagaatcgcggagctgtaaccgcgctggcgagctcacccgcgcg

SEQ ID NO: 97516 - DNA, 744 bp, Zea Mays
cagcctaccatccccagactgatggacagacagagaggactaatcaagtgctagaagatatgttaagagcttgtgctctcaagcatggtggcagttgggagaagagcttaccctatgctgagttctcgtataataatagctaccaagccagtttgaagatgtcaccatttgaggctctatatggcagaaagtgcaggactcctctgtattgggatcagactggagaaagacagttctttgggcctgagcttatacaagaggcagaagaacaagttcgaatgataagagaaaatttgagaattgcacaatcaaggcagaagagctatgctgataatagaagaagactactagagtttaaggagggtgatcacgtgtatctgaaggtgtcacctattcggggtatgaggagatttaaagttaaaggaaagttgtcccctcgcttcattggacccttcttgatcttaaagcgagtgggagaagttacatatcaacttgaactacctaatcatctggcagatgtacatgatgtattccatgtatcccaactaaagaagtgcctcagggtacctgaggagcagctactaatggaagaccttagtgtgcaagatgacctgacctatgctgagtaccttatcaagattctggacactttgactcgagttacaagaaataaggtgataaagatgtgcaaagtgcaatgtagtcactatggagaagatgaagctacttgggaaagagaagaag

SEQ ID NO: 97517 - DNA, 354 bp, Zea Mays
tcctagtctagatagcctagactttctcttctccataatctcttgctaaaattaggccaacatgatatcacaatcaagggtggaaggcaaatgagacatcacaactctttgaatatctcctacgagccccttgatggactgagtaataaagaaagtctcatcaagttctaggttatgcactgttgaagcgtatcttgcatcttgaaatttttgcacaaattcttccacccccacccttttgtcagagattcaacagtcttcacatggctctagtatactcatcaacctcaaacttcggcatcaccaacatagaaaaatcgctccctcctccttgattgtaacatctagttctca

SEQ ID NO: 97518 - DNA, 478 bp, Zea Mays
gtcataccctataggctatgtgctcttgaactaggtctcatgtgccaatgaaggcacaaacattattgaaagccttctgacatgttgcggtatcattttcaagcacagtagccagcctttgaaggccgaagcgggactagatggggcattggataatcccctttatgtcttccctttcaatcagattattcttgacataaaaccattcctccatctaggctctgggccacctttttcgaaaagttgtaacgggataactcacatcggagcgaggaacgaagccataacaaccgaagttgttgtgatattgctctttaccagtggccttcgtcttgtacagtagttcatgcatgttgcagaagcacttcgcgctcgactccagcccttggctcctcacggcccaaacaaatacccattctgattatagctttgggagtgatttgatgaaggaagatttcaaatgtctttagaacttgaa

SEQ ID NO: 97519 - DNA, 524 bp, Zea Mays
gtcgctgcgccgtgaactctagaagcttcgaccatcatcaattttgtcattgacgtcactataacctcgcgattgctcatcggagtggcgatttctgccaaactagcgccccgccgtggtcactacaacctgggcaacaatccaaggtatgggtcgccccactcgaaccaccttgatttcctgtagactcggcgctaggcaaaagttaggaatttgaaactgtgtcgccggaatgccatcgccggtgaggcgcgcggctgcggtcgcgttcatcgtcgtgttcagcctcggtggggggaatggtgacgcccctggaaccgttgatttcacgatctgcggtctaggttagctggggaaataccgattcggggagggtaatgagagccgtccgattcaatcctacgctttaggatcgatcacatacaccttttagtcagggccgttgatcgttaatctaacgggcgaatctgatcaggcgcgtggcgagtgctcggccttggatcgtggatccaacggctctgagt

SEQ ID NO: 97520 - DNA, 357 bp, Zea Mays
gttggcactgcttgtgcgacggctactagagctagcggtcaagaattcaagatgcacgccatttatggccgtccgtcaggttagcaggagcttgtataggctgctgaacgctgattccaattccagctcggacttggagtcggggtcaaatcaatggttacgaaagttgaaactggagcgaggaacgtgtccggaccggacgcaagcagataagcacgcgaacggtgggctcgagttacgacgttgatgccgacccgcaaacctttgtatgtgttccagttccagcggtcctttttgaccactctcacgctgtccctgcgcactcccacttccagtacacaaaccatctgatcactt

SEQ ID NO: 97521 - DNA, 705 bp, Zea Mays
gtgggccaaaaccctgctctggcctagttttcctccacaccgcaccagcccaacaccggcctccccagcccatctcatcactacagtcattgaccacagggacccgtaagttagtcacaccacgcgctcttgggcaagcgctagcagtggggctcactcctcattctccagcacatgacaccttctcacgtgtgcctcctcctcactagctaatggacccccaatgtcatccctatccactcttcagtcgtgtttccgcgccataaccacgcccgtgggacctggagtccattgcttacagcccggaaccaaccttcgcagggctataaagctatcggtgtttatgacccgactgcacaccacgggttacccacatgatgcttttgggtaggatggcatcgttgattgcgacttgatggtacgtgcgggagcacatcaatgatgcactagggtctatacaggctcgacccgctttggaatgcgtaacactctacttcctgtgtgtggctgtatattggttcctggggtatgaaggttacaattgagctttgtgactactgaggtgttgccggtgacgacggggtgagagaagatgattttgtaggggtccccccttggccttatatacacaaatagagagttatccctttacaagttgtgatcactatctactttacttatctccttctttgtcacagcttgtag

SEQ ID NO: 97522 - DNA, 373 bp, Zea Mays
cgcttcttcatttctcataattgttggtggaactattctgctcatccataggtaagtgctaaacactatctctttcagtgacaatatttatgctttggtaaactctctctctgatatattaatattgttgttacaatgtagattgtttctgaccccgtgacatggacttttgggtgcttatacatttattatttttctttacctcgaggattttccccggagctatgtttctccatttttcataattgtggtagaacagttctggttatctataggcaagtcctaaacactatctcttccagcgacgacatttacacttctgtaatctttctgcctgagctattagctggaacatctttttaccatgacaaat

SEQ ID NO: 97523 - DNA, 557 bp, Zea Mays
gtacaactatctactaggcacaattcctgctccatcagatggactcccgtagaaatcgtgatgggccggaggccttgctgcctcctgtgatctcctcctgtcttgtgcggttggttagagtccaagtgttgataacatgttaggattagaagtaaagtgagagtagagggaatggaggaagtgtgtctttgtattgatctctgtacatatttatacaaggggaaggggtgcagtgaatagatgtctaatcctagagccaactgttcactgcattcatgccaaaggacacaccctttggttacaagtaactgcctaatcaatgtcttgatgtggtcttcataatggatggatgagatcatctcctttggtgaagaggtgtcttttgaagagacaacttttcacaacactaagaaagcaacttcaaagaccaccacctccctggacaatgcggcgaaggtagccctctctgaaaagaagggcaaggcagcccttgtcggtgacatcccccatgaggcccttgaggatggagcaatcaatagcaagcgacctcgcatgga

SEQ ID NO: 97524 - DNA, 378 bp, Zea Mays
gtttgggttatgtggtgcattaccatttgccctatatggttcataggattgaccgttcctttccgaccttctagacggggccggaaagtactcgcccccgtgggcttgggattctgtattaaggtgctggggtgtcgtaggatatgatgagaagttttgctgggacggatggggattcaggtaacaatcctcctcaaaaaattctacgccggaccgtccggttggatatgcggatcgtccgactgggtagtttagggtttccgcagtacgtggttgcttgggcgcatgtctcggtaactcagtaaaaatggaactggtcgttgctggcccggacggtccacgctcacgtgcagacggtccggttatgtgtagatcgac

SEQ ID NO: 97525 - DNA, 294 bp, Zea Mays
aaagatttcatatcagtctgccagatgacaaactaacaacaaaggcctgacaaccaattcaacaatatttaaaatctagtccacaaatacaaaactctgctcagccagtagcaagtaagcaattcagattatgctactagtcacataagagttgaaatagctgagaaatgtgatacccaaaattcaatatagaaatcgaacatatatacactaaatgcatgcatcagtgcagatgttttctttccatacgtcgtcgtacctagaatgctttgctttggagatccacttctgccc

SEQ ID NO: 97526 - DNA, 304 bp, Zea Mays
gatttgcccataggaaaataatgctgtcatatttttaggcatgcctgcttgctgtattgtaagacctatatgttagctatattgccatacaaaacactaatttgcagagcggagtttaaatatgaggacgaggattggtaagagactaaagatagtcgtgttggatttgctttaagacgccgcaaaaagaacagcctgaaactcttaatttgtgtaagggacaagtattttaaaaatacattgaatagatttatcgttgccacactaaaataaagacttgctatctgttgcaggagtctcatgg

SEQ ID NO: 97527 - DNA, 465 bp, Zea Mays
ttctatgctaagtctgaaatcagtgttataagctcaactttggagctttataactttcaaatcagtgagaattcaccttaaggcaccacatcaaatttgtagacataacaaaggagaacaattttgcttaagagtgtaagcaaggttgttatgaagaatttggagataatcacactcaaagtcaggttgtcaggctgttaaagtctgaatttcagactgacagtgcaattgcagtgactttgggcatgaattcaagcttgattcaatagaaatttggctattgctgctatggcaaaattgtagctggtttgtagctctccaactttgctgcagggcattggttatgttgtcacatgaaattgggagaaaatctccctacaaatcactctgtcagctgtctgaaccgagctcgccatggtactgtgcgttgagtggatcagactgccagcgcagggacctcaccgc

SEQ ID NO: 97528 - DNA, 937 bp, Zea Mays
aagatttgtgtttgacttttgcatggtatatgtatgtcgtgttgttggaactttgggcaagattagtacggagtagttgggagggcaatctgataggactcaactgggtagtagtacagtgtacaggtatagcaaggctctggcatctgagaaaaaaaagaagcatggggctgttgtaccaattgtactgcccaattggatcgtccattttatttgatcatccattttattggctcctatctaatagatacataaaaaaaaaaatcaaagggtcgcataataagaaaagtcagtaaaataaaataaagatatccatgggcaaaaaggtcagcaagacagagcagcaagcaatatgagtggagtagtacgtctggcctgttattattaaccaacctaacccgtgccttggtctgtctcgtctttgtgttatctaatgcggtggcttggtattattatagtatcacacgccttctggccccaagctcacatctccttcttgggcgtatagcttgcattgcatgcctggagctgacaatgcctcggggcaagggcaatggagcatgcatgatgaagtgcacaagcagcagttggtgcagatcaatatcacacagatcatcaggatcagttgaactaccaatacaacatgcagggctccagcgatattccatttgcttgctgctagctgcctagctactctgcgcgcgttgtaccgctatgaagatgcctctcgtccgatgtgacgtgagaggctcagtgatgggccctctcttcccccatgatttcatgaacacattttttttacagggaagcttccaatggctggagctcacagatggatagcgaagcaagcaccacgtgaatactgctgctgctaccagagtcgtatggcagtgacaagtgagggtggcatggcatctgtggaagccgaaggagatcc

SEQ ID NO: 97529 - DNA, 625 bp, Zea Mays
cattatattcttgtgacttccttcggtaatgaatctttacttcaatccttctattggaaccttacctatcttacccttgattgttttctccacttggtcacttcgtgagtcttgccttaactctatcctttgtcatgccttttgttattatcaccttcaccttaaacacctctatattttacttgatgtttgtctcatacctgccctttaaaatcacctctctcccgtcttattctgagagctatactttacctatctttaccttggtcgtatcgtcttctttggcttgcgagtttgtaactttgtcctttgttgtgcttttgtttgttgttgcctccacctatcccatctctcgatcttaccttggtgattaccctatgcctgttatctataatccctaatctcctatcccaatttgagagcggtgttttacttatctcgcccttggctatatcctcttccttaccgcgtgtaagcctggacataactccattctttgctgtactcataccactggctctcaaatgccttcatattttctctcatacccttgtctattatcacctttgacccttgcaatatttatgtcttctacctaaatgtttaccttgaacttatccttcaa

SEQ ID NO: 97530 - DNA, 1456 bp, Zea Mays
ttatcattctacaccctatccactacgatgtcgttttgaaatatgaggttccaaccttgacccttaatctcacatccctctgcacttcacaactttggtagtgtcaagggacccttcaatctggtgtcagtgatgtcgggttctgatgctactattgcgggtgacacaccaagtcttcatccttgttgacacaatgggtcattcaactggtgttgtagggtgtgccatcatccacccttaatgacattacaaagatcctcttcaaggtattccaatagttgattgacctttaggcatcctcaacgacatacgacataccctagggattttcctatgtgatgttgaggtatggctcgatggtgcttttgatttactcagccaccaccataccctcaaccaccacactgcctgtcaccccaccccctgcctactttgtttccatccacctcatcaattttccaccatcaccatcactcctgaccaactttttggtgccactagccctagtgttcctgtaattccctacctcgacatagccagtaagctaagccttcctcgatttagcaagctcgatttacccttctatgatggatcagaggatcctctaaactagctcacccattgtgaacaattcttttgggggcaacatatactccaacctaatcgtgtatagcttgcatcgtgccatctacgagggcatggcccaaatgtggtactatggaggatgagggcatgccttctttggagcacttcatggagctttacatcttacgttttggcctgaccatccatacaaaccatttcttcgaatcgacatggttccctttcacctccatggtataagattataaggagtgttttgatgccatggtttgtcacacacctcggctagattccacttacaaggctaacttgtctttcggcgctttccggaccacatccgcatggacgtatagttacacatccctcaggatctatagatgaccatgcctttggtccatgcatacaagcagcatgcgaaggtgtccttgctagccataggtctgtacatgatgtgccctttacagtgccaatcagggatgctacctccctactcaagccaccctaggatacgtccataggatctgccacgccaggagcaatggcacttgcaaccccgccctatggtggtccctaacatagtgaccatttcatcttctatcactagaggagatgctagccgtgaggggctatgcttcaactgggatgagccttatgtgtggggccatcaatgcttgtgactattctaccacaaggcaaccgccttcttggatgatgaccttgacgaagagtccatggtggcagccgagaactcaattctctatctccacacctacaccgacattcaaacggaggagaccatgcaccttcccatctccatccacgaccacaagctcctcgccctcctcgatggcgg

SEQ ID NO: 97531 - DNA, 748 bp, Zea Mays
tggcgatcgagaggtcaaacgacgtgaaaacgacgtttgaacgagaaatagtgccataggaggtttggaattcgaattgaggcacgaaatgacatggaattgagccgatacttcacgaataggtttatatgtgtgaatatgagtgaagtgtgtgcttggtttgaatttaggcgaagaaaatggaatttgggtactcgactcagaaacgatcgctcgaaacggggaatttggtgaaaatgaagcctggtatatcggatgggcgtgaaatttggcgaatatgttactggaggtgttgtgaaggtgcctgaaaattttgggttcaatcggagcatttttggctggtttggacatttcaccgaacacgtggcatgcagtgaattaggtttttagagatatggccatttgaggattgaaaccctcccaaagggagctagaaacctgcagggatattcaatgggcacataggaacacattccaccacttggattcactggaattgacaagaatttgaatttggcacacgagggtggaaaaaggggtgcactgctcaatggaacagagagggagagaagacagagggagaaaggggctgctcaccgagcgagggcaggagatggagcactgggtcgccggtgaagggaggtcgtcggcgagggagtgggaatcgctagagaggcagagaggagctgaggaaatgttctctgccccaggctcgggcggggaaaggttttttaaaaaccgaatatgg

SEQ ID NO: 97532 - DNA, 717 bp, Zea Mays
ggaatggctgcccacgtcgaggtgcacccatgacggaacgttctagcggcgagggaccgttctggttgaaaggctgcggtagagatcaaccccaaaggtcaatgagctttcctgggtcccaatggggacaatgcatagaggggacagaacccacctcagctgtcctggccacggtggagctcaccacggtggcaacgacgactatttccgaggaaatctagtgacctcgagcgatggtggacgagaagggatagatggtggggcgctagctttgtaactgagaggcagagattagtgcatggtcaatttggatgaccggggtgaggacgcggtgaattttaaagaaccaatgacacacggtgacagcctaagcgataagcttcatcgtgcctcactgcctttcaccggcgacgtcgggctcgactattttccagggactagacacgtaccgccatgggtaatgacgcgggtagatcaatagttgtgtggacaaatggagtgaagcggcgccgacgactcagcacaatcactagggccagcagccgcgtggcggcctagacgttcacgcgccacgacagtggcctgacccaactcacaaagatcacggcaaagagatgcacgccgagcacgcatccggaattctacgcaaatcacgacgccgatcgacgctgatggcgagatgcagtgtattccgcactgaattgattcaggactgtt

SEQ ID NO: 97533 - DNA, 366 bp, Zea Mays
gagccttgtagcgattgagcgagccgtcagaggtgagcttgtggtggatgatccacttgccggtaaagaaagtgtttatcctctcttgtgaggacaaagtcaatttgactagagtgttggccactactataggtcactaaatggatttctctcttcgtaaaggaagtgttggctatcaataggtcaaaagttaccacaaagtccaagactttctcttcctcttgactcctactaccatacccagaacctctatgaaccgtcttgaaacctgcagttgttatacctacaatgttcattgaggtttctattaaaagcttctcacgaataggtatagctctaaccatgtcatctaagtctttccagaag

SEQ ID NO: 97534 - DNA, 304 bp, Zea Mays
gtgtcgtatggctttatcatgatagcgcctcaagttctgctggcatctggctgactaaattactatgttcaattgctcttcctccaacacatcaatatcctctagcctggtagcttctgcttctgcttcagctatgctttcgaataccagccttggtgccccgaacctgaggtcggcgggtagcactgcctccgaaccatagatcatgaagaacggggtatttccatgcagagctcgactaggttgagttctcaagctccaaaccacatacggcagctctctgatccactttcctgcaaaattt

SEQ ID NO: 97535 - DNA, 397 bp, Zea Mays
ccccaacagcatgcactacaaagcttgtcctttacaaatacaacatccttcaaacctctaaccaagtcttccttcagaatcttcgtaagtgtgctcattgcaacatgtgcaagccttttatgccaaggccatccaagagatgctttggtaaagaggcaagtccttaggttagcatcttcagaagagaaatccacaaaatatagattgctatatctaaatcctttgaatatgattgactcatcatccattttagatacaacaacatctaacagagtgaataagcattgaaagccaagatcacacagctgaccgactaatagcaagtagaaactcaacggtgcaaccaagataacatttgagattgaaagatcatttgatatagccaccttgacaagcc

SEQ ID NO: 97536 - DNA, 387 bp, Zea Mays
atgggtcccgatctctagcttcgtgatgccgccgcacattccggggtctctttctccgtcgtcgggcatctcgttggggaggttcctccttctacatggtagtttcatcttcgaagacgggcgatgactccaatctcccctgaatgaagaggacgtcagggtagaaaggagcaggtatggtgatgtccttcttcccatcctcatttaagggcagaggtactgggaggacaactcactgtgttttcctttctcggtaagggacattcgcttccttcctctgagtgatctgtgtccactccttagtgggcgatgtggacaacagagttcttcaggtcggagaggccctgactaactggccctccattttctgagtgcttttgagccctg

SEQ ID NO: 97537 - DNA, 306 bp, Zea Mays
caagacttaaggttgaatctgagaaaaattcgaagcttagtgaggcggtgaaggctttgaaagagagatgcttcgagtttgcaagccaatgcaccgcccgattgaggagtatatttaattcagttggagctgcatccgaagaaaccaacctcttagccgaagatatacctggggcactcgaaagtattgaaaaggaggttgatgtccttgacgaagtcataaccggccaaagagacttctgtgcgctggtagcttctcgtggtacaactgtcgccttcataaaagtcggatgtaatcacgcgaaag

SEQ ID NO: 97538 - DNA, 474 bp, Zea Mays
cctccgagatctcatctcgagatacaggctgcgccgggtctcgttctccggcttcatgatgttgtcgaacattccggcgtcagttcctccgtcggcgagcttctcgctgaggaggttcttccccaggcacgattggctcgtcgtcagagatgggggacaatttcactcttcccctgatgaagaggatgtcggggtagaatggagttgccgtgacgacaagcttctctctgttctcctttgagggcgaaggtgccagaagagcagcttgacgggcctttatctcgtttgcttcttttctccttgtaatccgtgtccatctcttcgtggatgaggtggacaacggggttttccgggtaaacgaattctctgctcctttcttgcaggaggtagtcttcgcccggggtgctggaggttgtgctctttcctgctccgttccggctttttcggagattttcgaggaaggcttcttctccg

SEQ ID NO: 97539 - DNA, 507 bp, Zea Mays
cccatcacctttgatgtcatttacatggtatacccatacaatgcaatcctgggcaggggagctattaatgcttttgaagtagcaattcatgggttgtacctatgcatgaagatcccaggacgcgacagagtcattaaggtcttcagcgatctgcaggaggcccttggtcggacgctccgacttgcaggcttgttagacggagacttggtcagtcgctgcacctcacaggcttgctcggtggggacttgggcggcaaggatgttatgggcctattttgggtaacctgtccctgtgtactccacacatctcgtactgcatacatgacatatttgataacatatatctagcgcatactagactaaactatgctcagctaaaaaactttacaacatgtgaatctgcctcgtgtctagtgcacatatcaggcataggacgaaaaattgtatcgagggcacttcctcgtctttttgcttgctctctgagtgtgtcaccaagcatatatacaat

SEQ ID NO: 97540 - DNA, 367 bp, Zea Mays
tcctgaataccacctagagcttcaacgctgacaatgccaacatcagacctgtctcctgtggctgcgccaaatccacccgagcaaagacagtgagtggcaactggacccccatctctcccagatttagtcccaaccttgctgtttgttgtgcggatgatgccatgtcaacagcaccagtagaaccatttgactgatccagcagcaccgatcccctactccctttttcgcccaaactgccttccttattttgatcctgaaactcatcatcatcatttgcccccgagtcatccatatccatcggcaaaggctgatcgccatcgactgccaattcaaccttgaatttcagctcataaatataatatccagt

SEQ ID NO: 97541 - DNA, 276 bp, Zea Mays
cagaaaagccttaagtcggtgcgacatgctcacccttacacgactcagggtgatcactataccctactaacggagcaatcgacttaagtcggaaacgccttaagtcggtgcgacatgctcacacttacacgacttagggtgatcactataccctactaacaaaatagccaactcaaatcgggagcacttcgaagaaaaataactcgttcacatcctcaagggtgttttcagcaccctgctgacagaacgatcagttcaaacatagcacaattacat

SEQ ID NO: 97542 - DNA, 437 bp, Zea Mays
cataatatttaggtttggaataccgaatagcatcataaccgacctgggatccaacttcacaagttcagagttcttcgatttctatgagcaaaagagcattcagatcaaatatgcctcggtggcgcacccaagagccaacaggcaagtcgaaaagagctaacgggatgatattggaggcgctcagaaagaaagtcttcgacaagaatgaaaagttcgcaggaaagtggatcagagagctgccgtatgttgtttggagcctgagaactcaacctagtcgagctctgcatggaaaaacacctttcttcatggtctatgattcggaggcagtgctacctgctgatctcaagtttggggcaccgagattaatctttgaaaacatagcagaagctgaagctactaggctggaagatgttgatgtactcgaagaagagcgactg

SEQ ID NO: 97543 - DNA, 1154 bp, Zea Mays
cgattttggccccttttctcaggaaatttgccatggtttcatttatagtgattcttggactactcatcttgagcatattcggttggtgtttacaaaactgagggagtatcagttcttccttaaaaggactaaatgtgattttggcaaaactgaactctcttatttgggccatattatttcacagaagggtgttgctgcagatccttctaaaactgaggtgatgagcaagtggcttactcctacatctgtcactgaggtgagaagttttttgggactcacggggtattatagaaggtttgtgaagaattatggagtgatagccaaacctttgactaagctgctgcagcacaaatcttttgtgtgggacacgacaactgatatggattttcaagcattgaagcaggctaaggtgaccacacctgttttagctttaccttagttcaaggaaccttttgaagtggaaactgatgcatgtgctactggaattggggcagttttgatgcaacatcataggcctattgcatatctcagtaaagccttaagttccaagaatcagttgctttccatttatgagaaagagtttttggctctattgttggcagtcactaaatggaggcagtatttgtagcatactgaatttattattagaactgatcataaggctctaagttttttggaggatcaagtactccattcagagtggcagaaaaatgctatgaccaacttatggggttgcagtttcgaatggtgtatagagaagggaaggagaatgttgctgctgatgcactttctcaggtaggccatgcgatggtgatgcatgctgtgacagaagtgcaacctgtttggctacatgatgtgttgaactcttatatcacttatatggaggctcaagacttattggctcagctggctgttcatagtcctagtgagtaggggttttctttgcaaaatggtctcattcgaaaggatggtttaatatggattgcaaataatttagccttaaggacaaagctcatttcagctctgcatgatggggctgtgggtagtcattcggacagtttagccacttatcatcgtgtcaggcgtttgttttggtggaagggcttgaaagctgatgtggtggagtatgtgaaacaatgtgacatttgtcaaag

SEQ ID NO: 97544 - DNA, 684 bp, Zea Mays
ctgttccgacagaagatacccacgagtccatcatctatgttccttttctcatccgtggccttgctcttcccatttctcccttcttccgcggtctccttgatttttacaatctgaacttgacccatctgaatcccaattctatcttgcaaatttctatctttgtgcatctgtgcgaggcctacctcggaattcttcctcatttcggactctggaagtatttgtatcattgtaggcttgggatggctggggggcagcaccagctcgttggtggtgcaagtttggagatgcgccgcgggaggaagacagaataccttgacattcccctcaaggatagcattaaagggtggtgcctagagtggttttattgtggaaaaccactgcaagtccctccccccttggtcggggagacagtcatatgtacgtactccgagctaggttgagtctccaactcccttggaggtaacagaggctagagttctgcttgctgagatctgtctgctgaaggaaagaggtctgactgccgaagctgtggttgctgactttgttttcaagaatattcagcctttgaaagacagggcgtatccagcttacttgtacagtggtatcaatgactctacccgggtcatcaacaagagaattcctactgaggatctggtgagtcgactagacatgatcttgaggcag

SEQ ID NO: 97545 - DNA, 505 bp, Zea Mays
tagtctttgccccgtttggccggtccaggagctccccagagctctgccgcgccgctcaccgtcggggacctcggtctgcgaagggatagaaccagaggggcttttctgcatctgtcagtgactcagttaaacagtgacgtgaccccgcttccagttattcagtaagccaagggcctttctgcaaagtccgcagcgtgggcgcgggcacgcgctttccatttgagtagggccgcctgggctagatttggccgagaactgtttaagcttttcccttttcttcttctatgagactttggaaatccgtagaaaattgtagaaaaatgataaaaatgtcaaatcaattttcctagattcctaattttccatggtatttaataaaatagtttcatgatttttaggtcaaatagggaattttggagtatttaaaatagcctaaaacattgtttctggatttttagaaaatagataataattccaaaaatccccaaactttttatttgaactc

SEQ ID NO: 97546 - DNA, 399 bp, Zea Mays
cggaaacagtgattggggagaatgagaaattagcgagctctggtgatcgattgagggcacggtttgggtggtttggtgcttgactagcctatggagctcacggcagcctcaatttatagtaggcaagagcagtggccagtgaatttggattgagacgcgcggcggtcagaggaatgggaggtcactggcgcagtggattcgtggagaataccgtggcgggctccccggcgatgattggatggcttaagcgagtcacggcgatgcggtaaatgtgcccaggcacgtggcgcaaggccgtgaagcggctgtctccggtgaatacatccgaagcatccgtgactagctcggtacggtggtcggagtagtttagtggccggagtatatccacgacgatgatat

SEQ ID NO: 97547 - DNA, 569 bp, Zea Mays
attacctggaggttagagaagaacaaaggaactcccaagtcgtgggaaatcaactgacggctcgatgaaggatcaccaaccggaacaacccgcaatgcaccagtgggaaccaagtcagtgtcatcagcagaagtcaaaattctgtcatcaggagcgctgacctctaaagcgacttcctaacccgaagcctgagctgttgccatacaaccagaatgcggaggagaagaccctacgtgaacatccatggaagtgtgagagggagaaccaactcggacaccctcgggggctgggtcatagctcgcactacccatccgagccggatcatctccggcaacaccctcgggggctgggtaagcgttagcgccatatttgagggccgagccttccgtaacagccacctctaaggctgaaggaccttcaaccacttccatgggagcagagcaatccagaccagcttcctgatcatttagaccgcactccaaggtcgatgaggcacgggacgccgctcgggatgactccaacccggcatcaggcacatcagcgcaaacttccatcattccaccatctgc

SEQ ID NO: 97548 - DNA, 591 bp, Zea Mays
tccagattagattttaaactcatgtgaaccagtattcatccaccaccgttggatcatggatcaacagtccgggatgacccatgcccatatgtaatcttctcctctcgtctccgatccaacggaccaaatcagaacgtgaagcaggggggtatggaccttttaatcctggcgcaaacaacgagatctacggtacacatgccacccaccaaattttatcctttatactcgatctccaccgtcgatccaaggaccgatgaccaccactcttctccctcaaccctgctctctcaacgcggagcacagggcttgtgcgacggcggccatggctggcaaacagcgccggtgccctggtacaccattatcatgaacgatcggttctacgctatgaataggacaaggcgaacggcaggggtgggtagttaccagctattgggccgcgcagactcccatcgacgatggatggagcagggctgtccttaccgagcccgacgagcaattgccaccaatttttggccaccagagctcaacgataaccatcgacacgctcctcaagagaatgcgaagctccctgaccccatgctccaccccgag

SEQ ID NO: 97549 - DNA, 614 bp, Zea Mays
cgattataaaagtatgggatatcatataataaatgttactattgtgtagtagatatttatacgaagctatcgcaactggaacgagtcaaatcggatttaaaacggaggagatacgaatttcctaaggttttgtgtatttgatacgagattaattaatagataaattttaataccattttcatgttaaaacagagacaataggtgataaacaacattattataaaattatagaaattagaatgaattaatttggacttaaaatgaattttctaggaattaaacaaggttcgggaattattttcacactgaaaatcgttttctaaattgattattctgattttctaatcctctgtactacgcgcacaaatagcagagagtttaggggtcatttcctaagaaaccagggcccccacggtagatactttacactccgaatgggtggcgagttgattcagaaaaaaagacagggtctctttagaaagattcccaggtcgaaggggtatggatggattctggccattggatcagcacccgatggtttagattagatctagtgcattatgaatccgcggacagcgcaggaccgcccaatcacaaacctacggcctagatct

SEQ ID NO: 97550 - DNA, 523 bp, Zea Mays
cttattgtgtaggataaaagataggttagggcaagaaaagcctaggataagcaagtttatgatgtgaaagaattccgtgttgagtggtaatgcatctgaagatcgtgtttgactcgtctctttccttgacgaggttgatattttcttctccggtcttgagctcattgattcgtggtgagtgcatatcatcgggggtgggggaatgtggttaagatagatttggatgagataggctacatgatgtaggtctaaagttcatttgatgttaggtgggagtagacagattatgcaatccatcatgacactattggttgggttagctcttatgttcacggtagagttggtctaatgcactaattttaggtttaagtgcatgaggagagaacaagatttataggagtaggatccagtttattttactagtattaacttgttaaggtactatccttaggttagctcaacttaaggttagacttcatcaggttagattaacctattaggttggatcagatctagaataaat

SEQ ID NO: 97551 - DNA, 802 bp, Zea Mays
ttgcacttaagcccctctatttttgtttcttcatgacacaggtccccaacagtgcgcaggttgaacacgtggccggaatcgtgcacacctacccacagcgaaccgttctggtggtgtcgagcatatgggctccatcaccggtgctatccaaacacccctctatgcttaattcgactagagtgccgctaactcctagctgaccgcgataatggcgaaaccggattgttgacatgccattaccggcttacccgaaccggtcgagttcaatccaaggacgaggaaaggctgagtggctcactagggtcatggtgcttgcgcaaactcagatggagactacctggaacggtctgtcgacgtgagctatgtccacggcggtgttcccgggcaataccgcaatgttccctaagctatagcgcggtagcgttcaatcggccgatactgagacctttactagcgtcagaggatatagaaacgcggaccaaagcgacgtgaacgaacctatgtatggctggccacggcgagacgtcacacgacgacgaggatgaccgatctaggggaaaacaggaattcatgggctatggtggataattggaagtgaggagcggtgcactaggcatgtaacaagaaggcagagcacggagggccttcaatttatattgaccactcgagtgcttcacgaatttgggatgagatgatgttgcggcggtgagcgggtgagtcatcagagtttgccaaacatggcgctcacttagggtaaactcagggggggtaattgactgtcttacacgacctacggtgatgt

SEQ ID NO: 97552 - DNA, 316 bp, Zea Mays
tgaagatatacttcaaacttttgtgatctgtatacaaatggcatatattctctagcagataaatcttaagggcatgaactactgcagccaattctagatcatgggttagataatgttcttcatgccgggtcagctgccttgcggcataggctattactcatccttcttgcatcaggacacatccaagttcactgcctgatgcgtcacaatacacatcaaaagacttttcaatatccggttgggccaaaactagtgtagtggtcaataatactttcagctgctcaaaggcctcattgcatttagaggaccaatcaaa

SEQ ID NO: 97553 - DNA, 580 bp, Zea Mays
gcccgccttagatgtaaggcagccacaacgtactctgactaagcatagagcattgataggcttatgacaggcatctgtgacctccccgcgtgttatcgaggcgcattgtaacatggcagcgtcgcgcgcattaaatttatgctcagagctccgcgcgttactgaggtcgttgtgccatacgcacgtggaagataccatcatgaagcgtcgtttggtcgggtattgagtccgctgcaatgatcggccagacgtgacaacattagcgactgcacacacacctacgcacgtcagcatgccagtctatactgcaacctataccagagcattcacctgtacactagcaagacagggcgaaggagaagttggtcagaaaatctgcacgacgaccaagagaagatctctgtctgcgacgacattacttgtttcatgtagaatgttttattactatattctcgggctcacctgttggggctcaacttccttgtatgtgccccatttggattataaaagagagggcatgcaatgttataatggaactacacaaagactcacagacaatacaactcacagtggatatagg

SEQ ID NO: 97554 - DNA, 652 bp, Zea Mays
ggataacaacacaacagcaaaagcactgtaaaaaatgggatcgagccaggcgcaagttccacccgacatttttgtcctggaaatacaacagctgagcaccaccccagggccaacataggaatgcaaggtactggatcaggcagagccagactcaaaagactagagggaaccaattatcaaatacataaaaatgagcaggagccagacgataaggccgctgtcgagcacattgcaaggcagtcggcccattatgccatcatagggggactactatataggagaggggccaccggagtcctcatgaaatgcattcactcagctatggggaagcatctgctggaagagatccacacaggataatatgaagtacgtgcaacatcaagaactctagtggggaaggctttcggagcaggctttcatcggctaacagcaaagaaagatgcagctgatttagtacaaagatgcaaagcatgccaattcctagctaagcagcagcacctaccaactcagcaactgcaaactattctggtcacctggccctttgcatgctaggggttggacatgattgtaccttttaaaaaggctcaaggagggtacacccacgtgctagtcgacatcgacaaatttacgaagtggatagagtacaagccaa

SEQ ID NO: 97555 - DNA, 393 bp, Zea Mays
ctgaatttcctcgtcttcgtgaaactcttgcccaatcgcagttaccatcggctcagtgcaggcatagtcagatgattctccggccagcaggctaagaacaacatccatcttagcatcatcggtgctagatagcatctcgaagtgagtttgcttcttagcctcgggaagattttggaggggagcaattaaggcctcaatgtcctctgaggaggatcgcattctatggcccgggctaccatctcgaacaggaggattggagacaaagtcagagaagggactatgcggaggcaggttccatgcagagtaagataagggggcaccaacattcgaaaccctgccccttaatatcatatcaagtcggcttagcaggtcctcattgggaatttgcctgtt

SEQ ID NO: 97556 - DNA, 485 bp, Zea Mays
cacgcccctccatcttccatggattccatctctcatcaggtatctctctctctatctgctcttgcaagctacttccatggatttgatttttgttaagttcgcctacttgctctccacgtacgtactggctacatcgtttctgcgcaccacacacccaccaggccatgaggaatcaatttgctcatgggagcatgatgatgcagacaagtacaaacatagtatataataaaaatagctgccgattcattctttcctttcgctcatcgttttcgtagttaattcattcattggcatggttaagtatgtgtaaatacttacatgtagatatatcagggtaaaggtccagacaggacccatttaagaggattgaatatgcctgcagcggtcggccgccccaactgcacctgcacgcgcatcagtgtatttcgatcaactctctctgtcctttctgctttctccaaattaatacacttattcctcagacg

SEQ ID NO: 97557 - DNA, 581 bp, Zea Mays
cgcccttcacctcgtggcgcattgttgctcgcaactctgccacctgcaccgatcagatcaccatgtcctcaaggtcgtggctttgctcgattgtggcactgttgatgatgccgcttttgctggtttccagactcgccgatttctctctagcattttctaaaaaaagtaaggcttttctctcaaagtaggaacgtcaattcctctctgtagcaaaccttgtcttcttttgagaccattctcaaaatagcattattttctctacacaatcaggtttattttctctacagaataaccctaaatcataaacttttgaaaagaagacaaggcctgagcaatttagagcattttgctctgattaattctaatgatttcaacgacccctgtgactcaaataaaaaaatgcacaagaaagcttacaaaaactaaacactgacttatatcatcggtagtcttttgagttttttgggatgattattttgtatgctatgtaaaattatgtatgtatgtccagacctctaaggtttagggttaatacaacaacttaactgcatatgttgaagaggacaaaagtagctcttttg

SEQ ID NO: 97558 - DNA, 274 bp, Zea Mays
aaaagtgactagtacaggcgtacagctcggtaggtttaggacgaatgatattttggactagtattctagaactgtggataaataaatagaataaaatcgtgctgatgtagaatgacatgaggaacacggaccttatcgaggatctgtggcggatcgaaggcatgaaattttatgggaaatggtggtgaagtgtagaggaaaatagaggagaaagaagagtgaaaaatgagtctctatctgcctgattggatggctgtatgtcgatacgtaggct

SEQ ID NO: 97559 - DNA, 732 bp, Zea Mays
ataagttatcaaagtatcttgtaatactcttgtatcatgcactgaacctggccaacccgtgacaacaaatgtgaacctcatattgaagtcacaaacggccattacattctaggatgcgtaaccgtgccgaccaatatattttgcttgctccatggccgggacagacgcgggaaagtgacttccatcaattgctcctatgcaatccttgaaatggggccaaaatctactctctcgcaatcgagggtgaatctctatgaaatttgggtctttgggcttgattacgtcagaagacatcttatatagtgcattaaggacttcactatacttgcgactaatagtttccaaagagtgaccaaacttattccgtatctacctaaatgattgtggacccccacatgcccacaagaaaatacctaaagcttccgttgtactgacacctcggcttggaagcagaccataactttccaccaacgtatcatgcaaacgtcgaaaaacagtacgcccatgcgaaacatgtcaaagcagtcgtcactattctccaatgttcgctcaactcattggatacctgtttcaaccattgttcttctagaaaccccactgggagagctcccccaaatgtctacagcacatagggcaacaagcaattctccagccctctcatcatcagatgtgtgtgtatcaggttcacacatctgcaaacacagaaacaataaccacatttcttgaataagc

SEQ ID NO: 97560 - DNA, 468 bp, Zea Mays
gaaaaatgttgcagcgggcaattaggacaactaatgtaagtttcgtgagggaatgagagatgccaaatatagagtccatgcaactcctaccgcaagctggctacgatcctaggatttagaggcggtgaaggttattgtgtggggactagggatagaatagagttgaaaaaaataatatatggtagttgatatagagttgagatataagttaatatgattacagaggattgtgatatatggtaaagaatcatgctgaaggtggcataatattttctttagatagaaatttagagtaacgtgagtatggatagcctaaacttccagtgcaagagagtgacagagagtgacgtatggagggggctttctacttgagtaccagtacctactcctgggtgtgctatgtgcctaagtagaagataggatggatcgtgtccagcaagtactctaaagcatcttgagaaaatttac

SEQ ID NO: 97561 - DNA, 511 bp, Zea Mays
ttttaacaccactactcactggtgatgctcgtcggctcaacccattgagctagatcgcacacaatcgtttggaacaccttgatttgtatacggtgttcgccatcatcgtgggtgcgagaattcagggcaggattggttcaattgaggcatgttttaggttcgcctcgggtcagggacgctagtccagcatttagttgagtcagtcgacgtcgttcatggtcggacttagcaaagagatggccgatggcgagcgcgccgttgccaaggtttgttttggagaagaaacataaatcagagggccttagtgcaaacgtcagagacacaaatgaatagtgtgcaaggattcttaattagttattcaaaaggccgaggtcctctgtgcaaagtcgccagcgcgggcgtgtttcccccgttcgtgtgccggctcgggctggtttgagcatgttactattcatttctttctttttctttttctaccaggcttaggaaatttatagaaattctagaaaag

SEQ ID NO: 97562 - DNA, 475 bp, Zea Mays
ctccgtctctggtaagtccctgtttaccttcaccaagcttgtagcatcgtgtaggacaccagggttagagtcttagtgcgcctgggcatcggattgggttcctcgccggcgagttccgccgtggatggggccagcgccgccgtgttccgggttcggttgggtcggggtcttctatggtcgtcgatccgtaaatggaccgctaggattagaagctatcgtacctcttcgccgaaatcatctcggggcgttgattagaagatgagcggctcagatttgaaatcagtatagcctttcgcgtgacccgctttgaccgtgggatccagatcctagggtctacgatgaataccgacttgcgcagtttctggtttaatctcggcgctcggtgtctaatccagcggccagcacagctccataccccttcgaccttggcatatttccttatgagcccctggatttctaataaactaacccgccg

SEQ ID NO: 97563 - DNA, 614 bp, Zea Mays
gtcgagggagaggagaattgctactcaatgctccattttttcctgccttgttcgtgtttagccaccccctattatagcccaagggttggccttctataaagatatgagaggcctgaagtagggcgggacatgttatatacgagagggagttcttctgacatagctccactgacgtcgcctcctgacacacgcgtaagcgcacttccggtatggagggttgctccgtcctgtcctatacatggattactgtagagactccggtgctaaggcttcccatagcggagcttggttggtcccacagtgcagagtcaggggacgttaagggacgtggatgatgacacctcgtctcgttgatggagactccccttcactcgcctgacatgtcgtggcgttagtcaagatatttggtggcaacatgccttatcgtggttggcgtgggtcagcaattcacactagaacatagtcatgacataggtctctcacacaatcacactagaatcactgatgtaagcatcttatacccattgatcttgtgtgtgcctcatgttttgcttgtgaaagaggtttcatcaatggatctgcaacatttgaattcgtgtgcaccttgaaaatct

SEQ ID NO: 97564 - DNA, 397 bp, Zea Mays
aaaagttagtgtagataaaagttggcgctggtagataccgactgatcaatagtgaggtggtagtagatataacccactagggctgaaaaccagcattacactattgtcatctccctatatgacccgttagatctgtgtcaatggcgaccggtaccgactactggcatggtggcccaggaggtcgatattgacctattcgagcgcagcgtagggtagcatggctggtcgatcagctgctgtagatcggtcggtgtacacgttcgcgtaggagagacgtggttgatatcgacggatcggtaccgacaggcgcgttggggtcacgatcactgcggatcgggcacggtcggtaccaatagtctggtgtccacgtggaaccctgcaatgggttcatttaatt

SEQ ID NO: 97565 - DNA, 924 bp, Zea Mays
gcggcggcagcggcatgttctgctttggcagtagaggaggtcccctcaccaaattcaggcactacggccatttcaatataccgaggccggtgtgtcaaaaccttcattttcttacccttcggcacagcggtggcggccgaagcggtagttttcctctttttttctttcctcaagggatagctatagtcaggatatacgaagccaattgcgtcaaaaaccttgtttaatcttttcttgccccgacccccgaaggctgcggacaaggcatcatcttcggccttggaatatttcctaagcagctcatcgctggtagcatcaatgcatttcaactagtcatcatttggttcatcaaacttctctctgaatctgaagttatatttcaatcgaactaagccacctttactggattcaacagtagtctcctttagcatttctcagctatccacaagtggccacaccttataggctatgtgctcttggattattactcttgtgccaatgaaggcacaaacattgctaaaggccttctagcatgcttcgacgtcatcctcaatagcaaccttcggccttcggaggccgaagcgagaccagatggggcgctggatgatttctttgatatccttcctttcagtcagatcatttttaacataaaaccactcctccatccaggcccgggccatcttttctggtatgttggtaccaggtagcttgcattagagcgagcaatgaatccgtaacaaccgtagttgttgtggtattgttccttgccagtagccttcatctcttataatagctcgtgcatattgcagaagcacttcgcactcggctctagcccctggcttcttacagcccagacaaacatccccatcctaattatagccaagatgaccaagaccgaaggcctcaacatagagagcttcgtca

SEQ ID NO: 97566 - DNA, 390 bp, Zea Mays
gttattaccagccacaattgcgtctgttgcgcacgttgtgtagacttgtcgcgtaccccaattaccgagccacaactgcgcctgttgcgcttgttatggaggcttgttgcgttgtcgtagcccagatggccacacacgcgttgacgccagatacgatagagcttgtactcgcgtggattgtggtgggtcgttcaagccctaaagtcacattatgcgcaaccttcgtaaacaattttgtctagctatatattttatttgcttgtgttgtgtggcatcatatatttatttatattgccaagtggccataacaactatatcaagctctatagtacttgaataatctgggaattaaattaaaatacaacagaacatggataagttaattctctg

SEQ ID NO: 97567 - DNA, 800 bp, Zea Mays
gatttaccggccggcccgaaagcgaaaccacgcacggaaggcactccttgcttagacacaaaattatataggttcggaactgtagaacaaacagtctatcgtacgtctagtctgatccataaggagatccggacgagattaccaatgtagattgttttcctgctagctcgaccgcaagcagccatgtgggtccgtaagtggcggtaaactctactagtttctatgcctgccaactgcagattctgttctgatgatgagaccacgcaacgtaattattgcagtagttgacgattgacattcaccgctagagctcatgcatacgtgcgccttatctaatctaaacttctcaagtctacgtacgcttggttattaagacgaaaagatgcggcgtttgttgttagaagtcgagacaactaattagctgagcagacatatagatggatcttctgtgtgtttagggttttgagacaactcagacgcagaccgtctctgttctgtgtgtgcctctggtatggtatagacgtctagtactttactagctagtaatgcaagtctttatttgtattgctctgcatacaactaactatacaaggatctgttgtttacaaggcttacatataatggttgctctgatagagcatcgggccatcaatcaaatgtttttgcattctaacgtaaacatctcgtggcaaatgggctagtgttcagacgggtaaaaatgactgcaagtctctggaaaatctcaaaatagaaccaagcccaaatacgtgccatttggtttacaaaatataatttaattg

SEQ ID NO: 97568 - DNA, 1027 bp, Zea Mays
ttttcttttgaacaattactttactagaaaatcttaggtgctagaaaataaaatctaagtgaggtgcttataatcaaacaaggtgtatgcatatgatgagaaaatctaggggagttttgggatagataataagaaggggggttagattagggttccaaacctgggttaaaaattgggatgttacaaacctaccccacttaaaggaatctcgcccttaagattcagacggggctcgagaaaaggtaagggtattccctcctcagagagtcctcactttccgaggtagcttcctcttccccttctctgctccactgaaccttacagagtcttacttctgagttgcgggtcttccggactgctgagtcaagaatctttattggcttttcccggtactagagatctttttgaatctgaattgtctctgcctcgatgtggttctctggtacttgcaagcatttacggagctgggacacatgaaacacattgtgaatatctgacatggattctggtagttcaaggcggtatgctgcgggtcccactctgccaatgacgggatagggacagatgaatcgcggtgctaactttcctttcatttggaaccttttgacaccacgcatcggggagaccttgaggtatacgaaatctccttcctcaaatccgagttctctccgtttgttgtctgcataacttttctgtcgactctgagcttcaagtaacctcttgcggatcagggcaactttctcttcggcttctttaacaaagtcgggtccttctagtatcctttcccctacattggaccacattaggggggtttggcactttcgtccatacaatgcttcgaacggtgacattttgatactggtctgatggctgttgttatatgagaattcggcatacggcaaactggactcccaattcctgtcgaacgtcaacacacaggctcttagtaaatattcgaggaccttgttgactctctccgtttgaccatctaactgagggtgataggtggtgctgaaatctaacttgg

SEQ ID NO: 97569 - DNA, 459 bp, Zea Mays
ttggagacaaattcagagaagagcctattgggaggcaggttccacgcagagtaagctaagggagcaccagcattcaagaccctgccccttagtatcatatccagtcgactcagcaagtcctcattgggaatctgtctgtttgtgacccgggtggaatcattgatgctggtatacaaataggcgggataaactctgtccttcaaaggttaattgttcttgaagacaaagtcagtgaccacggtctcagcagtcaaacccttatccttcaacgagtagatttcagcaagcattactttggcttcggctacctctgaaaaagtgggagactccacccagctaggcgtacgaacgtctggttgcctccctaactgaggggaagggatttgctgtgattctccacgatgaaccactcaagacgccatcccttaatgctgtccttgagggggatatcaaatattc

SEQ ID NO: 97570 - DNA, 349 bp, Zea Mays
ctggaatttccacagaaatgggatgactgcttaccattagtggagttctcatacaataacagctatcaagaaagcatcaaaatggcaccctttgaaatggatgacggtgtcgtactccgttaaactggtctgaaccaggagaaagatgcttttttaggcctgatatggtaaaagaaacagaagagaaggttcaacgaatagtgcataatttgaaagaatcccaagctcgccaaaagagttatgcagacaaatgacgtcaacccttgtactttcaagttgaagattatgtctacctgaaagtctcactaatgaagggtgtatctcgtttcggggtaaaagggaagcttgc

SEQ ID NO: 97571 - DNA, 291 bp, Zea Mays
tcaccgcagccacagcagctttttcttcagccattttcagaagtatattatcaataacctcaagtgtggtttccaggttcgaatcttcggtggtcccggcttcggccccggtagcttcggcttcgccggtttcagcttcagtggtttccactccggtagcttcggctgcggcgccttcggcttcagtagtctcggcaaagacattttttgacaccgtcgccggtggcggtgtctgatgaatcacatctgcgacttggatagttcttcgttttttcggctttgcaggacttt

SEQ ID NO: 97572 - DNA, 453 bp, Zea Mays
gctattggggattgggtttggctttgtttgcaacaaaggtcagcagtgggtgtcaccatagcagcagcttccaaactaggacctaagttttatggcccttatcaaattatgtagcgcatcggagaggtctcgtataagctacagctaccaaccaatgcaagaatccatgatgtcttccatgtggcacttctcaagaaattccaaggtgagccaccatcagcaccagtacttctgtcggcggttctccatggcaaggtactaccggtcccagcaaaagtcgtgaaggctcgcttgaatagaggtgtgtgggagctgctggtacaatggatggggcgcgtcgtccgatgctacctgggagcagtgtactgagttcaagaggcgttatccagaaatccaactcgaggacgagttgtttgtcggagaggagggaaatgttataaacacttttgtggg

SEQ ID NO: 97573 - DNA, 648 bp, Zea Mays
aaaatcaattcctgagaaatcggacgatcccaatctgcatttgaaagcatcccagaggagactagatttatgttcgtgctcatagtgaataatcccattctcgtcagtcaaagtggcaattgagttcttcctgtgtttaatggtggcatgagcatggaagaaacgagatccagtgtcaccatcagttacccacttaatagccgcccactgcttccaataaattttctggatgttcagcagaccggccactttttactgtagaatatctctgaaattccattcctcaatagaaagatcccggtgctcttccatattgtctacaaattcaattagaagcttgatattttgcaccattttatcaatttttggaagcaatctctgccaatccttcagaacctttcgaacacatttaaacttagcagtcaggtttttagccttgtcaggaaggcaagggagcccagcccacgtggattgaaagagattcaagaagccgtccaattcgagccagaagttttcaaaccaaatttttttggtttagggatcttggacttaaaagaaaccaggcaaggaacgtggtcagagatgtctctcggcatcgttttggcacaggaatccggataaacgatcgaccattcttgagaaatgaaa

SEQ ID NO: 97574 - DNA, 289 bp, Zea Mays
gtagcaacgacagatgccgagacgaacacgtgacaccagggccacaccagtttagggtatgcgaagtcgaggcgaacgttgtctcggtagtgacgatggacaccgagacgagcacgtgacaccatatgaagggcatcacctggttctactagccattttcagtttagattgttcccaactttcattgcatcgcctgcttctatcaccggcgcttgccgtcggagattacccaaggagtgtggtaatttctttcccgagcggtgagcgccgacttcatcagtgaggttct

SEQ ID NO: 97575 - DNA, 475 bp, Zea Mays
aaactatttgatgcagaagttgttgtctgaaccatggaatatgctgtcggaaccttgtgcaaacacaggtttcaggttaaacatacaaaacatcaacttctttggtaactttgtggaaccatgtgccatataaaacagtaggttctttagtctgaaccatagaagctttgtgggaccttgggcatgcaagcagcatacaaaacaacaccttctatggtttcaatctcataccagcatagaagctgctgtatacaaaacagatttcaggtttctacgaagtagtatgcacaccatacacaacaggtttcaggttaccaaaaagcaacatacacagcatagaaaataggtttcaggttaccaaaaacaccacaaacagatctcacaccagcctacacaggtttcaggttcaaatacaagcatacacatgttacagattgtcagcataggacttgtgtaaccatacatagatataatt

SEQ ID NO: 97576 - DNA, 927 bp, Zea Mays
cttcggtaaagtttaattggtcagctccgagagcaatagaaggccagagtcaagctagaataggaagtaatttggcatgtactgacccgaggagtgctggccacggaggggtttttcacggcagcggaagaaaccgattcaagggaactccgatgatcactaagggtggtggacagaatagagtgactagtgattcattggcttcgcaacgaagggacgaagagctgtgctcggttgatttggatgaagggggaagagagcgtggtgaatttataggcccaatgagccaccgcgacggccatggtgataaccatcaccggaccttgcttgccaccaacgacgacatcggcactgcccttttctaagagtttgccacgttccgccgcgacagtaatgccatcagatcggcgatggcatggatggacggagaagagtggcgctggtgaccaagcttggccggaaggatcagtggtcgcgtggcggccggaataattatcttccaccgcgacgatcttacccacttccagaatatcatcgcgaggagatgctcgccgaatgctcagcccgaccatggcgcaaatcacggcgcagatcagtaccggcggcgaggtgtgcggtactagagatttttcttgctactgtaccattgggacttctgcttaaagcgcctgacatagcataatcaaggcataatttctccataatctatgtgacaacgtcataatgcatctgcatcaaagttatagatctataatccatcttcatttttgctatagcatccctagtcgaattcctactgaatccaacccaaacttgaacttcaaacatggccaatgtcactggtggtcatacttttctgaaattggtgttcagaactgtccaattgacttctgacagcacgccttctcactcatttatcttcaattt

SEQ ID NO: 97577 - DNA, 436 bp, Zea Mays
tttttatatcagcttatgagacggacacttctgccatggatggggtacagggaggctgccactcatatccagctctggctccttggtgccctggtctctcactcagagtttgatgttgtggatttccttatttatgagatcgaggataccatactggatggtttgcgtgctcgtcgacagctgccttatgctcactatctgtgtcacatttttgctcagctgattcggcctccacagttccagggcacacttgaggcctcacgtctcctctttgggtcctaccgtccagcgcctgaggatcctgtgccagcacctgctccagtatttgacactcaggccaaggatactgctcttcatcagttcgaagctcaggacacagccgttgatgatgatgatgatgatgatgattttgggattccacctccgcctccgcctc

SEQ ID NO: 97578 - DNA, 437 bp, Zea Mays
cgcgctagtcatccacttcgtcgtcccccagcacacacacacccttcctccgctgcctcagctatggcagcgccgagctggatccggctccggcaggcgcgtgcaaccctcctcatcctgctgctcctcgccctcaacatctccctttcctccgccgccaacttcgagggcttcgactccgacgaccttccctccgcggccggtggcctcgatgctgacgatgacgaggaaggtctcgacggcgtcgacctcccgccccctccgcccatctccctctccacctctgcgccatcacctcccgtcacgacgacatccgcgccgaaccctaaccccgctacgcgtacgcctcgggaccccaccccggcgctcgacctctgggacgaggacgagttcgagggcatccccgtgccggaagcgatcccctccgacgactccgc

SEQ ID NO: 97579 - DNA, 530 bp, Zea Mays
aggggattgaagagaaaattagtttattttcacctcaattttctctaatcccgaaagaaatttaaggttcctaaattagtcttaaggtttggaagataaaatcgccatacgtgcgagcgtagttactcagatcagatgcgtgtagttgttgggatgagaaggtacaacgaacattgtttcgtggataaggacacaaggagtctggcttagttctcagaccaagtccaaatgaaatcaacatgacaatacgaacatgtgtgtcataagttagggtcatatatgtgacaataaaccaaacaataagaactctaatatctaattcacttcatgtatatattaccatttttagtaaaattggctacagctcttatacatcaccttcaccatgcccacttttctatttcctctaaaataatattagtttgcaaattttacgacacactcattgtcacaaaaagaggtacatgttatgatatatacaaggaaacattatccggtacatatgaaccttttgtgtgcatattaaatcg

SEQ ID NO: 97580 - DNA, 585 bp, Zea Mays
gtgctgccgaaaattttgaccatagccgaagcttgttcatcgcagtctcaagcaaagcatcatcttgatttagcttcgtcataaaagaaagcttcgacaaaactataaaaattgtcaacttcatcaaaactgcaagaaattcaacatgagatggccagagtacgttcaactgcgagggtgacccgtgagggagaggagaccgaaggcaccaagattgccccgatctccaaagtgatgaggcaatcgggattagttgtgacagaagaagccattgaacaaggtgcacctgctgttgaaactgaacaagatgttgaggaggaaaacgctgatgaagaagaagaagattatagcattctggtcctgtcaaaacctagccacttggattttggaaaatctaccatttctgaagctgatatgcccatgttgatgaagttaggctacttcggggaaactgagaagaaggtgattcattttgctggggaagaaaccactctgataccagaaaatgatgaggtggtagttttcaagagtttcttcagggcgggattgcggtttcccttgaacgagatgattggggaagttttg

SEQ ID NO: 97581 - DNA, 874 bp, Zea Mays
gccacgcccggacgtcgtctcgtggaccacggtgatcaccgcgtacagaaaccacggccacagtttcttggctctggccaccttccggcggatgttcgctgcatctgttgctcccaaccgcgtcaccatggtttctgcacttggtgcttgtgcagcacatggtgctgtggacactggcatctggattcatcagtacgttcagaagctgggttgggaactggatgtcgtgttaggcactgcgcttgttgacatgtatgggaagtgtggacacgttgcggaaggagtccgtgtattctccaaaatgactgagaggaatgtttttacttggaactctatcattggagcatttgctttggtacaggatggagaaatggctctgcgttggttcttcaggatgaaggctgatggcatacgccctgatgctgtcacgctaatttgtgttctttatgcatgcgtacatgctggattagttgatattgggaggaaaatatttaacttgattgttcaaggcgagtatgggtttcaacctgggatcaagcactttggatgcatggttgatcttcttagtcgctctggacacctgaatgatgctttcagggttgttgaggcaatgccatcacagccaaacgctgtcatttggggcctgctattgcgaggttgcaaggaccatggtgattcagtcttgagtgagcatgtgacaatgcagctgctggagttggagcctgaaaatgcttcgcattatgtgacacttgcaaacttgtatgctgagacagggaggtggctggaggctcacgaggtcttgaagtggatgaaggaaaaaggattggcaaaggatgcaggctggagccttaggatgttagaggacaggtcaagc

SEQ ID NO: 97582 - DNA, 323 bp, Zea Mays
cgatggtccggctcccattgcagcagcgtcggaaggcacgtccgggtgcagtcgagcatacagtacatgtacttcttcatgtaaagtattatagtacacttgcaggctgtcgagggtcgcactaagctctgccacatgagctcgagcttttgcttcgtggtcccaagcgatcgaacgcgagttgacggcccaatcaatggccgaatcccgttctaaaatctcatattgcaagcggctgacgtcagctgacaattcagctatacgctggttatcctgctcccatgccctattccggtgacgtagctctgatcgaagttgttcca

SEQ ID NO: 97583 - DNA, 294 bp, Zea Mays
atgtgtttccaaaggacttaccaggtatgccaccagagcggaaagtcgaatttgccatagagcttcttcctggcaccgcccccatctttaagagagcttatagagtatctggaccagagttggttgaactcaaaaagcaaaatgatgagctgtcaaagaaaggttacatccggccaagcacctcgccttgggccgcccctgtcttgttcgtggagaagaaagatggcaccagaaggatgtgtatcgattatcgagctctgaatgaggtcaccatcaagaacaagtaccccttgc

SEQ ID NO: 97584 - DNA, 1280 bp, Zea Mays
cttaaaggtaaaaactgaaggagacagcctacgccatgttacaaaatcaatgagtccatcagcaagtctcagcaagactcatcagcattttcaatagtgtagcactaagaatacaatgaaatagcataagtaactagctgaacaaatgttacctcagcagcttcactagcaccctttctctccatcagggatgtaattctacccatccaaacatacaattcagcaccacagtctaagaagtaacacttgtttgtctcaagtaattcatgtgctaaagattggcagtcgacaggctccagctttccttggtcaaaactgaaaagtaaacatttcatagattactaattgatttcaggtagaaactgatttagttggcaaccaaacaaaaggagcttccgtatacagaataaaaactcagttgattaccatagcaatttgaaagcagtttcatcatgtttctcattgccttctgcaggtgccctcctaggaagaggggcaaagccgccaaaaaaaccccagaattcaccagcttccgcatcagccatcattctaccatcctctaagaaaagtgaaaacagtcatatctatagatttttaatttccagtaccacacaaggtgaatagatgctcaccaacagatgcaatttcacacttgccctcatgaaatgtatctttgatgtactgcacaacttcaagagcttttgctcgctcttgaatggatgagtttgagccactgaactggaaaattttggacttcgtatccaaaataaatatgtcatcatgattaagggatgatcgagcaaagggaacctggttgtaaaatggcaagtcttattatacgacatgaatacccatacttgaataaaaaagacagtcacgcagataacttgcctcgttaacatgaacaacatgcttcccatggcagacatataagtgggtcttgtaatcctgctcattgacctcaacatggttgaatccagatgccactcctcctggctgtggcatgatgcatggtctaaaataggacaggaatttttctgtttcattgccttgtatttctcggtactgaacagcacgcccgccaagagcagcatcaagctctactgttaaaatcgcagcagttccagcttcgtcctaccatggacaaaattggagtcaattacctttccaaaacagtatcaccaaatgacatgagaaatttacctgactagtatctttaccaatccagtaatggatatcatggcgaagagaaccatttttcaaggctgttgtctgtaaga

SEQ ID NO: 97585 - DNA, 285 bp, Zea Mays
ctgaagttgagagtgataattaaagtgaagatgatgatagcattctatgtccaactaaaaccatccatgttgaatttgggaggtccacaattaaggctgaagatctaattcgaatgaagaagctaggatattttggagaaaatgatgatgaactggttcattttgctggagaggaaataattctagagccaaaggaatatgaagttgtggtattcaagagcttcttcagggtgggacttcggttccctctttatgagatgataggtgaggttttgaagaagtttg

SEQ ID NO: 97586 - DNA, 306 bp, Zea Mays
atgggtcattcattcctcaccctgtgatgggttatggatgcttcagacatgtcttggatggaatcttcctccaaagcctctgcgacttcgatgtacctgtggaactcttccctcctttgatgaaaatcattatcagcccttatgtactcatccattttctgcaataacttttcaagggaatgatgaggcttccttgaaaaatactgggcagttggttctggcctgagccccttgaccattgctttgatgacgatgtcatcctgaacggctggagcctgagcccgaagcctgaggaaccttcggaca

SEQ ID NO: 97587 - DNA, 506 bp, Zea Mays
gcacagggaactccacctacatccaatggccgaagtgccttccttttggttgtttactgcacttgtggaaaactttctccctgctcatagcacattcgagaaaagctggcagctccggtactccacccattctccggtgaatgctgaatctattcccaatcatgctgtccattttactaagggggtgtttagtccctagaaaccaaacaccccctaacttttccgtgtgcgagatggtattccttgcatatttagtgctgtccttgagcactagactcgaacaaaatgcatgtagttacagtcacgagtaacctagccgttggctgaataaaatgcatgtgtgtgtagggcgtgtaatttgctaagcagcaacatatcttactgcatgtgcttgatcacgtttttcgttccgaaacccaaaaccaacgcgcccctctcgtgcggtaccttcaatgtaatgacaatttggttgagcagcggccatgggcaaatcagtggctctcgaa

SEQ ID NO: 97588 - DNA, 452 bp, Zea Mays
gcccatgaaagccaaggctttagtatacaaagactacatacacacagcccagggttttcgtcaaaatattccaacagcgattgttttcttgtggcctactatagcttgacccttcgtcgtcagccaatcactctataaatgtcacaccaccctttgcagcatgctttgcaacttgtactaacaagaggcacacaataccctttgttcatcccctgcacacatagctcaagcaattaatactggacacacatggcgccggcggctaacgattccttggtcacagctcatgtgataggagatgtcctggaccccttctacacagccgttgacatgatgatcctgttcggtggtgctcccatcatcagcggcatggagctgcgcgctcaggcagtctctgataggccaagggttgagatcggaggagaagattatcgagatgcatataccctggt

SEQ ID NO: 97589 - DNA, 822 bp, Zea Mays
ggcgctgggaggtgagatggatctctaccgctcgaattggcgccgcttttgggtcgtttgcggggggttttgtggggaatttggttgtgaaatggtttgccggccatggagtttgggggggggtaggttcggatttgggcgtgggtggtgggctggtggctgtgccgtatgagatgtgaagctagttacaggcggcgagctgcttttgcaagctctgatgcttctgccgcagagttgacaaggtccgaatgggagttagtctgtctgtctttgcagctctgtttcttctgcacttgggtaaaaacgctgtgaaccccaaaattaggaagattcagttcagaggtgaggattaggggtgggtgtccggtctgaaatagcagtggacctttgatgcctctgtttgtcttggtctggttccagtgatagctgtatcttgtgctaggttatggttatagcagttcatcatatgagcttttggagaccagcaagatatggaaagttcctggtaattacttaagtatcatttcactgaatgagtaatgctagctagttagtgaaaaggaacatgtcagcacctaactgcaccagatatcagaccgcaacatcaggatacaatacaatgcagcgagataaacagtctacccaacgagtataaatatactatgagcagtatgttggggcctcagggaaagggggtaggcagggaattgaattcattctaataattataatttaggcatagattaattaagctaatactgtatgattttgtatggaatatatttatacactactgttagccatactacctatatgttacat

SEQ ID NO: 97590 - DNA, 514 bp, Zea Mays
tggccttttcttctagaggtgctggagaggcttggttttgggcctatatggcgcgatgtgcttagtaggctgctcatgacatcctctactcagatcctcaatggggtgcctggtgatttcattacccataggagagggctgcggcagggggaccctttgtccccattactgtttgtgctggtcatggacattctcaatgcgcttattgtcaaggcagcggatgatggtctactccaacctctatcttcgggttctatcaagcattgaatctctctatatgctgatgacatggtactctttctaagaccagtggccaatgaccttaatattgttgctcagattttggatctttttggagatgctactggtttgaaaaccaacattcagaagagtagagtggtgccaattcagtgttctcctgctcatctctagacggtccaggaatgttttcctagcggtttgaatgtgtttccatccatgtacttgggtttacctcttacccctaagaagctca

SEQ ID NO: 97591 - DNA, 490 bp, Zea Mays
aaaagttccaacctatgtgcacgccgatttctcaagaattcaagaaatttcagacatttaatcatcctcatctgctctgcggtaagaaccacctgaccagctacaggatcaaatctcaaatcttaaagtgtcttttctgacttttatttaagcatgtctgtttacttgggtcttctttgggatgatcataggttgtggtgtggttataaaggagtgttctttcaatcagtacatttgtcctaactttgtgctttcaggaaatgtcctcaacaactgatccatctatctacaaagtagtaattgtggcaacataagcttcaggaaattgcataaagatggttctcatttcatcctttttaatagaccaccttagattatcatacttcttaaaaaactatgatacttggttgctaacagcaaaaatgcatgaatgtgaaacaattctctaccatcatcaggaagaattttgttaaaaagataatgtatctca

SEQ ID NO: 97592 - DNA, 403 bp, Zea Mays
aagacgacctctctctctctctctcatatgttgtgtaaccatcagaagtctagtagttttaattatccataaatcatgttttcttgctgtaaaattttagccttcactcgagcataaagacaacagacaagacaagaagtttttcgatctgaacatcttgaataatatttagatgagaccacacgagcagccacattggtacattcaaattgtcttcacgtgattgtatcaacagtactttagcgagtaatgagtattaagtggcgtaatggttcttgcaaccggaccttctcaagccactgatggattataattgagagacaatgaattggcagaaaatatgatgatgattaatgggagcaaggctcaagtacatataggcaaggatgtctctagaaaagga

SEQ ID NO: 97593 - DNA, 592 bp, Zea Mays
tccataatcgtaggtcatgcatgcatcatgtttaaaccatactaagtaatctttcccttttatagagctatggcacgtaccaagactacccagcggaaggcgaccagacctcaaggcgtgcctcgacactagttggctcctcgacatgaggggagcagtagcagaagtaatgatcccataggggatctggaggtcagagtcgaaagactaacgacgaaactgcgccatggaagcagggagcgtgcgtgtgatagccgtcgttgctgagatgtcaacagacgttgaccgtttgcagcgggagattgtggagcgatacatggctatagactaggctgtaaattcatgatctatagcctgggattgcgaggcaaatgcccaagcccgggtggaggagctaagtgtagccctggaaaatttgcaagcatacaataacactctgtatgagaaagtgcacgtggtgtatgactagttgcatccgtacgtgccaccagaggttgcggcaatgggagctggaacatcaggagcagctggtgttggtcacttgttctcagatgctataatcctgttcttgtaaagaattctaacctatttt

SEQ ID NO: 97594 - DNA, 321 bp, Zea Mays
gaactcttagtcgatagtagaaattgttttggcttatatagagaggtgatgacatgccaaagtagtcatcgcttcctctatatcttgagtcgggtcaatacacgttatgtgttcatgatttgggaagtaagcgcatgatggtttcgagttagagattagtggtttacgattcgtataaattggtcgatgtacgaaaatacttgtaaatctgtgtatttataaaaatgttgtagtatatgttgtgtctcgggttgcgacgataataggcaagccgacgtgtatgttatttagcggctatgtcgttgctctagttagccaaat

SEQ ID NO: 97595 - DNA, 480 bp, Zea Mays
caagaaggtgtatctaagataaaccaaaccaccttggctggagccagcaaccgtttctttcggcatctcccactcattcacaagaggccataccttgtaagcaatgtgttcctgtaccaaatccctggtaccgatgtaagtacacacggtgttaaaagccattaggcacgcttgaacctcattcccagttgcaattgatggccttctaatgccgaaacgtgaccatatgggacgctgaataatgtccctcacatcctccctctcgctcaaatcattcttcacatagaaccattgcttcatccaagaacccgaccatttcttccgaaatgttggcatgggataacttacctcagagcggagcacgaagctgtagcacccgaagttgttatggtattgctccttcccagttgcctttgtctggtaagataattcatgtatattacagaagcacctagcatatggctctagcccttggctcct

SEQ ID NO: 97596 - DNA, 472 bp, Zea Mays
gttattgaagaaacaccaccgtcggcctcggcgtcaaaaacaccgactgccgaagacactgcagctgccgaagctgcccccgccgaagcttcaatagctgaagctgcggcggtcgaagccacaaatcttgagggcgtattttctgatattgataagatgattttggatatggccgtggaagaaactactacaactgccgaagagaccctggccccagtgcccgagaaagagaaggagattgccgaagatacttcggaggaaaaggatttttattttcaagacatacttggtcaaaaagctatctaaggctgagaaggaagagctgagggattatgcaatatcatgcggctatcaaccaggggcattgctctttggtggcgttgccgaagagagtttaggatgcctccgggaccggattggggcgaaggttgtcagcactctatcgaagagtgttggctttccgaagcttgag

SEQ ID NO: 97597 - DNA, 272 bp, Zea Mays
taacttcatttccatcatataaatccaacatattttgccattttaggtgattggtggcttgcatatggtggtcgaaccattgagttatataagttttcaagacaaattgttagtcttcatgtttcatcatctgattgtgagcggatttggatcaagtttgaatttgtaagttaactaacaggatcatattacactattaaatttgtatttattacccatttatttgttacttgcaacttgtagatgcataccaagaaaaggaacgtgctata

SEQ ID NO: 97598 - DNA, 341 bp, Zea Mays
cagcatccagaactctagttgggaaagtcttcaggtctggtttctactggccaacaacaaagagtgatgcagccgagttagtccagagatgtgaagcttgccaattcttgtcaaagcaacagcatttaccagcacagcaactgtagaccatacctgtaacatggccatttgcgtgctggggactggacatgattggaaccttcaagaaagcttagggaggctatactcacgtgttggtcgccattgataaattcaccaaatggatagaatacaaacccattgcttctctaacttcagccaaggcagtggaattcatacaagatataatattcaggtttggg

SEQ ID NO: 97599 - DNA, 441 bp, Zea Mays
cttttcccctcaattccaaccctagccgccccccttccattccctcccaaggtgcagccatccctcctccgttggatctccatcgagttggtgcaagcctctaattggtgggaagaagaaggaaggggtgaaggaagaactcaaggtgatcttatgtttattttgtatttgtgctgcaattacatttgattatccattcacctaggcgaattggtagtagtgctgtcctgattttggtggcggacggacagcagtagtgtgggtagtttctgggatttttgctgggtaattagctgtaatcactgtgaaaatcatgtagagctttatcatatctttccatagagtacttatgtgttcgattcggtggaatattctaggagatatcgcattttgaacccagctaggttgctgtccaaaaactgaatgcagggtgtacattgt

SEQ ID NO: 97600 - DNA, 739 bp, Zea Mays
actgcataggcttctagactgactgatcctatgtcgagatcaatgcagtagttcatgtaccgatttggtgagttagttaaaatgattaccaactcggtacttgatagttgatactgcaaagtactggtccagatgctttgtaaattggaacaaatctccatgatcagaggggtaccttcaaatgctttctccttgaagaaaatccagacacctgtacatccgaattacacgagaaaggcatgtttttttatgaataatgttgtatattagaagaacatttccaagctgacaattgcagaatgcaacagggctttgggaataaagtggaactggaagttaagagacaagcataaagcaatacgatcttctttatctgtgagtgagattctgatttgcattatactatttgtcaccagggtgtggctcaagagatcagactgttacgttacagctgctgacaacttctgaacagaaaatgctaacacataataccaaaggactaagtattcactcggaatatgatcatacaaaactaatcaaggatgacaggtgttctatagctgatatcgttcagctcacgaattctgttctatagcagatatggaccacaggtgttgtgtcaagtgtcaaccatgctcaaagatgacagcttgagtagtgcagtccctatcttttcctcggggaggaggaaatacatatcacgacagtgttagattctttgtttttgagtggataagcg

SEQ ID NO: 97601 - DNA, 800 bp, Zea Mays
gattcgctaatatgaacaacgtagagcaagagaccgactcacctgaagattggagaggaacagtagtacacccagggtgaaaggagctagttcatgtttcgacgagggaaggtcagcaggaaggatctgaagagcactatcaggggtgacctgagccccgccagcaaacagcatgctccttgcatctagatcgccgacctctaaggcgacttgtccggttaaaactgtggaagcacgtaccgtcgtcgccccatcggactgaggtggggatgacccaacgtggacgtccatggaggcatgggaaagagagcccacctgaacacccatgggggctgggttgtagcttgcactgcccacaaaagctggatcactaccagcaacaccctcgggggctgggtaactgccggcaccaccctcgggggctaggtcttctgcagtagccacctctaaggctgagggctcctcagccacctccatgggagtcgggtgactcagaccagcatctcggcatgaaagactgccctccaaagtcgacgatgcgtgagacaccgctcgagttacctcttgcccagcggaatcaagcaagaaaagcccaccgtctgggacctctgaatagacaggcaggatatcatctgtaggtggctctaatagcatgtattcagggatgacttcctccagtacttgatcaaagtctaatattgaaagcccctgaagattgacaagagccgacagagctggagaaggaatatcactacccccctcactacctctatagtgttggatgttcttgcggatcagtg

SEQ ID NO: 97602 - DNA, 539 bp, Zea Mays
gttctacggaaggagacgcatcagcacccgtcgtcgtcaccaccaattcgggtttcgatcacaaactcgatcacgtcctcaagatcgtcaccgacctagttaccaaattctccgacctttccacccgtgtcatcaacattgaagcctgcccagctgtatccacaccctttcccacgttgctagtgtcaaccaaaattttggtgcccagtttaaatcttgtgtgcatatcttacattaccattgtctctaatgctaaaaaaagacaagcatttaatattatgatgatgtattcttagcacatttaagtgttatcctaagcatctctttctctagcgactcccctgctagaggcatcgaaaattctggtggtgcctaaaaagcagcactaagtcaaactcgcaatcagcttaaattcactaattctaatatactcaaacatgaatgtaccttaggaatggagttagcttttcaaaacaacatgttcacttgcatctcactatttaattaggtataatgcaaatataagttagttcacacct

SEQ ID NO: 97603 - DNA, 323 bp, Zea Mays
gctgttgtataaatgtccggggcatgaatgcaactaaattgcactgacaatagacggagggttgatttctctgtttttgagggactctttagcaaaattgactggacgaaggggtatcgttgcgtaggagcagctagatcaactctcgacggccctgattaggtcgtggcttttacgaaaggggtatgttgaacccaccgtgggatccagatcggatggcccaacatttatgaaggctgatctaatttcgccccctccgatcaggatcggacgacaaccaagctcaggacgaatcgatatcctcctctaatcctagctccccg

SEQ ID NO: 97604 - DNA, 501 bp, Zea Mays
cccctagccactattcattgtctctctaacaattgcacagaggtcctccgacttctgtttcttctctaacctgacccatgggcacggcgcgctcgccgtcgacaccttgttgctcggactggccatgatcggcattggctgcccaaattaactaatgtgcaagcattaccgacccgaggcgaacctagaacaagccttaattgagttaatacggacctggattgacctgaccacgtcgaaggcgaataacaaacacaaatcaaagcgttccggttgattgagtgtggtcaagcacaaagggttgagccgatgagtatcacgagcatgtgtgggtgctaaaacatgaccaaggagagcgggagcagacctgggaacaggccacggagcacgaagaattcatgctctgcagggtccgacaagggggaatgggtgtcgcgacggattctagtggaaacagggggccacgtcggggctacacggctgcaaaagactaccaattca

SEQ ID NO: 97605 - DNA, 483 bp, Zea Mays
gtaaaacagaagtggataacatttgaatattctgtgattcaaatgcaatgtctccaagttaagatcagcaacatcatcaaataagttattcaaactatcattaagaagagcaaggatagtgcatataatgtttttccaaattcaaacgaatgagtttcaagatattttatgtgtttaacctataatgttttatcatttcaatgtatggcagatggatagatcttggataaattctaggcttttcagcaagaagtacctagtcagggtggatgacttcatgaagtttgttgaagatcgatttcctgagattgaggagatactatgtccatgtcgatggtgtttgaatcaattttctcaacagaaatcataagtagaggatcacttatatattaatgggatggcgagcacatacacaacatggatacatcatggggagccaccattgactagcagattaaatgaaaatgctgaccatttaggtta

SEQ ID NO: 97606 - DNA, 870 bp, Zea Mays
taaagaatctcgtcctcgagattaggaaggactaggaaagaggtgggtaaaatctactcgcagttcttcttctctttcccaagtagcttcatcctcaccatggtgactccattgcactttgcacattttgatcattttactcctcgtgacacaagtcagagtaccaagaatcttgataggatactccgtataagtcagatcatcttgaacactaagatcttccataggtagctggtcctcgggtaccctgaggcacttctttagttgagacacatggaacacatcatgtacatccgcaagatgatcgggtagttccagttggtaggccacttctcccactcgctttaggatcaagaagggtccaataaagcgaggggacaacttccctttaacttcaaatcttcacataccccggattggtgacaccttcagatacacgtgatcaccctccataaactctagcagtattctccgagtatctcaataagtttctgtcttgactgtgcagttctcaagttctcccttatcaatcgaacttgttcttctgcctcttgtataatttctgcccaaagaactgcctttctccagtttgatcccaatacagtggagtcctgcatttttctaccatatagagcctcaaacggggacatcttcaaactggcctagtagctattgttgtaagagaactccgcatatggtaagctcttatcccagatgccaccatgtttaagagcacaagctcttaacatatcctccagtacttggttggtcctctcggtctgcccatcagtttgaggatggcaggccgaactaaatttcaactgtgtgtcccaacatgtgcaacttctgccaaaaccgcgaagtaaacta

SEQ ID NO: 97607 - DNA, 433 bp, Zea Mays
ctacactagcgcaaaacaaaattttcgaccccataaaaccagaaactactgcgattatagatcatggaattaccactagacgagcagggcactggaagacatctcggtgtagacgaacgcatcaatcagtgttgtacagtcataggcgaccttcacgtcctcgcgtggttcgtcctagtgctacagatgcagcacctccgaggtatccacatgtacagggagaaagcgttgcattcaaaacttctaggttcgcggagacggctaggcgagggcgaggagcgggcgactactcgtttactggtggcgaattagagttaccttaactgcgcccttgcccctcattataaggcgttctggtgggcttctaacactgaggcccattagtaaccctaaagccctgtctaatttcggatctaatacgagttaggcttcc

SEQ ID NO: 97608 - DNA, 498 bp, Zea Mays
cttacaacacataatacaatgtgttgctacggatgtgttgctatatggggatttgtgttgtagtgttacgtctaaataggttagccaatcgaaccctattatcctccacagttaaacacgtacggctgttgtgaccatcaactatgccacatttctggcacttcttgctcatcttcttagctcctttcgcacccaatttaagaacttgttgctcactacttttgattgttcttcccttaggcttggccttatctggtcttgctaagtttacaccttccatatgaaactccagtttctacaaatcaaagatattaagtcagttttcatattcacatattcatcatatactgtagcaatgttattacctttctagcttccacatccgtagcaccactatcaaccagacgcatatcagtgttatgttccaatgttaatatcggcatattacattgatcatcgttagcattgcattcatttgtattagaccccattaaaatt

SEQ ID NO: 97609 - DNA, 492 bp, Zea Mays
aaacaaggacctttggatgccaccctggtcgcggaaaaataaagcgtatccaaggttaaatctcctactcccgaagcgtttactgaggagctagactttatcatacgacacgctttgggtaaacagttgtcggaagagcaggttgtcgaagctaagcactatgccagggaattaaagtacccaaaaggatccttggtgtataatggcactaatgaagatgacttcctatactgccttccggacaacaatgggttatctgtttgccgggagatggcaaggaacatggggttttcaaagctcgagcttggcctctctgcaatgtcaaaggatgaccttgcagacaacctcgcttataacagtctgaaggtaaaaatgttctggcttacaaacatattatttttgtatcttgtaccatagtgctgatcctcctctttcttgtagggcttaatcttgagcaatgctttaagggcacaaaagaattctgaagacgaa

SEQ ID NO: 97610 - DNA, 438 bp, Zea Mays
atttgctacctgaggtggtctgggcgctaaacacgactgagtgcagggcgaccgggttcacccccttccgcctgctatatggatcggaggccatgaccccacaagaaataaaacatgggtccccgcgaacagttccgtcagccgtccccgacgtggacgagcccacttcgaaagatcacatcgatggagaccgagtcttcgctctacaggctctgaataaataccaagcccagacaaaagcatggcgcgaccacgcagtcatcccgaaagaattcagcgaaggggacctcgtactcgtccgaacagctcggacagagtccaggggcaagctggagcccaggtgggagggccctttcattgtcaagacgaaggcctcccccagcgcatacaggctcgcaacggcaaacagcgaagacctggagcactcctggaacatcg

SEQ ID NO: 97611 - DNA, 708 bp, Zea Mays
cctccgggattggagcaggttttcccctaggagcagcaggagaagctggcggagaaggggatgggacccacctccccgcacctccggaactaccactagatctggcccaagttctagccaatcaaacccgactcattgaagtcctcactagaagtctagaaaaccagcgcccaggtggtgggaggccacaggacaggatgggagaatttttgagactcaagcctcccacgttcgcggggtccagcaatcccctcgatgcagatgactggcttcgcacgatcaagaggaagctggaagccatcggatgccccgaaaatcagcgtgtccaactggcagctcatcagctttcaggaatggctttagcatggtgggacaccttcagtgaggccgtcagagatgctacctgggcagaattcgaaacagctttctgtgagcaccatgtaccccaggggatagttcaactcaaggaggatgaattccgggagctaactcaaggcgggaaaacagtcaatgagtatgtgcacaagttcacagagttggcccgttacgcgcctgacgatgtcagcaccgagtctaggaagatggcacgttttctgaaaggactaagacccaagcttaagaccatcctcgccagccaagacttcctcaacttttctcacctctccaacaaggctatccaagtggaaagggcgaaagaggaagaaaaag

SEQ ID NO: 97612 - DNA, 478 bp, Zea Mays
cattgagacaacaattgggacttgtgagaaaagattttcataagtatttctacttcatgcgatttgtcaatgcttgtctaccccatggtttatgaccaatctattaagctgagtttgtccttttatgttcttctattttgcaagatgttagccaaccatgtggataaagaaaattagcttgcatatttcaggtgatatcaaaactgactgatggaaaagctactcatgttccatttcgagattccaaattgacacggttactacagtcatccttaagtggccagggacgtgtttctgtaagttccttctcaggttataattagaataagttgctattatctcaatcttttgcattttgacttctttttgtgcagctaatatgcactgttactccagcatcaagcaattcagaagagactcgtaacacgttaaaatttgcccaccgtgcaaagcacattgagattcaagtgtcacaaaa

SEQ ID NO: 97613 - DNA, 1077 bp, Zea Mays
agggaatgttacaagagctcctcccaattgcttgtggctttcggtattagaagactttcgatattataagccgaaataatattggttgtcgaagaaacagacagaaattgattaaagttatgacgttttggatcttttgaagattgcctattgatttgtttgacacgatgctggcaaaatgggttctgtcattcagtttatcctgttttttttatattctgttacatgggaaattttttgagggcatgtacatttttatggaatgttataagagctcctccctgttgctcgacattggttatcgaagaaacagaaagcttgattaaagttactatgttttggattttttttgaagcttgcctgttgatgatacagtgccggcaaaatgagttctgccaaaattcagttatataggaatttctgtagtttattgcgttttaagattctattacacacttcgttttgttttgcgagcactcagtcggttttacggaatgttattccaactactactagtgaccttcgattttagaaagtgaaaaaaaaaacatatgataaatcgaaaggaacagaatttttggttaataatgtactaatcgtttgctctccatactccatggctccattgccaacttggttgttttagggcattgtcgtcctagtcttaagtcttatttgaatccattagctgatagtatttagctatctgatttggtcctgctactgagatggttgtttggttccaaaagagataattattaagcaagacaaggaccaacaacatttaggtggggcacgcttcatagaagactaacttgacagattgagccatttgtgcgagatatgttgttggcttcctcgagcgtcttgtgatttgagcatctctttctcttccgagctgtgcgccttgtgaaacagcagcctctccaagttattcttcaccttttctagacacaaatcttcctttcctgttgggcacagcaggctccaccctagcattattgctacctgcctcagtagcaatctcatatcctttaaacagtttcctggaagcatatatttgtttcttaaccggac

SEQ ID NO: 97614 - DNA, 379 bp, Zea Mays
gtccatgcttcccaatagctaccagactccaccacctccacagggcacggagtctccagtactacaaccccgcaagtatctaccacctccatactactactacaactctccaccagcaccacaacaccaccagcacagctacgtacctccaccaccgctagcttaccagtaccctccacctccactcatccacaagtcgccgcttcttccatcgtcgtcaccagcggctccataccactacaactctccacctacctaccagtatccaccacctccgtatagctaccaaccttcgccgccacctgccggcctgtactctccaccattattgcctccaaatgctccggaacacctgcatccaaatgtcccccatgcgaaa

SEQ ID NO: 97615 - DNA, 276 bp, Zea Mays
ctatcataggatctcattctgttgagccattagctcctgcattgttggagctgggggaggcggtgggggaacttgctcgttttgtccgcgacgaggtctagctgccatctgaaaacagaaaaatttgtcgttgttacttcgacccaagaattcaagtagtgacttcatatcatgaggagaataatgacacaaaattatatcaaacccagcgaggataatcattcattcattgcattgttcataaatgtttttccgggttacaacatactaggagat

SEQ ID NO: 97616 - DNA, 520 bp, Zea Mays
gtgtgttgaaaacactagggatgaactactttgagcctactccaagtctgaagataacgcactatctgcagccttcgggagccgaaaaaagaagagactaaatagagtttttgatgctatttgatttatgtaccctgactaccgctactcgccacgggggcagaagagaaagagtgcaacttctgggaaggaagttgcttcagctgctccaagcgagcccgcgccgaagaggaaaaaggtgaaggttcttactcaccgaccgcgctatattgaaccagccacagtgcctgaatttggcggtgagacctcttcggctactgtagccaaagaacctgcgcttacgcagaggattgaagagccgactacaatgctggaggcatcctcagccaaattagctgagccgaaggtcgataatattgaagagataggagtcgagggaacgaaaatattagaagttctaagcccttcggcagaagtgacagtgccgaaggcacaaaaaggtcttacagcgacccccaag

SEQ ID NO: 97617 - DNA, 300 bp, Zea Mays
aaaacatgatttagtttatcaaacatacagcacgacaaaaacagtgtgtgcagcccaaaacagcaattaataaatttcagctcctatacaattcaagaatcatcgtgttttagggacttgacttactctaacttatatcaaggcatactcaagcatagtcacacaatagatgacgtgatggctacgtagtcatgccatcacttcaccacacattcccaagtaacaaaacaactctaaccgaacttggcatttagccgatcgatttctagcctattttttataccaccacgacacagcata

SEQ ID NO: 97618 - DNA, 509 bp, Zea Mays
ctcgggattcttccccatttcggtctctagaaatacctttatcactgtcggtccgggatggctgggggacaacaccaacttgttggcggcgcgagcctggagcttcgtcatgggaggaaattggagtacctcgacattcctctcaagggcagcatctaggggtggcgccttgagtggttcattgtggagaatcactgcaagtccctccccctggtcagggagacagccagatgtccgcataccgagctggatagaatctctgactccttcagagataacataggctagggtattgcttgccgaggtctgcttgctgaaggatagaggtctaactgctgaggctgtggttgctgatttcattttcaagaacattcaacccttgaaggatagggcataacctgcctatttgtacaatggtgtcaacgattctacccgggtcatgaacaagaaagttcccactgaagatctgatgagccaattggatatgatcctgaggggtagagtttcaa

SEQ ID NO: 97619 - DNA, 428 bp, Zea Mays
gcaatatgtatattaaaacactaaaattatgcataccaatgaccataacattctatacctagcgatattgctcctcggacatgtacacatgtgatgatccccatatcttgtccattgcttgcattctacttgctaaaaataggcattgtttacctgagtcggtgaatagtagattgaatcattgacaatctttttgtgcatttttatggactgcgtaagtgtggtccttgtaatcaccatagagcgacaaccgataacgtaactgcaaaaatcaatatgccaaagtaatactatgtaccaattattgcttgttatagaatacaaagagatcttacctagaaatcatgccacactacaccctgagcattttgatggttcatgttaggagccaatagtagcggttccaagtagtcgcacgtactcgctcg

SEQ ID NO: 97620 - DNA, 848 bp, Zea Mays
ttggagctgggcgtgcgagtggcaaggcaagcactgaggagaccaagcgcatagcaagagaagggtggcaattgacgtccagacatcaccgggtgtttgacagctgttgctccagcgttggggaggagagggagatgacgaggaggagctggggtcgagcggctgctgctacaccaagcgatgggatgagggagggagatggcatggaggaagaagtgttgagagccaagcgttttggacttccagagagctagcgtgaggactggagctttccaaaggagtgatcgtgctttggctaggaagcaagaggtggtgttgaagatcacaagggacagacacgtgcacgtagggatagaagatgctagaagattgcagcgtacggtagacaaggaggactaaacgtgggagggaaaaaatgggatttttcttccttctttcatttttgtacccttttatttaccaccttttcagacctctatccaatactacagctcgaactggcacgagtgagacacaacagagacgtgggaatgcttctttctccccgaaactgaatcaggtcttagttatctgaaatgaagttcagtgcacacaacttggttgacagctcgaattggagcgaagctttctcccaattccatatactaacttgatatactttcttactagaagttgttcctctatgattactctccagctttgtttcaatggttactagctaaaactcaatagtattcaagttatagagctccaaatctagaacaacaccaccaaattgcaaccattcagctaattgtattaggttcatcacatacctatctgacaaagcaactttgacctcaatttac

SEQ ID NO: 97621 - DNA, 601 bp, Zea Mays
gggcattagatatatttggtgcacattcgtagtctgcaccggacatatttgcaatggctcaaaactagttattatgtgttagacattcggtgcttacattagacatgtcactagacatgcctaatgcttattaaagctgaaatacttgattttcatgttatctgagttccatgtcccagacatgcccaatgcttgttaaagctgaaatacttgattttcatgttatctgagttccatatccgatgtgatttccagtgtcagcatcgaacacattaatgttagagttgaataacttgttttacgaagagggacatctaacgtacaccaaatagctcggtgctcgactgctcggataaaacctatagtgattgtgagaataagtcatgtgtctggtgtgcgtaaaatagctacaccaagaacacacattattatctcatcgtaagcatgcaactcttaaatgtttagccacacgagtcagagaaaagttagtattatcgaagtatttttttcataaacatttttgcttgctttttgagtgtgtcactaatggcactagatgattgagcgtgtgcaccaaactttctacactgcaggtcctgtg

SEQ ID NO: 97622 - DNA, 543 bp, Zea Mays
gtttgagcaacactcctcactgccatgacgagggtttttgccatgacagtcgtgttgccaccatatgatggtatggtcgttctgtaactcatcagtaatttcttcaggtctgagtgaccatcgtacatgggtagctgggttgccttgtacgaaggtggccatgggatagactgcaactctgtggctaggggagaagcatcatcaaaagcaatgttatcatggtcaaaatcatcataccacatatcatcatggctggggcccttctggcgatggtctctttgttgtggtttattcccttgctcagtatcatgtgtgatatgtcttatttcctcggctgcttcgtcaatcttcttttggagctcagccagccaaagcatcttcttcttcctattttccacctgttgatgtatagcttccaagttgttgatctcttggtctagctcttcatcttgtggagttgggctagtggccttcctcttctgactttgggcctcccttagaaggatcccatcttgattggtgtccaagggagcaagaacagcc

SEQ ID NO: 97623 - DNA, 332 bp, Zea Mays
cgattaatggggtggatcgacttgtgatctgggtaatggtggatgggatagcggcgaaggtgcagttgatctacgacgaagatacaccctaaaccagcaacacgactcgaccacggacatgaactgaacaaagccaaactgaaaacgaaattgcaaaggctaaactaaaggttctaggacagcgaaattttttcttatatggcaattatctagagttataggatgaaaaacctaaactaaactaaggtaagcctgacggtaacacctgagtctttgaataccacttgataggaacgagggtgccgatcttccattaggtgaaggtaactatc

SEQ ID NO: 97624 - DNA, 1540 bp, Zea Mays
aataatcggccagcattttttgataaagttggtattaaacccatcaggtcccggggatttatcagaaggaagggccgccacaatactatcaatttcttgctttgaaaaaggctcatctaaccaatgcaagtcactgcggcagagcaacaaactaggaaggtcaaagacattatccacaaaatcggaggatcccaagcgacgtttgaacacattccaaagcaggttagctttgagatcatgctctgtaaagattgagccactgtcatctgagagcaacgcaattgtattgcggccatgccttaccgttgcatgagcatgaaagaatctggagcagatatctccatccgtaacccatttgatagaggcccgttgcttccaataaattttttgaagctgaagcaactcagcagccttgtgttgcaataactcacggaaattccattcttcaatcaaaaggtcacgatgctcttcaataatatcaatgaattcaataatcaacttaatttgtctcacagttttgtcaatttttggcagtgaccgctgccactcttttagaatctttctggtgaacttgaattttgctgttaaattcttcgctttgtctaaaaggcttggcagacccgtccacgaattttgaaaaactgccatgaactcattaaactgcaaccagaagttttcaaatctaaagatcttgggcttagggacctttgacttgaaagaaatcaggcagggcacatgatcagaaatatccctaggcagcgttgttgcgagagtgtcagggtagcagaccgaccattcttgcgacatgaaaaaccaatcgagtctctgaagaaggggctccctttgtttgttcgaccaagtaaaggagaggccatggagagggatttctaacaggtcgagctggctgattgcctcgttaaaactcagcatcaagttaatgtcacccccagcggtatttctattttcaggcctacgcgtaaggttaaagtccccaacaatcaaccagcgcttttccgagggcatattaatattggaaaaccagtgaaggaattcaatcttcccagttggggaacagggcgcataaacgttggtgataatccaagattcctccgacgaaatagcagaaaattcaaccgaaagagcatactcgttttggaagataacactgccatccagcttcgaactattccaaacagtaatgaaaccccctgagtttcctatcgaagggacaaaagcaaactcatcaaaagaattgggacagaaccttcttaggtctgccctatcaaaagattccttcttcgtctcctgcaagctgatgatatcgcaattggattccctaatcacacaatgaataccattccccttaaccaccgcgttaatacctcagacattaaaacttaaaacagaccagtcggaataattaatagcattgcgactattcgtcaaaagggtcaagttcgtcgatgggaaaggacccaaacccaatcactgggagggcaaaagtgtatctgttaagacgaaacagagcacagccagaaac

SEQ ID NO: 97625 - DNA, 378 bp, Zea Mays
gcggtgatagataacccatcatcatcgccatttcagtgtaaacattgcctataggtttgcagttgttaaagaaaacaacatattacatctagcttattcattattcatcatgaagttcttcctttctagctagcttattcattctaacttctcgcgccgtagttacagggaatccatacatcaaagggtacagattccttcttgtactatttatgtttgcgtctagcatgcatactagtagagaaattatgggcttcagtccttgttgggatctggattttctcaaccgggaataattagaacaagtctctcgtatgtgcgattcgtaggactcaaacccaaacctcatgtattgtctcgcgcttagctttattttaa

SEQ ID NO: 97626 - DNA, 356 bp, Zea Mays
tttgcttagttggcgtgctcttcaagttagattatactattggtttagaaagttagttaatgtgtttcttttctaattttagatttagacatctagtttcgcaaggctctatgccttttgataatgtagtatccgttagacttaaaattagcgtgcttctttgcttagttggcgtgctcttcaagttagattatactattggtttagaaagttagttaatgtgtttcttttcttattttagatttagacatctagaactaatgaatctaggtctgttaatctgctgatgttaggctttacctcaagacggtaaagcatatgcatagtttgtaattcctaatgtttaatttaggtat

SEQ ID NO: 97627 - DNA, 322 bp, Zea Mays
tagacatcccttaagtggaaagcaggcagcatggataatctcctgccagatcatatcaaaaacgttgatgctctctgagctgttgggcttcatgaatgagagcaaaaccttgctctctccaagaatattcatctggttaccccctttgggaatgagggtcatcctgctgagagagttgatatatctgtaatacttgtgcatgtttgtggactcccaatattttccagactcagagagatgaagatctctggcttcatctttggtaggttggcagaaatcatggattttgatcttatcaccagaaatgtcattgtcagtgaat

SEQ ID NO: 97628 - DNA, 411 bp, Zea Mays
agaggacaaatcaagtgctggaggatacgttaagagcttgtgctcttaaacatggtggcagttgggataagagcctaccatatgtggagttctcatacaataatagttaccaggccagtctgaagatgtcaccatttgaggctctatatggcagaaaatgcaggactcctctatattgggatcaaactggataaagacagttctttgggcctgaacttatacaagaggcagaagaacaagttcgaatgataagggagaatttgagaattgcacaatcaaggcagaagagctatgctgatacccggagaagactgcttgagtttaaggagggtgatcacgtgtatctgaaggtgtcaccaatccggggtatgaggaggtttaaagttaaaggaaagttgtcccctcgcttca

SEQ ID NO: 97629 - DNA, 312 bp, Zea Mays
cgaggatgatggtgatcgaatggatgggtgactcaccaatggtgatgaccggaaggaagtcatccatgtcgaggtttggagccatggcgatgacttgtctccggctagcaattccaagagctccgctcaccaattgcgtccggagaggacacgataatcctctttgggtctcgatgaagatcctggaaccgacatgggggcctcaacgctggtctacgtgcatgtcgacgttgcgatacagctccgcgacggagggggagcgttggcgagccatttcctgatgctctgccgctccaccgtcctcaactccac

SEQ ID NO: 97630 - DNA, 511 bp, Zea Mays
ttttggtccggaactttgtgctgcacaagttgaggatcaaagtttttttctatattgaagaaagagtggacaataggatgattaaagaaaaatccagcactgctattatcacggttgttcaagggaatgttggagaaaaacagattgaattggaattcatgaacatgttaggcaataatttatggagatggtctgctagatctatgggggacaataagtttgtaatgagatttccagatcctaagatgataggggatcttggatactttagaccattgggcatgagaacagctaaagcttagatcataattgatccttggacccctgcagtcaatgctaaaggctgcttgcaaaaaggatggttcaggataagtggcattcctatggagcaaagatctctggtgacaattgcaaaagttggtgggctagtgggtaaggtgatcgaaattgatgaaagaaccagactcagaaatgaatatgtgagagctagaattgcttgcagggatgtcac

SEQ ID NO: 97631 - DNA, 272 bp, Zea Mays
taaagtgcttagactagttagactatcacatttgtgcttgccctagatttatgactattgtctagtaaggtttgcatacctctcaccgtattttatttgcacgcactattgttgtacaaccatgggacttgtagtcttatgagactacaccaaccatatttatagatgtggaaacccccatgtacgaagggaacgggaccaatgatgatttagcttgaagctttatagtaaagatcgcagagagcgatttagaagaagccattttggagacc

SEQ ID NO: 97632 - DNA, 390 bp, Zea Mays
gaaaaagcaaaatctcctgtccccgaagccctagttgaagatattgattacatttttcgacatgcttcagggaaaaaattatccgaagaagaaatcctggaagccagacattatgcccaaaaactgaaatattcgaaaggagccttagtgtttaatggcactaacgaggacgatttcctatattgtctcccagacaacaaagaaatatctgtttgccgggagatagctaaaattatgggatttccgaagcttgaggaaggcctttcggctatgtcgaaggatgatcttgttgatagcctcgtgtacaatagtataaagttatagaagttaactttgaagttggaaaagaagtatcttattggcatactcaattctttctttttctttgca

SEQ ID NO: 97633 - DNA, 387 bp, Zea Mays
agagggtgaaagcggaacatcaaagacctgctggttttctgcacccgcttaagatatctaagtggaaatgggaagagattggcatatacttcattgtgggtctaccccgcacatctgctgggtatgactctattgagtgattgtggacaggctaactaaagtagcccactttattccagtgaagaccatgtattcaggagccaagctagcagagttgtacatggcatggattgtatgcttacatagtgtgcctaagaaaattgtgtcagaccgaggatcgcaatttacttctcggtattggcagaagttgcccgagtgcttggatacaagattcaattttagtttggcttaccatcctcaaactgatgggcagaccgagcggaccaa

SEQ ID NO: 97634 - DNA, 457 bp, Zea Mays
caaaacaacaattactaaatttcagctcctatacaattcaaaaattgtcttgctccagagacttgaattattctaacactttaccatttgttagagttaaaataatcaaatgaggactaacaagtagactcactaattttcatccaagttatttcgcgcgctagaactaacatacacatttaatcaacgtatttaccacaatcatcaatttcggcatatatgtatatcaaagcgcttttcacccactagttcgcattttagtttagacaccacatgagcactacagatttttacccgcgatcataaccatgcgcatctagactataacaagcaattcatcgggactacgagcttaactaaagccatctaacaagttggttaaccagtataacacttagcaaagtattttagacttcgcaactcaaaaacataggtgggagcaggttaattagttttt

SEQ ID NO: 97635 - DNA, 316 bp, Zea Mays
attgaattaactccctcaagcaccccaaggcttcataccatctccttctcctacaaagcttgtcaagcacattttggtacccatcgcttgatgggtccgttaagattagtaaacaaagatctaggaacccaaaagtcctttgtgttagcgcttggtaaacttgttacctttctagcacaagttgcaattttgggttgcctagttacatgcgaaatgattcacaagctagaggtggaattgttaccaatgggacaatccttgcattgatgtccctttttccggcatatgtagcaaagttgatcttcaattcttgaag

SEQ ID NO: 97636 - DNA, 475 bp, Zea Mays
tcttctcaaccaaatatgggctgtatgagtatttggtaatgttgtttgggctaactaatgcgccagcatacttcatgtatctgatgaattatgtcttcatgcctgaactggacaagtttgtggtggttttcattaatgatatcttggtatactcaaagaatgaagaagagcatgccggtcatttgcatgtagtgctccaacgtctgcgagagcaccgactttatgccaaattatctaaatgtgatttttggctaaaagaaatcaaattcttgggtcacactatctctcaagctagcatagctgttgatccagataaagtgcaaggaggtaatgaattggaagccgccagcaagtattcgtcagattcgaagttttctcgaagattcattccaaacttctctcgaattgcgaagcccatgactgaattgttgaagaagggagccaagtttgattggggtcagaagtgtgaagttgc

SEQ ID NO: 97637 - DNA, 685 bp, Zea Mays
aaaagaaaaaggaaaagcttcaatagtgctgggccaattctagcccaagcggcccaacaccagagggaaaacgcgcccacgcccacgcgctggttgttttgcgcaaagggcctcgaggttctggctaattggaaacgagtgcagttactgtttttctgagtctcggacgatttgcacagaggtccttgaaattctatttctttacattgactgctccccgacggcgaaccgcgcgagagccgtgctccgtcgagctggactgggcggagcacgcaaggattggtgctcaccgacgactgactccagattccgatctaacccgaggtttcccccaagttaatttcgtaaatgggtgactggttctctttggccacggtgaccgtgaatgttgcggatggatcaacgcgttcccggcgaccagagggttctcagcccaattacgtgggttggcaagcatcattgatataagagagcacttaaacgaggaagaagatagtatgaacggacctggtcggtgctggccacggtgaggcattctcagcggtggcggaagctaacttggggaagaattcaaaattctcgggctctagcgaatggttggggctgatttgtggtggctggttagcttactgccctacgaagattgtggcgcactcaatttataggcgcatcgggcgacggtgac

SEQ ID NO: 97638 - DNA, 354 bp, Zea Mays
gcggaaaggagctgtcataatgaagagcggtgccgaccgttgctcccctcacgaggcgaagcccagcgctgccacgtatcctgcaacacatagcgtggaccaccagggaaacccggtctcaaccttcggagtacaatgcgcctcaacattaaccgcatacaagacgtatacctgcccacttcaacggtgggcgctatgaccgaagtacacggaccacacagtggctcgctcgttatcgatgcggggccattgactctctgcaccacatgggctgctgccataatggccccactgtagcgtgcaaggtaccaaggcgaagagtgacacgtggagaagataggacgacgtcgccag

SEQ ID NO: 97639 - DNA, 440 bp, Zea Mays
tccatttctcgcaccctttctaagaagagtatcatattcctgtggagttgggtcccttgatcgacgccagaattcatgaagaaattgttccatgtatggtgtcacctcttcatggttggtcaatacatatagcatgatatgtcgccactcttcatgtgtcagggtcttggtggtcgagccacttgcgcttccgagttggccttgaatatgctgaggttcgattcattgtcgccataattgtaacgaggaggtggattatgcacgctcggcagtttgtcaccatagtaagttcttgtgaagttttacacctcctttagaatgtatgcctctacaatggaagcctcgattttgcatttatttctacatttctttcgaatagtctttaaacatctctcgattggatagcaccaacatccctgcacgccccccattcgtgcctc

SEQ ID NO: 97640 - DNA, 647 bp, Zea Mays
ggacagtggtggttctcggacgtatgtggccaagctcatgaaccagtgcctcgttggtggtgtcataggtgaaggcactgaccatgtcagcgtcggtgacatcggggagtttgtttctcttttgggagagcctccagatgtaatcctaaaggctttctccactcttcttaacgcatcacttgaggtcctaagagctcctgaggcatttataagtgccttagaaatctcccacgaaagcgtaaatgaggttggcccacttgtggaggattccgcacggcaagtgctcgagctaggccctcgcgcccctccgcgaggtggatatggaggtactagatgaccaggtgatcatccttgattctcgccaagcgataggcaaggcaataatcttctagccagacgtcggtattggtggtcctgtcggacttggtgatgttcgctggtgcgcgcacttctacagggaattgcgactttcggattgcatgctctaaggtgcatggttcaggcctaggtgggatgggacttcgctcatgcctcctctcgggcatgtgaaacttctctaaatcttgttcccattgttggttgttgtggatgtggcaggtgtcgcggatatcctcggggagattctttaggtcacgcacgacctcatt

SEQ ID NO: 97641 - DNA, 716 bp, Zea Mays
ctctctcgcatttcgttttgaggactcgttcgctctatatgttcctataagctgaaacaacatgacttagttattcgcatagtaaatagtgtatgcatgcgtcatgaaaaatctaattgctccaacaaatcatgacatcacacatataagttccacctaaaaataccatctcaataaacattttttatttctcatcgcttcctttttatgttggcggttgttaatgtgtgatttgttggagagacacgtatgcgcaacaatattgcgagggagatatttttgtattttacatgatcttttgagtatcccgttttgaaatagccatgcgtacaaaaggtagttattgagtttgttttactttcaccactacgtcacctactttcttgggtggcgccggtcggggctatcgggcacaactctcataaggtgaagtgttgagcaaccgagcctccatcacaaattcccaacacacttgccttctgctgctactctagatctgcgacccctctcctattattgctcttggattctagcggttacccaaaggaaagagaagagattatccacaggtgagatcgatagtctgtcggcccagtttgttttcaactctgttctatctattttttcttgctcaccggctcttctatccactcgaactcgctgtcgccatgcagcaaatgagatctatgcattctgtgaatcattatcgatcaatc

SEQ ID NO: 97642 - DNA, 587 bp, Zea Mays
aagggggatacggttacatatggaaaacaaagaagaaaagcgaagaacgatggaggatgctcaccaaaaaaaggagttcgctggagtcaagaagaaagttgtcgattaacgtcaaaccgaagatccaatcgatgaatcaaaggcacccagacaaaacctggacaagacaaacgtcgtggtatcctcagatttcgccaatgacacacgaattaaaagtaattgctcgctggagttggaaccgccctgaactttggcgaggaaatgacgacgctacagatctcgactcgtgaaatggatctggtatttggaactggctcggtgagaggattccagccatatatatattgctagaaacagaaaagaagaaccttgatactaaaccagatcgaacaagggatcttcttggaaatgggaagatctaggataggtggccaacctcctggaaagagcgatgtgcatagaccgggtgagtagggatgcagctccgtggaccgctcgtcgggcctgataggtggtggtatcacacccttctcaaaggaaccgtacgtgagactctcgcctcatacgaccccgtcctggaatcaggc

SEQ ID NO: 97643 - DNA, 638 bp, Zea Mays
gccatgttcctcacagaatgcttcaaagtaaataaccgtctttcgacggggtacatccaaccatattgcactgggcctctcaggatagcttcatcaggtaaatggacagtcaagtggaccatgacatcaaaaaatgcaggaggaaatatttgctcaagcttgcatagaacaatttgggatttcctctttcattctatgcaaaacatttaacttcaatgtcctagcacataattgttgaaaaaagttacctagttcagcaattgctatgtacatgtcattatccatgattcctcgaagagcggcaggtaaaatacgttgcaatattatatggcaatcatgagtttttaacccttggaggttgcatccatcagctgtaatacatgttgctaggttagaagcatatccatctggaaactttacacttcttagaaagtcatagaaagcaagtttttgctttttatccattgtgtatggagcaggaggagcgctatatgaatctccatcacgcttcaagtgcaaagattttcgtatgcccatgtcttccatatcaagcctagcattaatactatccttcgacttcctaggaatacctagtaatgtaccaagaattgactcacatatatttttttcgatgtgca

SEQ ID NO: 97644 - DNA, 337 bp, Zea Mays
tggcggggcctcttaactgctgagcggcaaataggggtttctgtatctcggtgcatcggattagcccaaatttttgatccatcacccgcgcccactcatcagcttctaggggttcctccgccttgacaaagagcggtggacgagtttcagagaactccagataggtagtgtctcgtggtccttgtggctgacctcttccttcgtgttgttgaaattggtttcccgccatttcacacagaaagcgcgtgttgtcagtggtggcgttgaccaaggcagcgatagcctcggccagggtaggaggtacaggtggcggattgggagtgtcctccccgccgcg

SEQ ID NO: 97645 - DNA, 300 bp, Zea Mays
aaactggtattcaatgggtggagagaacgttgcagaatagtaacgactgcttcgatatgtttcgcatgcgacgaactgtttttagacgattgcatgacacattggtggacaattatggtctacttccaagccggggtgttagtactacggaagcacttggcattttcttgtgggcatgtgggggtccacagtcatttaggcagttaaggaataagtttggtcactccttggaaacaattagtcgcaagtatactgaagtccttgatgcactgtttaagatgtcatctgacataattaagc

SEQ ID NO: 97646 - DNA, 643 bp, Zea Mays
ggcggaactgggtggatacccaggcaaagaagtgtgtgagagtggtgaaagtgtcagacttcaatcgcaggggaaaagtccaaagaaaatgcgaataatcgtccaaaatcaccaaataatatttgtatctagaaagactgattacatgggaggtccaaagatcacaatgaaccaagtcaaaatcctgctcagcccgagaagatgaagtgggaaacgagagacgagtatgtcagcctaactgataagcatgacagaggccctcaaaatgtttcctactacgagaagaatctagactactggaaagcttggtcatgacatcaggtcctgggtggccgagacgacgatgccaagtggtggaggtggtagcggagactaggacgggaggtgtggacgcaccggaggacgaagggctgagtgtgtagagtggcccggtgctgtcacatcgggcgagaggggtcctgatggccagatccttcacagaaaaaccaaaagggtcaaactcaatggaacagaaattgtcggtggtgaaccgatgaacagaaaggagattgtgagtgatgtgaggggcgacgagaacgtcattgagatagaaagatccaaggagaactgaggcacctactgaggtgatcggtagagtggaacc

SEQ ID NO: 97647 - DNA, 408 bp, Zea Mays
tgcccggggtcggtagaccgtccacacatcacttttttcactgctctgacacgttttcaagtgaaaagtagtcgctaaagtgaaggacggaccgtccggccagagggcgctgaccgtccgcgagttcgatttacaacttccacctctctttggaaaccggcagatccttccaccatgctttagagtctctgacgactaacactaccgcaagttccagctgggtgcttgcaacaacaactgagcctctgtaacagctaattttggagagggtgctataaatagatggagtccgggtgttggacatttctcttggccatttgaacaatatattgagcacattcaagcctccaaacctctctaactcacacatgttgctagagatcgcattctagtgagtttgagagcgct

SEQ ID NO: 97648 - DNA, 346 bp, Zea Mays
ccatgttctacatctctgattcaatccgtgtcccaaaaaacctaatttcgattgaccctagggtttacatgtacttcagttgtttacatagatcgatttatttgttcatggccaacttggagaactagggtttattgtgtcctccgaatcgcctaatatgctcaactgatccgtcgttatcatggagaccaacacaaatgctttaagttatcgatcatatgatacgacatgaagactcttgtctgcttttgatattcgtcatcgtgtagtggtcatttcagtgaatccaccaaactgtaactggtcaattaatttgctgtcatgttgtttgtatgttgattgctga

SEQ ID NO: 97649 - DNA, 358 bp, Zea Mays
cacaacaacagggacgccaaactaacagggtcgtctggaagggaagatgccacaggcatatctttgcgaggaagtaggcagttggcgggaagaggaggaggtcccgtgaaacgttgggaaggcagctgatgtgctggacatcggctctttgaagacgaaatggatctaaacattttggagtgtagaattcagtttatggtccatcatttgttcacgacattggtgatacagttcagaaagacatctctgaaaagccacataagttcatttgtactctaatatgttggctgagccatattttgtgtgatgaacttaatcttagccccggggacagcctagataaatctgttttccccaa

SEQ ID NO: 97650 - DNA, 510 bp, Zea Mays
catcgtggaccatccggcccaaagcgcggaccgtccggtgcgacacagagaaggcgccgctcctacatccaggtcactgaccgttcggcccagagacgcagttcgtccatgccgccatagagggcagtgctaggcggtacacccctagtgattggcgctgccagattagtgccaacactcttatctcgctctgcaaccctttttccgcgccccgacgaactgttcatagctccagcaggccctctatcccaaagtgcaaaatagaagccacccttggtgctccgtatgcctatgagttctttctcatctccgcacctcaaccttcactttcatccgctcccaccaaatccgctaccaccctgaggatcgaccttcttcctccccccacctattgtcgaatccgcaggagttggtctcatcacgacgctccacctctaagcccacctgctgctcaaggaggactgaagggagtacgtctaagtctgctcctgcatcaacggtgttgcatcc

SEQ ID NO: 97651 - DNA, 392 bp, Zea Mays
atttgttagaaactcagtcagtctgtaatctagttggtcttatatatttgggtgtggcgtagaaacacctggcagcagtgctgctcatgcccaggtgtccgtcaatttgtgtaagtgttaccccatcaaacgtatgtgctgcgcatgcccacttcgatccggaaaaaggggagatcgtggggcatttcgtttgacggggggaactggcatcatgcctagttaagttaatcagaaagacccaagaaatgagtatgatgttgagcagtgcaaaggaaagcaaagatcactatgatgttgagcatgtgtgtgggtaagtgtaaaagcgtcgagacaaggaacatcaagtaattcccctcccaaactacctcatatgatcaaattaaaagagaaag

SEQ ID NO: 97652 - DNA, 454 bp, Zea Mays
actccgcttcgcccatgtctcatgttcccttgcttcgtgtcggctctgatcagtcacacctggaagagcaaattgggatctagctcatgcattctggagagcatccaagtttttacggtttgaatctagagtagcccatcgaaggcttaaggccattgttctccgcctgtggtgggtgctaaactctttctgggttccttcttttgcaggtgggacaaatctgataaagaaaagattgaaaaataatgttagatacatccacttagtatctatattagaaatggatataagtgcagatatacatagtataagttttagcaagtcctactactaattaagaacgcagtgtgggcgtccggcgcggccatgcccccgcctccctctcacgacacccatcaccaacgatgcaccgaacatcctccccacgctgccgccgtgattgtcgccgccgact

SEQ ID NO: 97653 - DNA, 384 bp, Zea Mays
gcgacaaaaggttcaactggaggcttgtgatccaatattcaaggcaattctagttgaaagaacggtgctgctccaaacacgagttataaaccagcagcatccacttcaacatcagtgggttcaatagccaagagtagtggtattcactgcttcaagtgtggaggtcgtggtcatgtcataaaggagtgtccaaataatcgtgtgatccttgtgaatgatgatggagaatatacatcagctagtgaagaggaagctgaagcaggaaatgtagaagacactcataaaattgaggaacacactggatgtgaatttgagcatggtactactcttgtggttacacaaatcttgagtgttcaaatgaaagaagctaaaattggacaatga

SEQ ID NO: 97654 - DNA, 360 bp, Zea Mays
gtgaccttcaagaatctggggatcttcagctcttctgggttgaactgggttggatgaagcgggctcttggatccgcagggctctacgttggttatgggttaccaagtaggcctccatcagcttctggacatgctcatccttggcttgcttcaggacttcaacagcaatgacttcacgactttccaaggcaactacatgggcttgagctatggtgagatccacatggagcttacggttgagcttctctgcatcttctgctcgggcaatcatctgacggtggtgccgagccaagaaatcatactatgcatctagggtgagcaggtatgcagtgaggtacacgactgaggggtcgtcctcaag

SEQ ID NO: 97655 - DNA, 826 bp, Zea Mays
gtttcttcaggcaaatttgctttgtagcctcctttttcgtttcttctccggtttccaaggatttctccttggcgggctctgaaggcccagcttcggcctcggtctggctctttgtagcttcgtcttcggatggttttgtctcaatttgcgtttttggcacttcggcaggtttcttcggagtggtacttgaagactttattgtctccagcacatctagtacattgaccatcctttttctcttgggagtcgccgtgagatctttttgtgccttcggcactgtcactcctgctgaggggcttgtaacttctaatatctttgttttctcggcctctatttcttcaatattatcggccttcggcatcatagccggctcttcattcttctgtgtaagagcaggtccttaggcttcagtagccgtagaggtctcaccaccaaattcgggcattgtggcaggttcaatgaagcgcggtcggtgagtaaggaccttcacctttttcctctttggcgcgggctcacttagagcaactgaagcatcacctttcccagaagttgcactttttctcttttgccctttcagcgggtagcggtaatcagggtacataaacccaatatcatcaaaactctattcagcctcttcttcttccggcctccaaaggccgcagataacgcgttatcttctgcctttgaatatggcccaagtagttcgtcgcttgtagcttcgatgcacttcaaccaatcatcatcaggctcaataaacttaccttcatatctgaaggtgtatttcaacctaaccagcccaccttcttcagacttgctgatagtttcc

SEQ ID NO: 97656 - DNA, 284 bp, Zea Mays
aacagtttatcggtgacacagttgtctaatacttgttcactatcatgcatatactgagttagtgtcaatatatctgcccctccagcaatctacaaagaattaacatgaacaccaatgcttccaaaaatgtttatgcttccagctgtagaactcagaaaattgtgtagtttgagaataagttcacaagattgtctaatgcttcagggtaaaatttccttgcaaacaagtagcatggtctcttcagtccattccacatgcaaggcctctgcaatagatctttctgc

SEQ ID NO: 97657 - DNA, 476 bp, Zea Mays
ccctttctcttcagccgccaccgcgcgatctcaaattcacgggtcactgctcaagggccctataaattgagcacaccctcggctccgctatgtaattgtgcactcaacacacccactcgtgcctccaattactcactagagcccccgaagtgctcagttcccccaaatcagttttccgccgtcgtgaacaagctctcaccgtggccagtgcactccaggtctgatcctgtcctcagctctcttgtttcagcacccttacattcccctgctgctcctcgactcgtttaattaagctagcatgcgctagatcgtcgggaacacttatattcatctgtagttcgcgctgtctccgtggacatgttgatttagagctcagatcgtgcaattgatcgaggggaaacgattattaggtgttgaattaggagttaaccaggttagagcaccgaccgttgcatattccggccagagcgagctcg

SEQ ID NO: 97658 - DNA, 510 bp, Zea Mays
gggagcgaaccaggctgaggttgtcaagttcaagggcgagatggcgaggcttttcaacatgagcgatctcggactgctccactactacctggcgatcgaagtctgtcagagcttgatgggcatcactttgtgccagagcacctacgtaggcaagatcatcgagaaggctgggctctcagggtgaaatccgtgcgacactccaatggagccacgcctgaaatagagcaaggcgagctcaaatcctccggtggacaagaccatgtaccgcagcatcgtcgggagcctaaggtacttggttcacacgcgtcctgacattgcgtttgcagttggctatgtgagccggttcatggaggcgcccatgactgagcattggagagatgtcaagcacttgctaaggtacatcgccggaacaaaaacccatgggtgtgtatatcgccgtgggaaaggaacgctagaattgatcagatacagtgatgtcgatcacgccggagacggagatgacaggaagag

SEQ ID NO: 97659 - DNA, 751 bp, Zea Mays
tattttattttattttattttgcgagagaccagaggttaagagcatgcgcctcagccatttccttgcccaatcttctaataacactacaactgaacccatcaggtataatgtctatgtttatatactaccattcttgagcctgttttatgctaactaggtcaaattgttcactctctgctgtcaatgtgcagaatatttgtttccacctggaatgttggaggaaaaacacctattgctgcactgaacctggatgactttatcccccctgatgacaattccgatatttatgttttggggtaagtctttttttaatacctgcaaaaatcccttccaatgtctctattgcagatgttgtgtttacttgattctagatttgtctcacatattagtactaatacacagccgaaaatggtaaattggtgaagttttacttgattcctccatggtagtgtggaatcatacgatgctgttgtgttgacatattggtatctatttgaagcacaatgaagtatatcaaggatattttaatggaacttttaagtttgatgcaagcctttgtgtaattgctcttgtttgtttaacatttgaacagttttcaggaaattgtccctctcaatgctggtaatgtgcttgtaatagaagacaatgaaccagctgctagatggcttgttcttataaaccaatcactaaatcgaccagctgacattgatgccaacgtctttcagcatgaaccatctccctctgttgatt

SEQ ID NO: 97660 - DNA, 590 bp, Zea Mays
gaagaatagagcttggtcgttggatttggaatctgtgaccacaattagttttgcggcttgaatatatctgagccgtggggataggcatcaaccgtcacaattagatctagatgagttatgggttgcggccttcggatcgaatcgcggcggccaagatctgtttgcgcgtaccggttcggtgtgtgcgtggtgagccatccgatgcagatcgggcgtgggagaatcgatcaccctggtttaagtcctgtccgtccatcgtggatcctgcggctagtactgcgtacccgttcatatcgggccgatctaatctggtcggtcagattgtgatcggatggctgataatcaaggatacccctttgtggtgtaacaattgctaaagagaccctagggaatcaactaataaacccgccgtcctcgcgggagtagtctaagtctagtacattttacagaataaaccccgaccttatctgtattagtgcgcccagtccagaaattaaagaaaatggggaaaaaagatttagaaattgattgtgagtataaaaataattgtaaaacttgtataatccatagaaaattcatatgaagtccaa

SEQ ID NO: 97661 - DNA, 468 bp, Zea Mays
ctaactcgagtaagcgtgagcatgtcgcaccgactcaagtcatcaccgacttaagccgattgctccgttggtagggtatagtgatcaccctaagtcgagttagcgtgagcatgtcgcaccgactcaagtcatcgccgactttagccgattgctacgttagtagggtatagtggtcaccctaagtcgagtaagcgtgctgacttcaagtccaatcaaatcgaggtcagctgaaagtcaagagtctgaatgcctttgaaaataaaaaactttattgatgataaagtcccctgattacagagtacactgttgcatcgggaatttttgaggccctgctagggataaaaccttctaagatgctctatgttccatgagttccccacttctgtaccatccatttgagtaagacggtatgatcctggctgagtgacctctgatacaataaatgacccttcccatagtggtgacaac

SEQ ID NO: 97662 - DNA, 588 bp, Zea Mays
ccagatgttcacacacctagctagatagaatctccgatctcttcggagataacagaggccaaagtgctgcttgccgaggtctgctcgctgaaggatgggggtctaactgctgaagctgcagttgctgacttcatattcaagaatattcaacccttaaaggacagggtttaccccgcttacttatatagcggtgtcaacgattttacccaggtcatgaacagaaggattcccactgaagatttgctgagtcaactggacatgatcctgaggggcagggtttcaaatgttggtgctcttgtggcctattctgcattgaacctgccgccacttaggccattctctgagtttgtatccaaccctcctgcttatgacgttagcctgggtcatagagtgtgaccctctcctgaggatattgaggctttgattgctccactttggagtcttcccgaggatgagaggcggactcactttgagatgccaaccagcactgatgacgctgagatagatgatgtgcctagcctgctagctggggaatcatccaactctacccgcaccgagccgatggccatcacaactgggcaataattt

SEQ ID NO: 97663 - DNA, 713 bp, Zea Mays
tttttccaccaacatttcaaatgttggcaaactactttttccccagtcctgacgcttcaatagacggattcctcacttcatcaagagagatggagaagtcaggcttactgacagcctaaacatgatcacaactagctttttcaaggaccgaagcaatgttttgggcactgatccatgaagaatagtcgtctttagctaaaaggatccctttaaacgcgtcaacttctccatcaatccatgcaacggcaccagcagcatcaccatcaatatagcttttcacgcttgtgttggcaccaacagaagcgaataagtctttcagctatttccaagcgcccctcttcctcagtaattccctaacaatttttccccaacaactttttcgaaacgctactcattagcacatttcttttgagctttgtaattccccaacaattttttccatgcccgccttttcctcagtaaggatctatttcttaaccttttctaattcgaagttcactcttgcttcaactcattcctcctccaaattttcaacttcagcctgatgtgttgcaagattgttcttcatctcgtctttgagctcttcaaggcgcttagcctattgctcccttatgttttcaagctctaatattttagcatctttgtatttttagcttccaaaatagagttttcttttcaattgtttttttaagttcacttcggctttcaattaa

SEQ ID NO: 97664 - DNA, 503 bp, Zea Mays
agaagcctgagaagcagaactttgaagcagcacatttggaaaaatagcctcccaatcagaagagcaaaaaactctgtccaactttaccaaggcatgctaatttgaccaagtaaatttcctgccatgcaattggatttcctttaatgccagatcattaatagctgccctgaatctagacatcattgccctgttcaaatttgagttatttttatccgaagccttataaataaggttgaagtctccagcaatgacccaaggtccagcacaggcagctctgatttccttaatctcctagaggaaaagaattttatctgcatctgactgaggcccataaacgcaagttaaccaccatggtgtgccatcatttttacagaattgaatgaaacgcagtgattatctattcttgttaaccctatgtgaccaacattcctcctccaagcaaccagaattcctccactagcacccaacgaaggcatgaagacaaagtctgaaaacttaattcc

SEQ ID NO: 97665 - DNA, 272 bp, Zea Mays
tttttcgatcggattcactggtaacggtattttttgaaaacgggactgattttcgtaattttctatcggaatcggcgtggtgttttaccgaccgtttccttcggttaccgttttttgtcggaaattaccggatttgtgtctcggaattttccggaattgtgtctcggattttttcgaaattgtgtctcgaaatttttcggaattttccagcaagtgatttttcgcatcgcctgtatgtctcttgataaggattacttatttttgtatttttt

SEQ ID NO: 97666 - DNA, 468 bp, Zea Mays
gcaaacattgtaagtgaagagttagaggaagaaccacttctagacactagagccgtggtgggtgcacaagggttctcaatattggcccaagtctggtggtgaatcttagaggacttgagcttgccgaaacgctcatccacagttggagtctcatagtttggcaactcgatgatcgtcgagaccttcacctcccaaaccctccaatctagagcatgtagtaacttgagtgctctctcatgatcatcatagggcatatgcaccttgtttgcaagcatcttgtttacaatctattggaaccgagaaaacattatgttgatggtctctctagtcaactccatgaagttcttgcactctcgtcggtatgactcaaatagtctggttttcatattatcattaccctcatcaaatttctctagtgtagaccagatctcatgagtcgtacctaaatgcccaaatctctcaaactca

SEQ ID NO: 97667 - DNA, 407 bp, Zea Mays
acataacccctgtgcatgtgaatcagcagctggaccaggcaggtgcagagccagctcacggagctaccggtgtcagttttacaggataataatatcagttctatacatgaacattgcatatcaaaaaattctcattgattttgctgaaagtcaccggtgtcagctgacaccgatgaactgacctagctccgccctgggaccattaccaataatatgagtggatttttagaccaacccaagttggagataaaaattaccaatataccatgtctgaagccttatgttaccaaaagaccattgggctgtcagagtgacaagtagtcaaaatgcaattttgccaatgatagcagagtaaattttgcttagcataatgcttatcagagcataaccttgttctgttctgtgtt

SEQ ID NO: 97668 - DNA, 834 bp, Zea Mays
ccaggagtgaccgcctgcggcacgagccgagctacaagttcctgtccttcaactccgggcccaggagctgcatcggcaaggacgtcagcctcagcaacatgaagatcacggccgcgtccaccattcacaacttcaaggtcgagctggtcaggagggggcacgaagtgacgccgcagagctctgtcatatactccacactcagaacggggtgatggttagtctcaagagaagggcggcagccggcaggttgatctctgctatcacttatggtggcgagtgccttttagtctgacgtaggagagcaaaatagtatgttaactgttggtgtcaacgcgtgatggcttcttactcattaatgactctatgcaaactctatccctgttaggaacaacgcagatttacactcctattttctctgtctttcttctgtgtctatcaaccacactctaatcctacacgttccaatgccaactgaatttggttgggatcatgtcagcctacaacagcccatcccatcttttgtcagaggagggtacacacggcgtacacatgatgcagctgacatgtgctaacaccacgccatagtagaagggaaaaaaaaacccttccttgtcaagaccgagtctgaagtatcggcttcagatgttacctgtcatcgtatcacaagctttcttcgcttcaaacgaaacatcgcctcgcctccaacacgaacttgcgtgtgctctcgcgggctcatctgccgtgcaacttggtgctaaaaaatatgttaacatctgtgctaccaaacaaatacgctataaataaaatttgaagtatttaatgaaactagcttta

SEQ ID NO: 97669 - DNA, 290 bp, Zea Mays
cccaaacagatagattttgccctagtgcaaaggttcaaataagggggatagagttccccgctgatttaatagttatgggtaaccaggatacaactatagatgtcatcttagggatgaattggttaaccaagtaccaagccagtcttagatgtgacaagagaataatgaagctagtgtccttatcaggagaagaagtgttagtagagttggtcttgtcaggaccaaggaaagggagttgtcaccaagtcaccgctcatattgaggagattaaaccatcagaggctatcaat

SEQ ID NO: 97670 - DNA, 350 bp, Zea Mays
cactgagtgtctagcagtgagccccaggtgggcatgatgatcagttagttcaagaggggaattggtggactggggttaggctttactgctaaggctgggagtgacgcttgttttgggaaggttggtgagtgtagtggcttgacatccttaggaaatattcagccaccctaagcttgtcaaaatcactccacccaaatttgtcacccctgttgtgagagatggagtatttgtggaacatgtgagagcctcacatcataaacaagtgcggtgtataaaacctaaccatctcaggaacacacttgacacccttcttgacatctctagtgatccccttcctagagctcctcaac

SEQ ID NO: 97671 - DNA, 397 bp, Zea Mays
ccaacaacacactcaagaacctcggactgctcgttgtctaaataaagcgagcatgcattcaatacatttggaaagtacaaatgaacatcacaccaaacatgtacaaatattggcacacaactcaagaaagtacagtattaagtacagaggaatgaggtcaagttataaaaatggactaatcctaattgaggaattgattactctctaaatgtttggaacatagctcaaaaaggttaagtagtgattaaaacaaatgaaagctaaaattataagataaactactctcatttagaaatttgattattttttaagtattatccataattacattcctaattctatttatgtcattaaggcctagaggttaagccaaaaataaatccaagtaatgcataac

SEQ ID NO: 97672 - DNA, 401 bp, Zea Mays
cctgtggctgtccatagccacatagtgacgggcagttcagcctatctaaggatctaaacccccacgttggactctcgaacctggcaaggaaccaccagatccatgtagagtaaaatcactggaacagtcctggacctctacgtgtgccatccagacctccgaccaggggatgtacggtgctaccacatgtacgagctattacggatgaggaccgggtttccacaagtgctcgtgggacctccaaccaggggagcttcggcgccgccacatctgcatgcgttcccagcccatgctatctactcaggtagagatcagaagccaccaggaatagcccgtcacttgcctctagtgtgggggcgcccgcattgaatgcgagtaggatatgcatctctccacaccag

SEQ ID NO: 97673 - DNA, 375 bp, Zea Mays
ataaccccaaagtacaggcttgccctgggttacatacaaccttataaaaatatatactgttcaacataaatattacatacacccgattgtgcacccacgctagaataacaacatactcgatgctgacagatgagcatgttgtagccaataggcggcccatccttttcatactgccttggtactactcctcatctctaattgtgggatgcctttgagacgaggtcttcgacatagctcctatgatctccgctcgggctcttgcctgcttgagtgttgggagacggacttcgctcgtagcgagttcttcgtcaaggccttcgttgcccatgtcggagaaacactcgtaggtgtcgctctgtatcgaagggttctctt

SEQ ID NO: 97674 - DNA, 735 bp, Zea Mays
aggcagaagagagacattctagtggacacagaggttagaaggagcatacaactcagagaaaaatccaagggtttaagaactgcacaagatcgcacaaatgttgcttggcatgctcaaacaacgccccaacaatctctttgtaggtcataaaaatctaggagaataattctgcaaaaaagctcccaaagacttacctgaagaagtttagctctaccattcagagacctgcctagtcaagcaccagcaatagtgatgatgaaggtgctagcagcccagatacaagcaagtcaagaggcgaatgctaggaccattgggatcctagcaaaaacttatgggctctccacaatggtggatgattcagcatatgttgtctcattattttgcctcttttgatgtggtttatctatggctacaaacctaaaatacattatggtcccgcccctgggggatgtgcgtgtcaaacacaccttttataatctgcaactatttgcggatgggttgacacacataaacttattccaatggaccttcatgtcattcttaaactcttatatattgtgatgaaggtggacatatggatatatcatgttatgtactcagttttggaacctttctatattattatgcagctgatactctggacttatctagtggtttattatgtaattggttatatggtgatgaagctggacttctggatttatctcgctaaatacttagttctggaacattcct

SEQ ID NO: 97675 - DNA, 449 bp, Zea Mays
gtcagccaggtaccagcaaactctaaggcgctatcatgataaagccatacgacatcgagctttcgcagtgggagatcttgtcctctgtcgaattctaagggggaaggacgacacaaattgttgccactatgggaaggaccattcatactagcagaagtcactcgacttggatcatatcgtcttactcaaatggatggcacgaaaatagggaactcatggaatatagagcatctcagaaagttttacccctagctagattttaaaagctattgggacggcattgtattctgtaattggataatacaccatcaataaaaagacttcgttctcaaaggcactcgaactgtttattgtcaatctgcatgcttactcgactcagggtgaccactataccctactaacggagcaatcgacttaagttggcaatgacttaaggcggtgtgacatgc

SEQ ID NO: 97676 - DNA, 511 bp, Zea Mays
ttctgatgcacatgctgtgttgctgacatctgtttgcttctagacatcctccaacaatccgtttctcttttcgcctttctataaaatacgtccacatcattgttgattctgatcctttgtggctttgtcgtctgcaactgccagaagatatagcagagctgcagaaggcactgccaggatcaagggatggagttgaggggatgcgtctgccggatcaagagctcggcgcttgagcttctgtccatggaggaggatctgacgactgatctggatgatgacctatgggatctggtcatgagggatctccagctaaaggccagcttcctgtacattgacctgtaccgtttgattgcctgcaagtgcaacgaatgagaggagcgcagggaggagatcacgcttctcgccaacgatatcttctactccatggatgaggttgtgagatcggtgccttcttttcccatctatggtagggtaggagtagcttttattagaagcattttttttgtttcag

SEQ ID NO: 97677 - DNA, 475 bp, Zea Mays
cttatacttttgctttcgtgccattgtattgccacccttgcgcaatatctaccttgatgtatgaaacctttggctctctactccttgataatgctttctccctaactcactttatatccttggttgtatcatttattctgaatttaatagttcatgattatcttatttcactcttggccaccaacaaatatgtcttgtctaactccttgataattcttacccaactccttgatgttataatatccttcttattctaaaccttgtctcaccttttgttttggttgaatgagtagaattggattgtgttgtgctcgtatgcttgagttcattgtcctttgtgttcatgtttgatttgcttctttgaaatgattgttggtgtattgtgtgacttttgtccacaatgacatcagttagctaggtaaaaccttagatagatgggtttttctctgctctctataatctgtctttgctcaac

SEQ ID NO: 97678 - DNA, 485 bp, Zea Mays
cccaggttcaagtcgtttggtgaggtatggatgcagctatggcaacctagaaagacacttctactttgaaggaacactttccatatgcgccagcttggggtcaagtggcatccaaagagagggggaatgttaaccatgctatgagagatgaggtggagcgcaggccaaccaagaggacactggcacaacgaagaagcatcaggagaaggtagctgatcaggcgcgtccatgtcggaagaggtgaggcaacacatcagtaattggacccaaatgggttgtgtaattggcttgttgggctagggctgtgcaatagcttatatgcattcgctagtactgtaaaaggtatcgatgaattaatccaaaacaacaacacgaccgcaggttgtcgtaatctccttcctctatcttcctctccacgcgcgagacctccctaactccccacccatgtgctaagattgtcggcaacgcttgctgctggcctcccc

SEQ ID NO: 97679 - DNA, 326 bp, Zea Mays
catgccagcaacatcagtcaagtactcaacagtagcactcctctcaaagcaccttccgcccaccagctccaaaagagggaagaggaggccaaagctttggtagcatgtttaatgcacaaccaagaaatccattctgtgtgttttgcggcaaagataaaggccacacaacaaggatatgtcaccacaccatccataagaaaatggagattgctacttcggctgcccaacctttccagctgaaggaggtgttcagtacatcttcgtactactcaccctacattccacattatgtccaacctcaggaccctctttatggtcgccatccg

SEQ ID NO: 97680 - DNA, 333 bp, Zea Mays
ctgctgaagttgtggttgctgatttcgttttcaagaacatccaacctttgaaggacaaggcgtaccctgcttatttgtacaatggtgtcaacgattctacccaggttacgaataggagaatccctactgaagatctgatgagccgactggatatgatcccgaggggtagagtttcaaatgctggtgctcctattgcgtattatgcttggaacctgccaccatttaagccattttccgcgtttgtgtccaatcctcctgctcgtgatggtagcctaggtcttagagtgtgaccctctcctgaggacattgaggctctgcttgcccccacttcgg

SEQ ID NO: 97681 - DNA, 589 bp, Zea Mays
agagtaaacttattcgctttgctgtcgaggaagtggttccggagctaaaggaggatgaagttgttgtttttaaaagcttcttcagggcggggctttgatttcctctatatgatataataggagaggttttgaagaggtttgaaatatattttcatcagctgacaccaaatgccattgtcaggttgagtgtttacatatgggctctctgaagccagggcatgagtgctaatgccgaaggtttctgtcgagtgcatgagttgcattatcagatgaacgccagagcagatggacttcacaaaaactttggatgttataattttgcataccgaaaatacaccaaggccccgatgatcggttaccgcactaggtggtcgaccgggtggacaagcgaatggttctacataaaagctgatgagaagaagagggaaaaactcatgactatggttatgagtcctctgaggttgatcttcgggatgacaaggccattatgcaatatgcaactcagctccccatgccagctggccgaagttgaattcagagtggtggctgctgaaattagcactagagacttagtgcaggaatacctggc

SEQ ID NO: 97682 - DNA, 738 bp, Zea Mays
cgatttggaaaaattatagaatggcatgggtttttaggaacctttagagatgctctaatttattttcctagatttgttgctggaggagtgaatagatgaaacttataaattaaggtctgtttagactaattcatgtgaaatttctacatgattttgtcatgtggggtctcccctataaccgtcggagacgcacgagggacgtgaggcgcgctgcagagcgagcagcagccagggccacaccagcactagaaaaggaaagccaggaaatcagtggctagaagaaggaaggaatccacggggcatgcagccgccacctctagagaaggaaggccggctagaagaggaaagagaatagtagaaatcctaaattatagagattagtttccctttagtggagatcctaaatcataggagattagtttccgctttctgttgcaactcaggctataaagccttgtagccggctcctgtgagaaataagcaataacacagttatctcctccctcatccctaccactctcaagccttcggaataggagtaaaacctcaccggagaagacggaccgagggtacgacctacgtagccgagggcccccttccctagactctaaggcccttgacaacctggtatcacggtcacgtcgatccgactcttccagttcatctgctacttccaccgcaaccaaccacctagcagccatcaacactgccaacgcaccgtcatctcccacctctgcc

SEQ ID NO: 97683 - DNA, 463 bp, Zea Mays
aatgaagtcatatgtcaagtgtgtgcgctcatgattcattgggtaggtttaagcaaaaaggaccttcaggacttgctgcaagaaagcgctaagctgctgttgagagatgtgagtgctaaactagagaacatggttgatgaacaagaggaagataatgatgaggaattgggaagaaaccagggtggtcgtcagtgaagcctgttttcgagtggttgcactcataattgtgtgtgcttctctttcatgcgacttagatggtttctgtgtggctagggtggcattgatgtttgtttgaaagttatgaaactctgtgatgggtaacactgcttcctgcaatctgtgtgtcagggtactgaattaggcatgtgtgcctatctggaaaactgttgtcagtccagtaggctcttgtcatcctcccccctcgtgcttgcgttgagttttgctcatcaccattggttttctt

SEQ ID NO: 97684 - DNA, 284 bp, Zea Mays
aatgaagtgggcatatttggagaatcgatcgacgactgtaagaatgactgatttgccatatacctttggtagggcttcgatgaaatcctttgagatgtctgaccaaattagaactggtacctccaagggttgcaatagtcttgctagatggagtgtttctgttttgttttgctggcaaactgcacaagaacgaacccaatctctaaccagtgccctgtccttgtgaacaaagaaatctgtcctcaacctttgcagggttttctggatgccgtcgtggcctgtgg

SEQ ID NO: 97685 - DNA, 354 bp, Zea Mays
gcttcggttggaacatcaattaggtccgatgacgaaagactgaagttcgacctactgacagcccttgtgtgattacacctggcttttatgaaagcggcggctgtaccacgagaagccaccagcgtacagaagtctccatggccggttatgacttcatcgaggacatcaacctctttctctacacattcgagtgccccggggatatcttcagcagagaagctatcttcttcaaatgcagctccaactgaattgaatatgcttttcaatcgagtggtgcattgacttgcaaagttaaagcatctccttaagagctctcagcgcttcactgagcttcgtgttcttctcagcctcaac

SEQ ID NO: 97686 - DNA, 378 bp, Zea Mays
ggggaacaagaatcagtgaatgaatgtgccagattgggcaaacttatgcatgaactgtgccgaaaaagaagagtgatttaatacattaaaatggaggcacgagggcagatagcaacagtaaaatgaaggaactaagcagttcacctagatctggtgtctggcgcgcggtgtgcagagtcgatggctgagcccactgcctacttcactttggctaggacgacggagggagggcggatccggcaacgacaacgaaggagagggacgtcggcggctagagcgacaacggcggctggagcggctgggatatactaggacatctggagcggcgaaaaccattgagtcgcatatatgtcccaaccgcatcattatcactggcgg

SEQ ID NO: 97687 - DNA, 892 bp, Zea Mays
gttatttcagaatctgatcttcttcaccttgttgatgttggggttttacctccaaaagaactttgctcttggtgtatttgccacggggtcattgttccgacggaggacacccatgagtccgtcgtctatgttccttttcttatgtgcggccttgctcttcctgtttctcccttcgtccacgacctccttgatttctacgaactaaacttgacccacttgaaccctaattctattttgcaagtttccatttttattcatctgtatgaggcctatctcgggattcttccccattttggcctctggaaatatctgtatcattgttggcccgagatggctggggggacaacacaagcttgttggcggtgcaagtctggagctgtgttgcgggaggaaaacagagtacctcgacatccccctcaaggatagcatcaaggggtagcgcctcgagtggttcattatggagaaccactgcaagtccctaccccctcggttagggaggcagccagatgtccgcactccaagatgggtagaatctccaacccctccggagatacggaggcaaaagtactgcttgccgaggtatgcttgttgaaagatagaggtctgactattgaggttgtggttgctgatttcatcttcaagaatatccagcctttgaaggacagggcgtacccggcttatctgtatagtggcatcaatgaatctacccgagttacaaacaagagaatccccactgaagatctggtgagccgactggatatgatcctgaggggtagactgtcaaatgttggtgctctcgttgcctattttgcctggaatctaccaccacataggtcattttctgaatttgtgtcgaaccctcctgctagtgatggtagtctgggccttagag

SEQ ID NO: 97688 - DNA, 368 bp, Zea Mays
gttccgtaccagtggggttaaaaaaaacaaaaatgaagcaagtatgatgtagcacggcagtgacggcacggcacggatgaaaagcgaacgtgggagagcagtagcaccaacaggataacttggacagcaaactgccacatcacaggtgttgttcacacctcagccttcgccatcatcgtcatggatcacaatacaaagatacccgtaccatcacaaatcttgaaggacaaaagcgttacctgttcatgttctaaaccacgtgtattttcattagtaatcagcaatccacctagcaggtggtataaatagctgtgtaaaatactgttttataatgtggattacaatgtttgtagagttaagtttaaaac

SEQ ID NO: 97689 - DNA, 540 bp, Zea Mays
atccgcccgattctggatcgagggaccggattaagcaccaaacgtttacctatagatctaatcatgtgcgttcatcacaagatcaatggccatcacaccggctccttcctcaggccattttctatatatgaaacgcggacgcaaagctcgcatcccgtttgtccacgtcggctcttcatgtttttgccgcacgatgcccctccaacggccagcaacacacgtcagtaagtgcagcggtcttcttcacggtttatctgctccaagcgtctggcggtttctagacggggcatgaagtggcgcttcaagaaggaaaaactcccttgtcgctgctagaaagcggacgccaccgtcacagccgacgaaagctactccaggtacggtccctcttcaccgactccctccccatgcgctgtcaggagcagacaggaggcacccatcggagatctccacggccatggagacgctggccaactttgcacatgttgcaacttttaccggatcagaaatgatctcccagaaaaaaatgtaccttgctttttt

SEQ ID NO: 97690 - DNA, 593 bp, Zea Mays
gcaagctaggagggtggtgcagctaggggaaaacacgacaactagggaagggcggtgcagcaatgaaggactacaggggcagcccttgctgtgcgacggaagtagcggtccttgctgggcgacgcaagcaagatctatgtatgaaaaatttgtcacttaccaccaccaaggtctgtgcgtgttgtttctccaaccatccttctagggggcatcttgatctcggcccggcagcgaagaacggatcgacgacgatggtggatggggcgacgacgaggaggtggacggatggggcaatgctgacgaggatggggcagtgaatacagcagcgagttggatgatggggctgtggcgacgaggatggggcggtggatgcggcggcgaggtggatggatggtgcggtggatgcagttggctgcaaaatttcttttaggtttagagttataggcgatggtgtatatagaatacgctagaatttggtggtaggatggctgatttggtgtgattatttggcgggaataaaaatttagaggctatttaacaattattaaattgtagactcatatttaataaactttttgaaatgtattatgaaa

SEQ ID NO: 97691 - DNA, 604 bp, Zea Mays
aataagaatctgattgaaatatacgttccataaatttcctgagagccaacgcatacaagttctacatccattgtcgcataaggaatgtttttaattgtttcgataagggccagatcaccttgattacacatataatctagaaatcaatcatacatagaatggtcgaattttattagtttaaaacatacgaactgatcaaatagtaatagtagagataactaatacacaattgtaataccttcttgaacaattacacttgatatgtccttttttggtttattgtgctgcaatgcaaatttgcattcatctattagcgctagataatttatctttgttccagatatatcttcttcattgggatgtataggaagtctagtatgctcatctatttttgcatcgagaggtgattcattatcaacttttgaatgcttgtccaattagctattatcaacgagtacttcatttgtctcgtctgaagaatccatcaagataaaacagtcctacatatattgtgaataaaataatctaaatatactgatccgctggcacaactgagatagaaggaaatatgttcctgtgagcagtggcggatgacgcacaaaaa

SEQ ID NO: 97692 - DNA, 371 bp, Zea Mays
accaacctcaataaggcctgtcccaaggacccatatccactttcacaaatagatcaaatcgtggattctacctctgggtgcgacctcctgtccttcctagatgcttactctggtttccatcagatccagatgtctaggcaagataggaagcataccgcttttgtaactgtggatgggctttactgttatgttgtaatgccttacggtctgaaaaatgccttaccaacatttgtacgggcgaagagtaagacttttggtgacctgattagggacagggtggaggtatacgttgatgacatcgtagtcaagactaagagagggtcgaccctggtggaagacttaaccctggtctttgacaagctgcgggcaac

SEQ ID NO: 97693 - DNA, 566 bp, Zea Mays
tgcgaaacaagcaaagcagctttcgagatcctatgtgacgggcagtcaaccaagaaggaggatggaactaaatcagagcttcttcctagggcatcctttggcttcccactttggctcgaggtaataactattgcaaactcttgtttttaagctctagtctagattatgaaaggcaacagctacagcctatgatatgtactgatatggtaaaaatattactacaatataatacccaagtgactgaatatgacaccgaactatcgaagcaccttctttctgatatctattttttctgtctcacaggtccaaccagccgtcggtctgataaaaccaggtgaaacggtggaaattacactacatcatgaagatttttacacgcaggaagaattcgtagacggaataccacagaactggtggtgcgaagacaccagggacaaggaagctgttctcagaataaatataacaggcagcagctcaaccgaaaccaagacgcacaccatcaacgtccaacatcgctgcccaccatcatcggcgccaccgccgatgatgaaccaaccggtagccac

SEQ ID NO: 97694 - DNA, 634 bp, Zea Mays
gaagagtatggcgcatgtccttgtggtacgggcactgggcatcgaggatgtcctccaacgttcgttcgcctccgtggggtgcccctcgggcacgagagactggtggtccagcggcaaggacttcctcgcggggcctcttctcccagcgcttgtcggtttgctggttcgtgtcgcgtcgtggtgcagacggagtgggcttcgttccttcgatgtggtcctgggtaggttcattggcggtgatgtagaggtccgcctccctgaatagctgtttggaagtggtcggtgctttttgtagtatagctcggatgaaggccgagtcattagatcctcggtagaagtcctcgatcactgttgcttccgcaacttcaggaatatgatttctcatggtctgaaatcttttgaggtatgaccgaagagtctcatctcctcggcgcctgatggatatgaggtaccatggctgagctggtttgtcagagagagattggaagttggcgataaaatgccgactgaagtagctccaatcgtcgatgcagtgtcggggtaggtgtcgtagccattgcagtgcatcttgcccgaggacgatgggcaagtacgcagtcatcacatcttcagttgccccagcggcccgggcagc

SEQ ID NO: 97695 - DNA, 686 bp, Zea Mays
tgcttgatgcgggccagatcacaggcagcaagagaaagaaaagccgacacgcagaaaacgatagggctagggttttttccacaaacagatgggtaaaaatcccatagcggtgagcgtgttgtcttttataggccaggaaaaacgcttcgggaaaccaacggttccacagtataatgtcacctttcgacgatcacatttcaaaaaacccccgcgggtccacttcaaccgagcgagggtaacgtctgggccatctcccaaaaaagactttgggaccaactcactaagttgaactggcctctcgagggcaaatgttggggcaaaggttgactgccccccttgctcggttcatttataatgtaaacatgataaatcatgatgaatggaaagcaaaggccttaggatggaaggaccgatcaggataggagaaggctttgccatctcgtttcggccaggaaaggtgaaggccttgccgacacccgaagacccggtgccctaagacgaaggctactgtcactacccgcgcgtgttattgaaacgggctcgtgtggaatcatccggggtcgcctggccccacttgtaagccataaacacagggcatgattgatggtgtgtccgtccggtttgtacttaaccatagtgtaatgacatgtaataacccttgagaggggaatattacgggaataacg

SEQ ID NO: 97696 - DNA, 389 bp, Zea Mays
tctggttctagttgacgtctaggcgtccgccgcggtcgctaggcctagcgacgtgtaggatgttccggttgtgtggtgaagctttagccgtagtggattgggtccacatggtgtggactaagcaggggtttcgagggccatcggctccacgtgccacttaggcatggatccgatgcgagcccgggagaggtggttggctccttatagccgatacgacccggggagccgaacacagctcggactgatgtttgcacgtgtttgtgtatgcagggaacctattcggagcacgtcaacaccttcctgatcggctataggtcaggtgacacgacatgcgaactttgaagcccgtccgtacgtcaggatctgagtcgttgaccgagggaccgggg

SEQ ID NO: 97697 - DNA, 379 bp, Zea Mays
gatctatgttgtttgttgtctttttgctaaggtgaagtggaaaagtatcttttggtcgtagctaggagcacaaggttgtcataatcatcaaataaggtttcaagtatatcttcacgaaaacattatgttttttcatgtactaaacttagagcagaaaaatgtgaggtaattgatttccttcgacacacacatagttttcattacacaagtatcagtttttaacttggttcattggtgtacccctttacctaaaacattgcttgttgatattatcgggatggtctcaattttacaagaactaagctgattgtagatgatagtgctgaatttctagatgcagtttaactcattgatgatagtcttgttgaaagtttccttt

SEQ ID NO: 97698 - DNA, 413 bp, Zea Mays
caaccttttcaaacaaaatttgttctgtggctttttcttctgttgccttctcttcaaattctgcaggcttcgtctcagtaggcactgagggccctgcctcggtttcaacctgggttgttgtagcttcaacatctatttgcttagtatcagctttgggttgcgttttgtaagcttcggcaaccttccctttgggagcgagacttatggagtcggttgtttccagtacatctaatacatttaccatcctccttctcctaggagttatggcagaactcttttgtgccctcagcgctgttgcttctgttgaaggacttaaagtccctggcatctttattatctcttcagttgttgacctttcagccttatctttgtcatccttcgtttcaactaactcaaccgaaggtgccttcggc

SEQ ID NO: 97699 - DNA, 474 bp, Zea Mays
taaaaatcgatttctataattatttttctaattctttctgatctctggattggacgctaaattctacaaaacccagggactgatgtacaaatattccctagactcagtgatcatcgcccacggatggcgggttgatttaagaaaagccgaggggctcatatgcaaaagatcatggccgaaagggtatcggacgaccctggccgatcgatcgcgcaccaaccgcccagattagatcttcaaacacgccgaaccggtatcctatcctggccatcggatcgccatccaatgattcgtattttaagtaccagagatcaacctgaaccatccgatcgacatcaaccggtcgcgggcaaaatgctacccagatttaatctaacggcccgcacatattctcccatcccactctcatctctcccctcaccagagcgtaaggcggcggcgcccccaagctgagtggtggcgccatggccggag

SEQ ID NO: 97700 - DNA, 362 bp, Zea Mays
tttttctccacttcgtcactttgtgaatcttgccctaactctgtccatggattatgcttttcatcatcatcacctttaaccttatcacctctatatcttaccttgatgtttatcttatattgggcctttaaaatctcctcttttcatctaaatatgagcgttatactttatctatttttcccttggtcgtatcaccttccttgtcgcttgcgagtttttaactccatcctttgttgtgctccggttgggtattacctttacctttctcatctctcgatcttaccttggtaattacactatgtccgttctctaaaatttccaatccctatcccaattggagagaggtgttttgcttatctcgc

SEQ ID NO: 97701 - DNA, 302 bp, Zea Mays
agaccgtcccatttggatggccaggatgcgtgcattggaaggccagcagttgcttgaggataacccctcagtcgtgtacctcactgcataccttctcaccctggatgcacagtatgatttcttggctcggcaccaccgtcagatgattgcccgagcagaagatgcagagaagcgcaaccgtcagctccatgtggatctcaccatagctcaagcccgtgtagctgccttggaaagtcgtgaagccattgctgttgaagccctaaagcaagccaaggatgagcacatccagaagttgatggagg

SEQ ID NO: 97702 - DNA, 504 bp, Zea Mays
ggtagagaagcttttcttgcctggttctctaaccttgaaattgatgaagacaagctttggattttccttggtgatttcaacatgattaggtatcctgaaaatcgtaacaagcagggtggtgaccctattagaatgctcaatttcaatgcggcaatcagtcagctgggtttacaagaaattcctctcagagggcaagcattcacttggtctaatatgcagcgtcatcctctgcttgaaaagcgggactggtgctttgtctcgcctgcctggtcttccaacttcccagccacttctgcctcttcccaggccaggagcaccacagatcatgttctctaggtggtcaacattcaatctaacgttcctaaactgcccattttcagatttgaaaactattggcttcagcttgaggacttccattccagattccaagcctcttgggagcacgatctattccagcctgatcctgcaaaacggcttatggccaaatttaaaagagcaagaaag

SEQ ID NO: 97703 - DNA, 612 bp, Zea Mays
acaagtaagccgggtaagctctgtgttttagaggctgaatattcttgaaatcaaagtctgcaaccacaacttcagcgctcagacctctctccttcagcacacaaatttcagcaagcagaatcttggcttatgttatctccaaggctgtaggagactcgatccaactcgcagtgcacacatccggttgtctccctgaccgaggagggagggacttgccatagttttccacaatgaaccactctaagcgccatcctttaatgctgtccttaagtgggatatcgaggtactccgttttcctcccacgacgcatctctaggctcgcaccgcccacaagttggtgctgccccccagccatcccagggcgacagtgatacaagtatttccacaaaccaaagtgaggaaaattccaaggtaggcctcacacaaatgaacaaagatagaaatttgtagaatggagttgggattcaggtgagtcagattcagatggtaaaagtcaaggagactgcgaaagaagggagaaatgggaagggcaaggccacgaataaggaatgtaaacaacggactcgtgggtatcctctatcgggacagtaaccccatggcaaattcgtcaag

SEQ ID NO: 97704 - DNA, 475 bp, Zea Mays
ttctatgatgctcttgatataaatgagttcaatcgcatcaagaatctcacaaccgctcatgagatttggattaagctaatggaaattcatgaaggaactacaattgtgaagtgtgccaagctatatgtgtgcaatgggaagtttgatcagtttattatgaaagaagatgagagtgtatccgatatgttcaaccggttaaatgagatagtgaatgaaatcaagagacttggttttaatgtaccggatgtggatttcactcataagttccttagatcacttccggagaaatatgagaccattgtgacaatgttagtaaggagtgatctatctacaacttcttcaaccgaagtattgggggaaattcttactcaagatatattcaagaagtctcaagccgatgctttaagtttggcaaagaaagtgaaaaatgaatcaattgctctcaaagctaaagcctctaaggcaattgaaaaag

SEQ ID NO: 97705 - DNA, 504 bp, Zea Mays
aaatatttcatttattttgtatatgtccatgcacaatgtttagccaaatgcttgcttcattttagataggtttcaataaaaaaatggtctcgttaatttttatcttttaatcacatacatacaagttcaacgttcgatcagtgaaactgaaacaccaaatggaatgcattctttccggttcttgctctgccatatataggttgtgtgtgttaacgccgaaccgcacccaagcgttgaactcgatagtctaacatcagccacgcgcccctggccccgagccaccgactgtgtcactcctcaccaatgactgcatcagtcatcatgcatcgagattaggtaacccccaatgttacatcaatttggcttgagtttttagttcgaacattgttatttttagttgacttgagccattccatcaaatctgcagtcgaaaccgtgcgaaagctcccatgtaaggtttaatattgctttcattttttatacaacaatagtacatacatattt

SEQ ID NO: 97706 - DNA, 713 bp, Zea Mays
cacaagcacatgtgggtgctaaaacacgaacaacaagggcgaggacggacctggaatcagctagccgtgagtaggcggttcacggcggcgcagtcggccgaactgggggaagaaggaaattctctagttatggtggctaattgagggtgagaacgggtgcttcggcttcgtgataacatggtgcaactgacccggccttcaatttatagaaatactaagcggtggtgtccaattttgaaaggagagaccggcggccgagaagagagatgagtcatcggcgtgaactgtcgtggcgcttcctggggtaattactccggcgaggaactgacctcctacggatatctacggcgacgtggtacatcttctaagcacgtggcgtggttataatcgtcggcgaactccgacgaggacactgtcgtccactgcgcggcaggtgtcgtggtgaatagtccggcgataagcttctctcctttccccgagttgagatctttctctgcccttgattatccgtgagtcccagcgcacgaatcgcaatgatcggcgttaaccgcgacggagagtcaccggcggtgagatgcgttgcatccctgatattttgttactgtaccatggcgcaacttctttagttgacctgacagagcaactttgagctcgttttctcctaatttcatgtaacaaccggttcaactctctgtatcaaagttatagcctaa

SEQ ID NO: 97707 - DNA, 934 bp, Zea Mays
ctttctccagagctattggtacagtttccgaaggtctagcttcggcaggagcttttgaaggtccagctacagcaggagtgtgggccatcttggcgacagcagttttccttgaatctacagcctatgtgctatgagcttcggcagaggcaagagctgatgtctttatggactccagcacaacatctagcacgctagccattctcctattccttggagtcaatgtaggaatgcttaatggcttcggcagtcctattggacatgatggactcaacaccttcaactattctatcgtcttctctaatttcagatcttcggccggatttgtactagcctcgactggcatagcatgacatggttctgtgataggagcaaactctgcacgttccataagctcaggcacattgactgtctcaatacgtcgcggactatggttcaagaccttcaccttcttcgccttcggtgcactagaggacgccgaagcagtagttttccttttcccctttgttttcgagcaggaaaacaatagtgagggtagataaacccgataacatcaaaaaccctattcagtctctttttccctcgagcgccgaaggccactgtcatggcttcatcttcggccctcaaataggctccaagcagttcatcacttgttgcctctataacatccaaccaatcatcattcagtacgtcaaaccgatcccaaaatcaaaatgtgtacttcagatagatcaggccactttggctggagccagcggcagcttccttcggcatttcccatccactcacaaggggccatactctgtaagcaatatgctcttgaatcaaatcccttgtgccaatgtaggtcagcttccttcagcatttcccatccactcgcaaggggccatactctgtaagcaatatgctcttgaatcaaatcccttgtgccgatgta

SEQ ID NO: 97708 - DNA, 552 bp, Zea Mays
gtgatcctcatcctacgaccacgtccttgctgatgttgttccccaactactatcgtcctaacactggatcgacattgtggttctctcatggatccttggcatcctcaccattgagctctagggcgtcgtccactaatgaggggggcatcgctcactaggcctgggttgcactcaaggcccagttccttggcaaccaggaggtttgtgccctacaccttgactcctccttttggcccttctcctagggcgacctctttgtcaccgagtactgtcatcggatgaagggcatgacagactctcttcaagatcttggtgagcccatctccgattgcacacttgtcctcaaccttttgtgtggtctcaattggcacaatgaccacatgaaggccttcaacaagcgctctatgcccttcccgtccttccatgacattcgcaaagtggtacttctcgaggtcctcacctcatacgctaagtccactgtgtctgccatggccctctatggtgcgtcctccagtagccagccaccttgccatccatcaccggagagcctcc

SEQ ID NO: 97709 - DNA, 311 bp, Zea Mays
ctctccgaagccagggcatgagttctaatgccgaaggtttctgtcgagtgcatgagttacattatcagatgaaggtcagagaagatggacttcacaaaaactttggatgttataattttgcctaccgaaaagacactaaggccccggtgatcggcaaccgcactaagtggccgaccgggtggacaagcgaatggttctatatgaaagctgatgagaagaagagggaaaaactcatgactatggttatgagtcctctgaggttgagcttcgggatgacaaggccattatgcaatatgcaactcggctcccaa

SEQ ID NO: 97710 - DNA, 405 bp, Zea Mays
gaatcgtggtgccgggaggtattgggcaatcccacaataaaatccatgcaaatatcctcccatttccaagatggtatgggaaggggttgtaaggtgcctgccaccttcaaatgactggccttgactctttggcaagtgtcacactcagatatatacttagcaatttccctcttcattctggtccaccagtacaaggatctgagatcatgatacaccttgttactgccggggtgcatggaaaattttgaaaggtgagcttcatccaatattttctttctgagctcgggatttttaggaacaaccaatcggtctccaaaccataaaatccctttgctgtcctgacaaaagcatttgtatttgtccaccttccgttcgatcatttccttaatgacttgaacacccttg

SEQ ID NO: 97711 - DNA, 340 bp, Zea Mays
gaatattattacaaaattttagaaattggaatggttcaatttggagctagaatgaattttctatgcaataaacaagttttaggaattctttttatattaaaaatcaatttctgtatctatttacctattttatatattctctggactgggcctcacttttcagagaaggcaggggtctctgcgcaaattacttaagacacagagaacagttccactggacggggggttctaaatcctaaaaacataaggtttcttttgtaaagtgtacccgcgaaggggtaccttctaatctgagccctccgatcaggaatctagggttcaaaatagatcaagtgttatg

SEQ ID NO: 97712 - DNA, 573 bp, Zea Mays
gtgaccatcagcaattccacacttctggcatttcctgttcattttctttgtaccttttgctcccaatttaataaccttttgttcactcccctttattgttcttcctttgggttttgagttatttggtcttgccaagcttatcccatcgactgcaaaatccagtttctgcaattcaaaagtatatatttttagcacataatattatgcagtcccacattcagtataataccattattacctttctgacatgatcattttgttcatggtcaccactctcattcatattcgcgtgatcctgcaaattaacatgtacccgccaacacatttttaagctcaatcataaggcaataacacaaaccaataaatcatttgtatgtacaaccgcaaatcaatatagttgttaaagttattacctcttcaaatgaacgtattggtataggtatttgaacattgtccacacccccttcaagtatattagatacatcttgaatttcctaaaaaattggttcaaagctcagtatacatcagttacaaataaacattcacaataatatgatcaaaaccttgttattc

SEQ ID NO: 97713 - DNA, 684 bp, Zea Mays
aacagcgtaaatgattacgaattttagcgtaaatcgtagatctgtttcgaaacggtgaatgcggcccaaaaattacggcgtaaaaatctcgtgcgtcccatcatgatcgggttctgactcggacagaatttagcgtaaaacatagatcaaaacagcgtaaatgattacaaattttagcataaatcgtatatctgtatcgaaacgacgaatgcggcccgaaaattacggcgtaaaaatctcgcgcgtcccatcgtgatcgggttctgactcggacagattttagcataaaacatgaaccaaaacagcgtaaatgattacgaaattttagcgtaaatcgtatatctatttcgtaacggcgaatggggcccggaaattacggcgtgaaaatctcgcgcgtcgtacacgggttctaactcggtagatttcagcgtaaaacatgaactaaaatagcataaatcatcgatctgtttcataacgacgaatggggcctaaattacttcgtgaaaatcgcacgtgtacgatcatgcgcaagttctggctcgggtggatttgagcataaaatgtgaactgaaatagcgtaaatgaatacgaaatttatgtaaattatcgatctgctttgtaacggcgaatgtggcacttgctttttagtggaagcgtaaaacacaacaagaagtatcgtaaaat

SEQ ID NO: 97714 - DNA, 788 bp, Zea Mays
gtgatactgaacctcggttgctgcgcaggttctgaggtttgggcctgcgcacgcaaccgctactgacaatgctatttttgtggcggcttcgaccgtggctgccgatgacgattcgtttggctctgtgtctaagtgttttgagtctgatgattctgggagttcgattgcgtggacggaggagtcttcagatgaggacttggattattttgtagcattagatgtggttgcagcggagcattcaccgcgcgcgaaggattctgaggggctcccgggtgcgagtactgggtataggcggcgaagggcggtggcaaaacggagagtgagtggattgtcgcaaagtggtaggcgtcatcgtagtgagatggagagtggtcgtcttcgcgtggatgggactggtaaacgagaattgctgtcctcgccgattggggtgagtgtaggtgaaggagagctgcgaaatctttttgagggtgaggaattgaggatgatgctgttcaactacagggagatgggtatcatcccgaaggttgagccaatgtaatatatgatgccctcgctgtgtgtatgtaaccaaaatttgtatgacaaggctgcgcgccttcattgatccggccacacccgtaggcgacttctgcacggtgtcttttgtgaaagactttgccctttacgtacttattgtgctgttccggctgcacccttaggctactcttgtacggagagttttttggaaaaggcttcgattttgcgcacttattattccggctgcacccttaggcgacttttgcacggag

SEQ ID NO: 97715 - DNA, 297 bp, Zea Mays
gacgtccttgatacgggctaggggcctcattgcttcaatcgccttgattttctccgagtttgcctcaatgccccggtacgaaaccaggaaccccagcaacttccctgcggagacatcgaagacgcacttgtctgggttcagctttgtgtgggttgctcgcagcctgtcgaaaaccagggtcaagtcttccactagggtcgaccctctcttggtcttgacaacgatatcattgatgtatacttccaccttgtccctgatcaggtccccgaaagtcttactcatcgcccgcataaatgt

SEQ ID NO: 97716 - DNA, 343 bp, Zea Mays
tccggtccctgcaaatttggaacaaggccacgttttcaagtgttcaccatctcagtatgaccacgacatagtttaggagttaggacaccagcttacggctggcacctcttgcttgcatcatactgcccaactatattgaaatagcaatggattgcatgatcattgtgctcttactgtgttgcatttatcactaggtcacatggcacctcaagttaaactcgaccaataggatgtgtaaacaagatgccagtatgtaacagactcggtgcagttttgctaaaatatttgttaagaagtgtagtttttatgaggattcacaggtggtgtggtgaagcaacacgaa

SEQ ID NO: 97717 - DNA, 356 bp, Zea Mays
aactcttttagcctcttctaaggcgtcatgagactctttctcattttttctaatggcttcatcagctatttctcggccacccttcagccatacttcggaataaaacttcccacctagtgtagtagcttcggctgaagggtttctaacatcgtcagctgagatggcaaaatctggctgagctacagccttggcatgatcacaaccgaccttttccaaaatggacacaaccccgcgggcatcggcaaaggcacaaaaatccactctatcactaagaatctcttcaaaggcttcggcctcgccgttaatccattgaataaatccatcggggtcactacgaatgaatttctgctccaaag

SEQ ID NO: 97718 - DNA, 635 bp, Zea Mays
caactttcctggttgactttgctgccaattagagaggtcgtgttttcgtgccttcgatattatctctcagccttcacctttcttttgtagctttgatcgtaaggacttgtgatcgaagggggcgttctatcttcattccaacatgagccccgaggggttggttcaacttgttgagtcaaactcgaagtcttgtagggatgacaggtgaacactgccctccatcacaagttgaacttgttgctttttgtgtttgtgaccattggttgctgacatagccaactgatgtagggtgtctcgtcttttgatggtaagcagcttcatgtttttcgaagtgcctctcggtcgttgtatataagggtagggcggtgcgtggttattccttttctgcgcactgcttcgttcctctactctaccgctttttctcgcgccacatttctctctctgtcttgttagtgacgattgctctagcgtggatttagcaaactgctcgccgccaacgccgatacatgacaccgctctcttcttcctcatcattaagtattgtgccccctgctaggatatcgccggcggcgggtggttccggtgtacatcgcgccattggcttggaaaccttggaatttggtcgatctatggtt

SEQ ID NO: 97719 - DNA, 580 bp, Zea Mays
cgaaggtggtggcagtgccgaggcatggtagtggtaggtttagtatacgaagtggtagagtagtagttgaatctttggaggacctagcaaggggtttcagtgcccactaaggatactcataaggctgttgtcttcacatctttctttgtttgcgggttaggtttgctggtctattcctttgtccaaggccttcttgacttctattccatccatttgacccatatatatcccaattttgtgcttcaaatcatctttattcatctctgtgaggcttttcttggagttgctcctcatttcggtttgtggaagtacctataccattgcaaacctggtatgtaggataaaaggcgtcaggtagttggaggagcaagtcttgaactccgtcgtggttgaatggttaactatctagacattcctctcaaggataataatatggcgtgatatcatgagcagtttcctatggaaaaccacaatagttccctccctcctgatttagggaagttgcccgatgtgagatttccaagttgggtagaggaccaaccgacttagaatccactaagttactgccatgatttaggga

SEQ ID NO: 97720 - DNA, 475 bp, Zea Mays
caaaccagctcaaactttgtcacagaggtgttggttaaacatccattaattctagctccacaaggtcccaaaattgatccaaactactgccttctctgaatatcagggagccttagtctgacagccagtcttcagggccatttagctcctaattttgtacaacacctaggcttaagtacttaatcaaagttgttctcgtatagtagctttagaattttgatgcattgaccctaggcaaattcttggtatttttagatctacagagctccaaagttagccttgctcactgattttcagacttagtcatatgagaggaattgagtgtctttttgcaaataagcccaattcacatcttttgacttgcaaatcttcaaatatgtgaaccatatgacttgaggtaccctaacaccttggtttttgcacttggatccaaaagtggtcaaaatttacatatgagaggaattgactgtcccgt

SEQ ID NO: 97721 - DNA, 350 bp, Zea Mays
tcctgatctcaccttgtaaaaccgaagaagcctgaggctctgtaggaacaagagactcggtatgcctaagtataatcctatcacaagacacaaaaatgtgtctcaacccaccatggacagtatgccctagaaatggaccccacgtctaagggcctgaggatgaattcgaagggtaagcttaactgataagtcttaggtacaaaacattaaatgcgtgaggtgcgatattacaaatttgacaagcgtgcttttgtcaatacctaggctacagggtacctgagatcaccatgtggcacatgcattgaacatgtagccatgaatgtacacacgaagtataatataaagtatta

SEQ ID NO: 97722 - DNA, 608 bp, Zea Mays
tgctggcacaggatcctcaggggctggacggtaggacccaaagaggaggcgagaggcctcaagagtgccctaaaactgtggtggctgaattagctgagcgaagatgtgacaaagatagtgagcatacagtagctggcgccgggcacgtagaccatccagtatggtgtccttgatttcacaaatgaggaaatccacaacatcaaattcggagtgagagaccagggcaccaaggagctagagttggatatgagtgacagcctccctgtaacccaaccgttgcagaagcgtccgtctcatgagctgatatagaaacttggccgctgtggtgaagtctgccggagaacgtcgcgacccatctgagaagggtggtcggaacagagccacgacgtgagctgtactaggagcaactccgccgtgagggcgacgaggaggatcagaggtgccacagcacaagctatgaagacgagtcgatgactcattgaatccaaacaactggcgaatctggctggcatgaatggtaacatcctctcgctcaaagcggaatctcatccagtggtgatcagggtcgatccatacagtagcatagaaaactcggacccattcctcaa

SEQ ID NO: 97723 - DNA, 477 bp, Zea Mays
agctgacaaccccatgtattgttttggaagaaagggcacattacccttgggcaagattgagttgcccttatccctcagcacaactccaaatgcgaggactgagcaagtaacctttgacatagtagacatgatctacccctacgacgccattatgggaggggctccatcaacaagcttgaagtagcaattcatggactatgtctttgctgaagatcttgggtcctcgaggagaataacggtctatggagaccaacaaactgccagaaacatagaaagggactttatccctaggcaaagaaatgtacattgcgttaccgcaaaaaacaagggcccagccgcccttgatcaaggaaaatagaagcaataaaggctccaatctagagcaatgaggaagccaaaatggtccccctagacccttcagtacccaactagacagtgttaatcagcgaagacctcagtcagccagatgaagaaaag

SEQ ID NO: 97724 - DNA, 444 bp, Zea Mays
ttgatgacgagctcatcacggaagtagagggtggttctggcaccgtagccatggtgaccacattagtagacttggtgatcacgatagcttcagaaagcttggagatcttgggtaggcatgatccgcatgagcatgaatccacgtgggatgcagcgctctgggctctgacgcaatgtcaccagcccaccaaatggcctttgagggtaatgatgatgacgagccctaattggagtctggcaggggcggtcttccctttgtcgacttatagtggttgtcgtggtgctggtgctggtgctggtgctgtgtatgagaccgtggcccccaacgtatttcggggtgactattaggggccgactttggtcgaatgtcctcaaaacaaataatttatcagttatttctgagtctatttcaagtgtaatatggtgaatgttgaagggcttcttc

SEQ ID NO: 97725 - DNA, 535 bp, Zea Mays
caaagcagcagcttttctcttcttcccctgtccccgcagcgggtagcggtagtcggggtagacgaagccgatggcgtcaaaaactctgttcattctctttttccccgacctccgaaggctgtagatagcgcattatcttctgccttgtaataagctccaagcagctcatcacttgtaacctcgatgcatttcagccagtcatcgtttggttcatcaaacttatccccatacctgaatgtatacttcagccggaccagatcaccttcgctagacttggtgatggtcaccttcggcatttcctagctctttacaagcggccatactctgaatgttatatgttgttgaattaaatctcgtgtaccaatgaaggagcagacagtaccgaatgccttctgacacgcttcggcggcgtcatcaatttcgaccttcggctttcggagactgaagcgggaccatatggggtgcatgataacctccttgatgtcgtccctcgctgtcaaatcgttcttcacataaaaccattcttccatccaag

SEQ ID NO: 97726 - DNA, 557 bp, Zea Mays
ccttttgaaatccgctcttttcttcctttatgggcaataggcactattttgggtgctactcagaaagttgatatgcgctacactaggaaaatgggggtggttcgtattttggtggcagtgactaatgtaaatcatattccggagtctgctgaaatagtagttggtgaagggttatatgagatttttttcaaagttgacaaggttctcatagcggggaagtggacggatacagataacaggggtaatcgagacggagatgataaggagcaaggagaggatgaagattactctgagaaacatggaaatgattcttttcagctagagaagctagcggaagatactgtcatggaagataactctttgcatggtgatcctaagaagcctcaagatggggcctgtgacatggggttggtgactcagcttgagaatcagattgttaatgggacagtgataagcacgggtttgaggtcagaagggctgcctctgggcatgccgacaggcttgttggcacttaattccccttttgctgatcagtatgtctccactctcacatctgg

SEQ ID NO: 97727 - DNA, 593 bp, Zea Mays
aagcaacagagtattattcatggcgctttggaaggtggcagaagctcctgtgaggccaaatgccatcacgcggaactcatagtggccgctatgtgtttgaaatgcggttttgaattcttccccttccttaagcagaatttggtggaacccagctcatagatccaagcttgagaaccaactagctccttggagttcatcgaggaattcattaatgattggcacaggatatttccgtttgatagtgagtgcattgaggtgccgaaaatccacacaaaaacaccatgatttgtcctttttatgaaccatcaacactggactagagaaagggctggtgctgtgctttataattccagactgaagcatgtccttgacttgtgcttcgatctcatctttgatcgctggagcataacgatatggttgaatgaggataggttgggctccagggactagcggtatagagtggtcacatgatctggatggtggtaacccctttggttcctcaaaggtagacaggtgttgctgcaggactgaagtgatgcgaggatccaaatcagttggcatggttgttgtgccatcagcttgcaagaggtaga

SEQ ID NO: 97728 - DNA, 802 bp, Zea Mays
tcaaaaacggtatgtatgtaaagtttcatgcgtcgtaaagaattgagttacaagcaactcatatattatattcaaaagtataaaaatactacacactttgtccagcaaatattacattccaaatgtttttaaaatagcagctattcttcttttaaaactacttccgcagcttcgtttaacagttgagaaatagctttatccaaaatagcttcggccattttagtgatttcttcctctctctctttgcttctgggtcagctgttggctctaaaagctccgggggaggagataactcagttgcgatacaaaacataaataagttcaaagtcacagaaataaaacacaaagtcaaaagcaattaagcaatacatatccgcctttcaagttccgcagctttctcagctgccttcgtcgcttcttttgcatcatgagaatctttttcactcttttttattatctcgtgcgccatatctcggccgccattttgctagatgtcagtgaagaatttcccgccaactaagcttgcttcggctgaggggtcttttgcatcttcaatagataaggcagcttcggtttgagtcaaagctttcacgtgatcacagcctgatttctccaaaatagccgcgattcccctggcacctgagaagatgcagacatccccacgaccactcaaaacttcatcaaacgctacagcttcgttgctgatccagtcaattgggccttcaggatcgccccttacgaaattatcctcgctagagaatgcgccaacattggcgaagctagattttattttttgcacaca

SEQ ID NO: 97729 - DNA, 530 bp, Zea Mays
gaacatgattgaggttacgttcgaccttcgccctaacagtagtcccccgaggggagcctcaacttgatgggtcgatcctgaagtcttgcacgaaggatgtgaatgttgtcctcgattgtcaattgagctgatccgggggcaggagatttgaccattaatgtacggttttgtggccatatataaggtaagacagtagtagggtttttacacctactctcacgacttttactgttgcacctttccactcacgctttttttatcgtctatgctctaccgacggcgattgccgtcgctcgacaactagactagcgaggatcaagacagttggatgaagccactcccaacatgccatggaacctgcttcttcccctctcaccgaccctaccagttccatcgtgtcaccggttaaattaaccccgacgaatagttcaacttcctcgggctcggatgacatcgtacttccaccaatggatgacatcttcaagactttgatagttaggaatggggagactttcgagcttggacagtcc

SEQ ID NO: 97730 - DNA, 360 bp, Zea Mays
ttccttggctgattgattagtctgtttttaactgtgtgtccttcttcgactattttttattagatatggctcagcggtactctgaactcgaggggaagtattcccaaggccagattgacctggcttgggtttctacttctttggacgatgccaattctttgaattcctctcttagcgctcagcttgactctgaaagggcggctaacgaggtaagcttacttgactttctctactgtgtttttactgcttactgaatacttgagagctgattcttgtctgtaggaggagaaacgggtacttgcggcctctcgcgataaccttgataggttgtatcgtgacgccagcaattctctgactatc

SEQ ID NO: 97731 - DNA, 974 bp, Zea Mays
ctttgccaatgcaagatgatcttcccagctacccttccaagacagaacacaagcgcgcaacatatcttccaaggtttggatcgttcgctccgactgaccatcagtctgaggatgaaaagcgacactaagagaaagcttggtgcccaatgcactgtgaagactctcccagaatttggatacaaatttggagtcttgatcagaaacaatggagttaggtaccccatgaagcctgattacttccttcatatacaagtgaagctgaatttgtggtcttcatgggaataaaatgcgcagacttagtcaagcgatccaataccacccatatagcatctttgccccgaggagaacggggtaaacccaccacaaaatccatggtgatatgctcccatttccactccggaatttccaatggcttcagtaaacctgcaggccgcttatgctcggccttcacacgctgacatacttcacatgcggccacatacttagaaacgtctaccttcatccgcttccaccagaagttttgcttcagatctcggtacatcttggtttcgccagggtgaacggtgtaaggcgttttatgagcttctctcaatatatccatcttcacctctgatttctgaggcacacaaaggcaacccctaaaacgaaccaaatcattctcatcaatggagaactctcggggtttaccatcgccaaccctctttcgagcttcctgcaataaatgatcctgctgctgagccgcacgcactctctccatgagggaagattgaataaacatacgagtctcctcactagcggtgccgacatagcacaaggcgatccccaaacggtctagatcagtaatcaactgcaaggccacttttggaaccccaaacctgctaagggcatcagccaccacatttgccttccccgggtgataatgaataacaaatcataatctttaatcaattcgagccaccgacgctgcctcaaat

SEQ ID NO: 97732 - DNA, 388 bp, Zea Mays
ctggggacactattctgcgaaaggtcaggggctaacgtgtaagaaaacaggacccgcgtaaaacgttccctagtctgtcatggactgcgtgttggtttgtaatatccctaggggctcttatgtaagatagccacgacaaaggggtacgggcaaaccccagccgcccgatctgatcctaacggctaggattaggttttcgtttaaaacgaatcggtacgcactagcagtcgtaggatcgaagatatccggcccggatctgaagtcgtgaaggggtatctactcatttattcctgggcgcacatcgatggatcaacggcccaaaactacccatgccatgatgtaatctcccttgcccgttctagatccgatggtcataagcaattggggc

SEQ ID NO: 97733 - DNA, 604 bp, Zea Mays
cacagacttggagataatagaagccagggttctgcttgctgagatttgtttgttgaaggagagaggtctgactgctgaagctgatattggtgctcctgttgcatattctgcctagaatctgccaccttccaagtcctttttcgattttgtgtccaatcctcctgctagtggcagtggtttcggtcttagagtgcgaccctctcccgaagaagttgaggctctggttgcttcacttggtgatcttcccaatgatgagaggcaagttcactttgagatgcctataaacccgagcgatgcagagataagtgctatgctggacatgttggctgaggattcttctgactcggtccctgctgaaacaatagctgttgcaactatcccaaagcctggaaaaaccttgaatgctcaaaaatctgatagtactcacccgaaacgccttcgcttggccagtcatccaactgctcctgccgaggggaagaagaagaaaaagagacggctttgacgattgtcgtgcttggactaggatgctggcccttctgctcctgccactgaagaagtaccaggggaactttttactggagctgactccaatgggtgtgaccct

SEQ ID NO: 97734 - DNA, 442 bp, Zea Mays
tgacgacagcgacatcaagaatgcaacgatcctgatggagatgacattcgggctgtgggcacaacggatgccaaccagaggtgatacttgtgtatcagttagcgtggcacggtggctggctcgtacctgacgacatatatggctgtgcgggtaacggacggcaagaacagatttcatggctatacccggacggagcaagcgtggttcgacggcttgctaaaaaatgagggcttagggaccggaagacaggagcaggtagcacaccgacgatcgaacggagcgaggcatataaagggtaaaaatgatggcgcagggcacacatgggaataccgcggaaccacctgctacgccgaccatcggatgctgcgggcgagcatgttagaatgaatttgttccatttttgcaccagccgatagtataaagcacaaataagaagccattt

SEQ ID NO: 97735 - DNA, 505 bp, Zea Mays
tggacatgcacttaaatctatcgagtttcggatggcttttgacacccttggacacccgcgtatgagatttaaaatctatattcgcttgattggttggcggcagcctaacctcctggctcacgagggcctgcatctgttcaaacgcgcgtgtctcgcttgtccgcccatgcagctaaatgcgtggttttagacctgatctgcacccgtgtatacatgctcgagcgatgaggtacattttaccaatcaagcgcacatccatagtcaacgtatccggcggttctcgatgtgatcgaccgagcaaccaatcagccgctatgtgaagccgttagtttgcgaatcaggtacggggtcacacccacgagtgaaaatatgtaccaaacctgtacgttaaattgtatgtccaccccacatggctaaaacaaatagatttatttcaaacttcaaccgaatcgaggagtgtgatcagagagtagcatgggttttacattacaggacggcgcgacgc

SEQ ID NO: 97736 - DNA, 550 bp, Zea Mays
caagcatgtttagcacataaaacaattgactaagtgtctagaacttaccttcacacttgatccatctagatattcctttgctcaacattatgttagttcacacatagtatgttgtgcatctaattaccaaaacaatatagaaatagcccaaggacacatttccctttcaagaggtgctttgcctcttgctgatatgcctcaggcagagagaccacatggtggtcgtgcctggcgagggtgcttgtcgtgtgccatatggccaaggaccctgtggtagtggctttggttcttacttccccatcagactatagtttccttcttgtggcaatcgctatccccccatgggaccaggatgactggtgtttttcctaacactttttaggggcaaatgtctcagcactggtttccttatctgtatcctaaccctagtgatgtaccatttactcaccccatgttttactattgatgcaaaacggaggcgtgaagaacatatggatcatggattccagctgttcgcgccacaagattggaagcaaaaaatggtgctcca

SEQ ID NO: 97737 - DNA, 1033 bp, Zea Mays
gaagtgaattacgaatagtttacatatcagattcaaaattatacacatcgaatattacagtcttgttatagcaaagtttcattgatcgtctaaaaatgtttttacaaaaaagtagtagtcctccttcaggaccttctccgcaacttcatttagcaatttgttaacgacttcatcaataacagattcggctatattgatgacctccagtgcttcctttgcttctggatcggccaggagatcgagcggtaccgacgacggagataattcagctaaataaagaaaaagttaatcagtccgaagctataaaaacaaatgccgaagttaaaaatcatgacataatacctatacgttttcacactctgcagcttcttcagcttgtcttgctttggcccgggtctcatggatgtccttttcactctttttcataatttcgtgagccatttctcggccaccatttgcccagatgtcgttataaaatttcccgcctattaaacttgcttcagctgaggggtccttcgtatcatttacggagaaggcaacttcgtcctaggccatggttttaatatggttgcatcccgccttctctaagatagctgaaatcccccgcgcaccggagaacgcgcatacatccccgcggtcacttagaatttcttcaaaggcttcggcctccccacttaaccattcaataacgccttcggggtcgccttgtatgaagttttcttcggaagaataggcgcccacgttggcaaaactggttttttattttcttcacacagtccatagatttttcaaagcatcttttcttggatgtgcgaagttcttcaacgtttttctctaaatgatttgtccagtattcactaattcctcatttagcttctgcgattgcgcatttctctttagcttcgcctagttgcttccgaaggtcttcaatctcaattttttgggcttcagattgggttttgaagctagcttcatcttcttttactttatccaccaatgaaagtagaattttttgtctttttccgtggcttcg

SEQ ID NO: 97738 - DNA, 592 bp, Zea Mays
gtggggttgtgtttttgtaataaaaaacaataggatcaggggcgaagctacgttggcgagttggggtcagccgaccccgacaacttcacagttgcaccttatacacgtcgattttctaccagccaagaccccggcaaaaaaaaatcgtgaccccggcaccccgcactcggcagcccaaaacgctatggcccaacgagtatttactcctctccttttgtcaatactcaatagtcatcaacgaaaatacgaaacgcatgcagtccaacctgtactagcataccacgtccacaccagaagcccatatttgtgcgtcctgcctgttggacgtcaggggtggaggctagcaagtagcaagtagcagcagcccaaaaggccaaaagtcttttgtctcttgatccagggttcaggcggctagcagaacaacaatctgacgattgctctcccggcggcgttctttgctagtttgcttcgtcaaaactgtgctgtgcgtctccccgatgcggcgacgtccctactgcctactcccttccacttccactccatagttccactcttcccttccactcttccaggcttcctcggtcaatcgttc

SEQ ID NO: 97739 - DNA, 504 bp, Zea Mays
ttggcctcgaaatatgctaaggttcgattcattgtcgccatcattgtaacgagggggtggattatgcacgctcggtagtttgtcaccataataagttgttgtgaagtttgagacctcctctagaatgtatgcctctgcaatggaagcctcgattttgcatttatttctacatttctttcaaatagtctttagacatctctcgattggatagcaccaacgtccctgcacgggcccccccattcgtgcctcataggggagatgaagaatcaaatgctgcattggattgaagaagccgggtggaaatatcttctcaagcttacacagtaacacgggggccaatctttccaagtctgcaaccatggttcgagataactcttttgcacaaagctgacggaagaaatagcttaactctgaaagcgctagccagacatgcttagggacatagcctcgaaccatcgcaggaagaatccgttcaatccatatgtggaagtcatgactcttcat

SEQ ID NO: 97740 - DNA, 888 bp, Zea Mays
gttttgaaacttctttctatttcgcgaggcatagagatcgccctaagacgagtaatcgcaagcgtgcttatgctggatcgagtagacgtgagcatgtcgcgccgatttaagtcagtactgacttaaaccgactgctccgttagtagggtctagtggtcaccctgggttaagtaagcgtgagcatgtcacaccgccttaagtcaccgccgacttaagtcgattgctccgttagtagggtatagtggtcaccctgagttaagaaagcgtgagcatgtcacaccgccttaattcatcgccgacttaagtcgattgctccgttagtagggtatagtggtcaccctgagttaagtaagcgtgagcatgtcacaccgccttaagtcatcgccgacttaagtcgactgctccgttagttgggtatagtggtcaccctgagtcgagtgagcatgtagtttgacaataaacggttcgagtgcctttgagaatgaagtctttttattgatggtgtattttcaaattacagaatacaatgccatcccaatagcttttgaaatctagctaggggtaaaacttcctgagatgctctatattccatgagttccctatttccgtgccatccatttgagtaagacgatatgatccaggccgagtgacttctgctactatgaatggtccttcccatagtggtgacaatttgtgccgtccctcccccgttagaattcggcggaggacaagatctcccactacaaaggatcgatgtcgtatggccttatcatgatagcacctcagagtctgctggtacctggctgactgaatcactgtattcaatcattcttcttctagtatatcaacaacttccagtctagtagcctcagcttcggctatgttttt

SEQ ID NO: 97741 - DNA, 481 bp, Zea Mays
cctccgcaaattttttgtttgactcatcagggctgatttcgcccttgtaattcaccaaaaacaatcttgtaccggcccacactcttttcctcccggggggggtgaggtttttaacgaggcggagccatgtaatataggtgtgaaaaatcccccgcaaaaacatgcgtcgaaaaaagaccgcgacgacggtcttcgacattcgaccaattcgaggtcaccgcgaggctaagcgccagccaccctcgcgtgcgacaaatccgcgcagaagtcgcctaagggtgcagccggactagcacaacaagtgcgaaaaaaaccgaagtccaccgcgaggactatccgcgcagaagtcgcctaagggtgcagctggactagcacaacaagtgcgaaaaaacccgaagtccaccgcgaggactatccgcgcagaagtcgcctaagggtgcagccggactagcacaacaagtgcgaaaaaaccgaagtccac

SEQ ID NO: 97742 - DNA, 317 bp, Zea Mays
caaggaaaaggcagcgagtggatcggggcacaagtttgtggagagcagtggcagaggtattacaataggaagcacaacaaaaaacacggagatgcgtatagaaagaggctatgtcgaagagggcgaagaatgaagtgggatgactggccgccttggcggggaggcagttcaggaggtaggtgcaatgtggaggccctcagcccagtaacaagcaggaaagaaggcatgaaacaggagggtgcaaatgaggttggtgatggtgtgaatcgtgcgatcggccttgccgttctaaggggaggtgtaaggacacgacatcc

SEQ ID NO: 97743 - DNA, 391 bp, Zea Mays
aggatgaaaaacaaaatcatcgaccagctagttcatacaagggagtagcgctttcccagtcagcatcccacattttcccaatcaatattccaccttgtaaaattcaatttggttctacaaaaaagtatattcaagaaacaattgagcggactccatcataagttgatggcacattgacatatagtcgaagtaaaagcagaaaaaatgtagcacaatcgtaaacttatgcataaagtctcgtgcaaaaaaacatatgcataaagtctcgtgcctgcgcgttgcgacaacatacgaattatttaataaaatgttagtgcataataatttatatataataagaccaaaaaacaggtgccagaagcaccaaactggaacatttggtagaaaaaat

SEQ ID NO: 97744 - DNA, 456 bp, Zea Mays
tttggtgaatttgtccatggcaaccaacacgtgagtgtagcctcactgagatttcttgaatggtccaatcatgtccagtccctagcacgcaaatggccatgttacgggtatgttctgcagttgctgtgctggtaaatgttattgctttgataagaattggcaaacttcactctttgctgtcggccagtagaaaccagacctgaagaccttcccaaccagagttctggatgctgcgtgtatttcgcactgtccggcgtgaatctcatctagcagttgtctcctagtaaccgagggaatgcacttcatgaggactcctattgcaccccttctgtacagtgtgtcccctatgagggtgtaatgggctgactgtcttgcgaggcgttctgctgtggctttatcattcagttcttcttcattctttatatacctgatgataggccccctctagtcattaga

SEQ ID NO: 97745 - DNA, 576 bp, Zea Mays
cgatgttgggagcgaggcggcgaacgctgggcggggcatgcgagaggaggcataggagagggacaggactggatgcgggagggggagccactagttattttggctctggcttctccccaaaaagtggctccaacacctaagtgctcttcattggaagttgttttttggcatcgtttgggaggccgctgtaggagctcgatccggtttaggagccctcccaaacaggctctaagtgcagggctcccatcttggctttcttcccacgctttcttttctcgctcgtttgctcatgaagtcggaatcaataggagacgagccttggggaaaaaggcccaatgattccatagccttgtcgtataaggtcgtgtctctcttcttgtcctcctcaccaacctcctccctacacactagttctccatactatcactgatatcctcctcactacgcccatcctccacaccgctctcggccatcgatctcctctttctccctatgctctatctccacaaaatattgttggccactttctctcaacatttctcacactaccaccaaccttcttgttgtgccaatggc

SEQ ID NO: 97746 - DNA, 788 bp, Zea Mays
ctccactcatcgatcgctacagctcctactgtacgcgcatgcatggtgtgtgagaaagaaacgagagcattggcagcctcgagaggaatctatatatctaggttaaggggacgttaattattatatgacatcatgcgaagttaagatatccattcacataaaaaaaaatgcatcgctaggttttgctttgaccatatggatctatatgcatgcacgagcactgatcagagctcacgtgatgtcgttatttaataatatagcgggctacctctggatctttgtctctcgctcgtcgtcaacttgcaatgtcatgtcaccaacaacaatatatgctgtgttctactccgatccggccgcttgaccatcctacaatggatcggagggcagaaatccgcgagatcgtcggttagccgcacctagatctctttccctgcaaaaaagaagaagtgttatagagcaactccaaaagaacgtgtaaattaaccccaaaacagatattagtcaagaataaagttttttcttactccaacagctcgctaattctttccccaaaaaatttgcgtcccgcatccacagcctactatctctcatattttggtgtgttccattcctccccaatccattcctcaacgtatcggatcatctagagcctcccaacgactgtacagattgtgtcacatgtcatatttagaggaactgttggagtacccatcaagattcactcttaaaactttttagtctactcttaataatcagtttttggggtaaaaattttaacatccttttgg

SEQ ID NO: 97747 - DNA, 563 bp, Zea Mays
catgtacgcgcgtttgcttccatttaaaaatctcaggatctcctgcagtgcatggcaaaggttctgaacttgcaaaaatatgtgaagaaattatcacacaacaggttatgtgaagaaaaggggaaatacagtacttagcattggaatttatttttagaagaaaaaactgtgcttttctgtaatatcatataattcactagtttaaactttgctaaactcacctaactaaattacttccacattcactaaattcatcaaaaaagtgtacctagacttaacatcataaaaaacaacagtttatctttatattactggatgactctatctctcttaaatttaatggacaataatatttggattatctttcattccttatcctttctcccttctccgttgtcctgctgcctttcctccacgcttgtgccgccaccgtcaacccttcgcgtcgcagccaccgtccgcttcttctcaggattatagcgttaacacgagtttaaaggaaaagagagtgtgtcgttagcacgagcttaaaggaaaagagagtgtgtctgttatgcatccaa

SEQ ID NO: 97748 - DNA, 303 bp, Zea Mays
gaaagaggtgcataccagaagcaatttgaatcgttgtggatatgattgaagcatttcgtgtatgtgatgagctttgggtttttttatacctatacgggagcacattgcatccagtgtgtatatggtcgacctcatgaagtcatgtatgccttgcggagtctaccagcgattatgagttgtgatcctggtcttgttaggttactgagtctgaactaggcatatggtcagggatcacgggaggatagagcacctgcaactgaagcgagcaaactgggaactcttcggtgtatgaccagccaccag

SEQ ID NO: 97749 - DNA, 523 bp, Zea Mays
cagctgttattaatgctaacgcatgttcacatccagtcatggtgttatgatcatcctacaaaataaaatattttttagtacattgattttatatattcattacatacaatacttcatgcaagattatatatttatcctttacattctattttatggcatgtaattgaattatcatcttccattccatcgccagcattattattatttatttctccttcctggtacaaataatatgtgaccatgcatactcatgtgttctaaatagtataacatttaaaaaaattgaatcttattacctggttttcctcatcatcactaacatcacatgactcattacatccaatgcctggctctaatcggcatagaacgccatcgagctcatccaacacatccattgccttgtcgtaccctacttttgacatacacgcctggcgaacaactttcattgttttcgttagcaacattttctgtctgtatgatttagtaactccatcctttcccctgaagctcttatcaattcttt

SEQ ID NO: 97750 - DNA, 832 bp, Zea Mays
ctccgataacaaatcctctggaaccatatcctcaagagtctgatcaaaattggccagggacagttcttgcagaccaatgagagcagacaaggcaggagaaggaactcaactactttcaccactagcgatgaactgccgactgtttttccgagtcaaaggaacttcatcctcttcctcctcgtcgtctacattagcaacacaggcagcacccccattgggatcagcaacagatggagcacccacattgggatcagcagcagattgggtacacccattggggtgagcgtcaataaattcagtcacaggcacttcttcagcagcaggaaccgagataccaacgtcccgatccaaactagatactcgccggaggcgtctctttttctttttctgctcatcagcagaaggatcaggttgactggctcggcaaggacgcttcgggcgagtactggcaggcttctgagtatccaaggttgtatcagcctctgggaggggcgccactaccaatgccccagcaggagcagcatcagaagagtcctcagccagcaaatcaagcatagcgcttatctctgcatcactagggttcaggggcacctcaaaatggacctgtagttcatcatcaggaacctccccgagcgaggcaaccaaggcactaacttcttcagcagagggccgcactctaaggcccaaactgccatcagtgacaggtggattcgacacaaaaagagtgaaggctttgggaggaggcaagttccaagctgagtatgccactggggcaccaacatttgacactttgcctctaaggatcatctcaagttggttcaccaagtccaca

SEQ ID NO: 97751 - DNA, 499 bp, Zea Mays
acaaggcacaataagggaggttcagcacgtaagttagtatacgaccatgtgtaatctatttaacagagaaaataggcataaaaacgactagcctgcagacgtgcggatatttgaatataagtgttctgatgggcgagcgcccttgtgctttctctattggctaaaattcttgaaaagcatgtaagcttttcgcaaggttcgttagcagtgactatctgtttgtagtacatgaacattagtattttactttccttagttcacctttcttgtgcttgcaatacaatacattattttttacggtgaatttataaaccatatttggtaagttatgtttatactagcctaatgcactcgactcttatatttagattaagtttggtgaataatttatatgtttgtgtagcgaaagactcatatttatttagtttttttctagtcaaggatagaacataatgtggtgctttgcttgtgtaattatgtctacacacttaaaaatggc

SEQ ID NO: 97752 - DNA, 631 bp, Zea Mays
atcaacctgtcaaaaacagatgattgaggttccctccatgcagggtattgtggtatcccgaatggatatggtggcgcgccccacatctaattcgggatatatggtggcggtggtatgtatgtataatgacatgacatgggtgtatgtggaggtggaagtgtccacgcaggtgcgttatgtcttaattgaacattatgacctcatgtcctttctaattggtgaggtggtccaatcggcctaacctgctgtcgctcctgggtgggtaagcgaggttgctttggtggccggtcactgaggccgaccttctttttcacatatttagacagtaattgatcaaaggtcggactggatttgaccaacccaccagctgcctcgaacatgttaattttccacgtacctatttctggttgtcgtggtttgaaggtacgtggtcgccatgactccttggcgttgctggaccgtctactagaatgacccggactgtctggcgagatcctggactgtccgcgtctgtgtactggaccgtccacgatgcgcagaacaggttcccgcgttcggtcacctatttgcgatgcccccagcgtttgtgatggtaaccttaagagtctccactccatcaggagtcttctcg

SEQ ID NO: 97753 - DNA, 695 bp, Zea Mays
tcagttttccagccagctggccatttggtacgatagctaataactggatatttcgcatctttgtgataagcaaagttatagcagccgaagttatcatgcagcccatcttctctagctttggtctgataatgaagctcgtgtgcccggcaaaaaccttcggcaagcggttctgcccctggctctggagagcccaaatgtagatactaagcctaacaatggcgttaggagttagatggtgaagataaatcccaaatctctccaaaacatctgcgatcatatcatgtaaaggaaatctcaatcctactttaaaaaagcttttaaataccaccacctcatctttttccggcttcggggtaatttcctctccgctgaaacgaatcagcttctttttggcttcactaaaatagccaagcttcaacatcttaggcacatcaccttcaataataatagacttcccaaactctaggtggctcggtttagatagcgtggcaccatattcatcttcatattcatcctctccagcatcaacctgctcagcttcggcagcaggtacaccttcgtcggaagtttcttccggtaccaccagccctgaccgcttcatcactttagaaatgggagtggtctcagcagcttcggcttcatctccctcgcgaccaaccctggcagtggagcgtactctcgccatttgatgatga

SEQ ID NO: 97754 - DNA, 370 bp, Zea Mays
ctgtgtttcacactaagtgcttgacaaaacaaagctaaatttattcttcgtttttaaaaaggatgtccgaaatcacaattcacaaagttgaatttcatatgttaaaatcacaatcgcacttccatccaaggacaaaaacacaacaaccccaatttaatttgtttaggacatgaattgcagcagccctctgagcgttagtacaccataaatcacaattgagatgaggactaccatgtgtcaccattgtcgcctcaagcaccaccaccgaggcatagagagtagtaggggatgttagttaatcagttgaattgtgaaaccgagcgtagagagtagtgccgacaagctgaggcacaacgacgctagatagaca

SEQ ID NO: 97755 - DNA, 530 bp, Zea Mays
caacgatatgaattttgtcctccttgacttttgctataatttggactttaaagcacacaaacaacatcaacatggcagtaactgtgaccaccgcttgaaaaacaatgagcaagacgggcaggagaaaacacatccttcttgtagactctaatagcattaataacacttggaagcataatgagaaaatcaataagcgttttatccttgataatttaatgcttgtgcaatagattgctcgatgtttgcaccatcaagaattgcatcgtattttgttgagattggatttttcgaatgcaattgactcggtctacacggaatcttcagcacaacatctccctttatgcggatgatgtagttgccttcttgaggctggaggagaatgatatcactattatgcttaacattcttaaaccttttggagaggcgtctagacttaaaaccaatattcaaaacagtaatgttttcctatcgttgtagctaggatgaggtggttcgatccaggggctgctcccttgtgaggtatctagttt

SEQ ID NO: 97756 - DNA, 617 bp, Zea Mays
atttagcaaaatggcacattttattccatgccacaagagtgatgacgcttcatatattgctgaattgtttttcaaagaagttgttcgtttacatgggattccacgaaccattgtttctgatcgtgatactaaatttttgagttacttttggaaaactttgtggggaaaacttggaacatgacttctgttctctacaacatgttatccacaaacacatggacagatcgaagttgtgaaccgaacattatcaatgctgatgcgagatatcctcaagaaaaaattaaaactttgggaagaaagtctaccacatgtcgagattacatacaacagagctgtacacatgactactaaattttgtccatttgaaattgtatatggcttcaaacccactgctcccatagatcttttgtcattgcctgtgcaggaacgagtcaactttgacgctagcaagtgagccaagttaatcaagaaccttcatgaaaaagctcgagcaaatattgagaaaatgaccaagaaatatgaaaagcgaacaagggtcgaagaaagatgttgttcgaacaaagagacatggtttgggtacatctacgcaaagaaagattttccgaacaacgcaaaag

SEQ ID NO: 97757 - DNA, 408 bp, Zea Mays
tggctctcgtcactcatcgttgtcgtatatacgtgtagaagcctcggtatttcgattttgggactccgcgtggccggaccagtgaacgccggcgtggccgccgctgtgggtgcgccagcgccgccgctcgggatgttggattggggctgaattggggcgggagtcttaggccattggatcatgatcggtcggctaagattagatagggatcaagagagttgcggccgtaggatcactggatgacggtggtgatcagatgcacgtgtacccgttcgcgctgttaaatccgcaccgtagatctcggatcaggcggacgacatttaactcggtactcattaaatcacgaccgttgattttgatcgggcggtcaccagtcgacgtccctttgcgcgcactgggacctaatcg

SEQ ID NO: 97758 - DNA, 1462 bp, Zea Mays
agggaggtggcttcaagctctttcttctcggatgtcctctttctttagggaagaatagaagatagtcccatctccgatgatgagcccaccgtattgggggaggagaccccacagcgcgaggcgcgccaacatggaaacaggccacgtaacatttggtgtcatcatgaggacgaagaatgggaccctacccagccagtatcctaggatgaggcatccgaagtaggagaaactcctgacgatagggcgtttctcgagcgtcgcaattcctgacgccgtgatcatcgccatgaccaggagcgcgagcgagaaagagaagaacatgatgctagacactcgtgtgacaacccactccttccccagaacttgctacccgactttgcttgtgccctgcacatgtcgagtgaagtcagcagagttctagctcaaatcgccaacagcctgcctcgtaccccggacgcggaaggctactgaaacatccttacctaggcggcaaaccatcttcttccccttgcacattcggatccaaacatgtgccatgtcatcaacagtcagcgatacatgcgaagcaacatcaacgcttcacgcaatcgccggcatgagagtcagataaaaggcggtgggaagaatatgattgggatcacggcgcatcagcatgcagtcatgtgacaaggatggagccagcgacaacctctacaaacagctcagcaccaggccgattggctcaggagaggatgtgctgccctcaacgtaagtcgcctcccagggaccgccatagtgaccacgttcgggaagacagccgggaggcctaagggacgtgctgagtttcagccctttcacccggctttgggcgattcaatgactgcctaacttcaaggtcacaaacgtcgataattttgagctcaagcaagactcaggtggctggttagccgtgtatacgaccaccgcccaggccaccggggcaacagaggatgtcatgatagtgtacctgcccatcgttcttgggtaggactcgttgcagtggctctgacacctaccctaccattacattgatgactaggccgatttttgccaccggtttgtcacgaatttcaaatccctttctaacaagctagcacgatcttgggacctcaaatccgtcaagcgccaaagtgacgagtccctccgctcgttcctgaagcgtttccaaactatgatgaatcgtatccctgatgtcactgaggtcgtattgatctaggacttcaatcgttgatctaatgactcagcttacgtctgagccatcctccagaaagctctaaccacctcggaacaactcttccgagaagcagacatctatatcaccaccgacgagcgggtctaggacctcatcggtcacacaaagcttgcacgccaggcgtcaaagaaggaagggaacctacaactggacaagcgctgggacaagaggccgcatgtcacacccgttttt

SEQ ID NO: 97759 - DNA, 480 bp, Zea Mays
aaacaaatcgagaactgactataagaagttgtgttcagttaattaattaagttgcagtagaatgtcctgacgctagttcgatccatcatgcgcatctagctatgtcccccgacgcatgtttatgcaattattctcttgcgagccgtcacatcccgccatcaacctctgacctgaccagccactagaaacggtggtggtgtgctgtctaaccgtgatcctgttaacccatgactcgcttgggtcaagatccagaacgctacaaaacgtggtgttccgtggtccacggcgaggattgtcccgctgcggcatcaagcatcacgtagtggactcggccgagtcgaaagcgaatgatcagtctttgttggctcacggggacgggaccagattttgaatctgcttggattcaactatgaaattcgaggaaaaaacattgtattatatcatactagtaaattggtcacatcctgcccgactctttca

SEQ ID NO: 97760 - DNA, 333 bp, Zea Mays
ctggccactaggacccctctcgcccgctgcgacagctcggggcccctctacacgctccagcctttctccactggcgcgtctcctgcacccgtgttgctctccacctcttcctccaccacttggcatcgtcgtctcggccatcgaggacccgatgtcatgaccaaactcaccagcagtttagacaatcctcgtagtaggggacattttgagggtctatgccatgcttgtcagctaggccgacatactcgtctcccttaatacttcttctcaggctaagcaggcttttgatttggttcattgtgatctctagacctcccttgtactcagtctttc

SEQ ID NO: 97761 - DNA, 729 bp, Zea Mays
cttcgttctctggctttgacccaattgagaggtgttctacaccttcttccgtacaatgcttcaaatggtgccatctttatgttgctttggtaactgttgttgtaggaaaactcggccaacggtagccacgattgtcatgatcctttcgacgatagcacacaggctcttagcatgtcttcgagaatctgatttatcctctcagtctgtctctatgtttgagggtgataagctgagctatgcacgagcttagtccccatacctttcagtagttgttcccaaagtgagcggtgaattgtgtcccactgtccgacacaatggtttttagaattccatgtagtcgaacaatttctgtgatataaatgtatgcatactttggtggtcaatacgttgttttgacaggcagaaaatgagctgatttggtgagttaatccacaatcacccatattgagtcattgcctttttgagtaataggaagtccagtaatgaaatccatactgatctcctcccatttccatttaggtatatagataatgactgcaataggctagttagcttcatgtggatagccttgactctgcaacagttatcacatctcgcaacgtatgctgcaatctctttcttcatctttgtccaccaaaactttgattttaaatcacagtacattttgctgcttccggggtgaaccgatagtttggattggtgagcttcatcgaggattttggtccagag

SEQ ID NO: 97762 - DNA, 405 bp, Zea Mays
tggggaaagaatctatcttaagaagcaatcgaaggtattatactgttgaaagctgaaacaacacagtatcaaatcttaaaggtactattcaaattggagtgtgaaatgacacggtatcaaatctcaaggcatataaatacagttgaagcagtatggtatcgaattctcccaccaatagtgagcctacatttgatggcgtcatgaaatttcgtcttcatagtatgacaggatcattccctataaattatccctgtgtgttcacagatccaaacaagagatttgcgaagtagtacatctggcgagttcaagtcgattataacaacttaacatccacatatccaacaaaacaatcaacataaggacaggctgaacagcagtaaaaaccaacagacagttgaagacaaa

SEQ ID NO: 97763 - DNA, 380 bp, Zea Mays
ccaaaatattctgacgaatttcctgaaccttttcagaagtctgctgaacccaatcaggaccaaccagggatctctctcccaaagtctcccagcacagaggagagatacaccgcctgccatacaaagcctcaaatggtgccatcttgatgctagcctggtagctgttgttataagcaaactctaccagtgcaagatgatcctcccagctacccttccatgacagaacacaagaacgcaacatatcttccaaggtttggattgttcgctctgactgaccatcagtctgagggtgaaaagcgacactaagcgaaagcttggtgcccaatgcactatgaagactctcccagaatttggatacaaatttggagtctcgatcagaa

SEQ ID NO: 97764 - DNA, 291 bp, Zea Mays
ggatttgattcactctttctgtctgaccatctgtctgcggatggtatgctgagcttcttattgcacgggtcccaagtgattcttggagctgctcccaaaagcgtgccacaaacagtgctcccctgtcagacacaatggtcttcggaattccaggcaaacgcactatttgatcaatatagatttctgcatatttctctgtcttgtgggtggtatgcattggcaagaaatgagctgtcttggtcaacctatccatgatgatccaaatagaatcatggtgtcgggcggtattgg

SEQ ID NO: 97765 - DNA, 640 bp, Zea Mays
tcggacagcagatcctcagggaccatatctttgagagtctgatcaaaatttgccagagactattcttgcagaccaacaagagcagacaaagctggagaaggaacaccactactctccaaactggctatgtaacgacgactgttcttccgaattaaggggatttcctcctcctcttcctcatcctcatcaataatacgaacaacacacccattgggatcagctctggccggattgcacccattgggttcagcatcatcaaggttacacccattggggtcagcgtcagccgggtcacacccattgggatcatcaacagtaaaaatctccacctgcacttcctcggcagcaggagcagaagggtcggcatcctgattcaagcatgacactcgccgaagccatctctttttctttttcttccccttagcaggagaagctagatgactggccggtcgaggacgcttcggacgagtgctatcagatctttgaatgtccaaggtctttctaggctctgggataggtgctacagctagtgtttcagcagggaccgaatcagaggaatcctcagccaacatgtccagcatagcacttatttctgcgtcactcgggtttataggcatctcaaaatgaacctgcctctcgt

SEQ ID NO: 97766 - DNA, 1023 bp, Zea Mays
caaaaatacagtcgagcgtatcgcaaggcagtcagctcactatacgctcattggggacacgctatacagaaggggcacgtcaggagtcctcatgaagtgtattccttcagataccggaaagcaacttctagacaaggtccatgctgggcaatgtggagtgcatgcagcatccaggaccatggttgggaaggtctttaggtcgggtttttactggccaacaacaaaaagtgatgcagccaagttagttcagaggtgcgaggcctgccaatacttgtcaaaacagtagcatctaccggcgcagcaactacaaaccatacctgtaacttggccatttgtgtgctgcagattggatatgattggacctttcaaaaaagctcaagggggatacactcatgtactggttgctattgacaagttcactaagtggatagaattcaaacccattgcttccttgacttcagctaaggcagtggaattcatacaagacatagtattcaggtttggaataccgaacaacatcataactgacctaggatccaacttcacaagcttagagttctttgacttctgcgagcaaaagggcattcagatcaaatatgcctccgtggcacacccgagagccaacgggcaggtagaaagagccaaagggatgattttagaggcgctcagaaagaaagttttcgacaaaaatgaaaagttcgcaggaaagtggatcagggaattgccatacgtcgtttggagcctgagaactcaacctagtcgagccctgcatggaaacactcctttctttatggtctatggttcggaggcagtgctacctgccgatctcaagtttggagcaccaaggttgatctttgaaaacatagcagaagctaaagctactaggctagaggatgttgatgtactcgaagaagaacgactaaacacgatgattcaatcagcacggtatcaacaaactctgaggcgctatcacgataaggccatacgacatcgatccttcgcagtgggagatctcgtcctccg

SEQ ID NO: 97767 - DNA, 587 bp, Zea Mays
gcatggactatctggtttcatgtcgcattggggcctagtttctccgaagattaaactcaaagggctttgaaccagcttctccttcttctcatccactttaacataaaaccattcagtcttccagccagctggccatttggtacgatagctaataactggatatttcgcgtctttgcgataagcaaaattatagcagccgaagttatcatgcagcccatcttctctagctttggtctgataatgaagctcgtgtgcctggcaaaagccttcggcaagcggttctgccccttggctccggagagcccaaatgcagatactaagcctaacgatggcgttaggagttagctggtgaagataaatcccaaatctctccaaaacatctgcgatcatatcatgtaaaggaaatctcaatcctgctttaaaaaagcttctaaataccaccacctcattttttttctggcttcggggtaatttcctctccgccgaaacgaatcagcttctttttggcttcactaaaatagccaagcttcaacatcttaggcacatcaccttcagtaatagtagacttcccaaactctaggtggctc

SEQ ID NO: 97768 - DNA, 732 bp, Zea Mays
ggaattcagcagacttcggccgaggacggttcgaatccgatctgtattatgctatcacacaaatatcacgggaggccgtagaggtgttgtgatgtgtttctttggagcactcactgcccatttgatctttgtagttgatttggggatcggaggcttcttgatttatgttgtagggactattctcttaattagtatgtgatttggtcaagaggtgtggaaacccatattctcatattcccgttgttggtaggttaattgcgatgattcattgataaaaaagaactcagtttttaaagtcattgtggtcgaaagacctagttcttatatagttcactgctggatgctttcttgtatcattccataggcctgtttggatacacgaactatttactagctagctaaaaattagccttagtgcatccaagtaagaaaactaatagcttagtaataggtgagcttattctttagctaagttttcaactagttgttagccaactagctattcaaactcagctaatttgagctaatttttagcccgaccagtaactacccctagctcatccaaacagaccgtaagtgggtatcaaagaggttctatcttccacctctaaaaacagaagcagctatcaattcttgttccctgggtaactctgcaaaacaaagttgcttataattgtggccatcgttttataatcagtgcaaaaggtgatgtctttagcaacattcttgctg

SEQ ID NO: 97769 - DNA, 339 bp, Zea Mays
aggaggggcagcaggggcagcactggaactccccacctcatgatcatgtgagcgaggtggcacaggaagcagtggcgggatcccaaggtcatcatcatcacctgaagaggtgtcagaagctgtaccctaggtctcgaactgtcggaacgcctcatcctcagcctgaatatctggcactgggactgggtcctcaggggttggacgatatgaaccaaactagaggcgagaggcctcgagggtgccctggaactgaggcagcctaatcagctgcgcgaagatgtgacagaggtaatgcgcatacggtagctgacggtgagcatgaagaccatccaaaattgt

SEQ ID NO: 97770 - DNA, 1279 bp, Zea Mays
ccgttgtttacgtgtcgtttctcatccatggacttgctcttcccatctctccttttttccgcggtctcctcgatttctatgatttgaatctgacacacttaaaccctaactctattcttcaagttgccatttttgtacatctgtgcgaggcttttcttggaattctcccccatttcggactctagaggtacctctatcactgtcggctcgagatggctagagggcagcatcagctcatcagcggcgcaagtttagaacttcgtcgggggagaaaagtggaatacttcgatatccccgtcaaggacaccattaagggatggcgtctcgagtggttcaccatggagaatcacgacaaatccctccccctcggtcaagaaggcaaccagatgttcgcacgcctagctgggtggagtctcccacttttttagaggtagccgaagccaaagtgctgctcgctaaaatctgctcattgaaggataggggtctgaccgttgaggccgtggtcgcagactttgtcttcaagaacattcaacctttgaaggacaaagtttatcatgcttatttgtataccgacatcaatgattccacccgggtcacaaacaaatagattcccaatgaggacttgctgagtcgactagatatgatactgaggggcagggtctcgaatgctggtgctcccttagcttactctgcgtggaacctgcctccaaaaaggcccttctctaaatttgtctccaatcgtcctgctcgtgatggtagcctgggccatagagtgcggtcctcccctaaggaaattgaagccttgattgctccactttgaaatcttcccgaggctgagaggcaaactcatttcgagatgccatctagcaccgatgatgctgagatggacgctgtgcttagcctgctggccggttaatcgtctcactctacctgtatcgagccaatgggcattgaaactggacaagagtttggcgaggatgtggaaatccagaaacccgaaggtgcccgccagaagcgttcacgccgagtgaaccgcctagcagcacctgttgaggagaagaagaagaaaaggtgactccagcgactgttgtgcctggatcaagatgctagcccttctgcaatattccttggtgatgtcctggtagacgccattcccaaggtcaatgctgaaggttgtgatgatgctcaggctgctggcggtgtgtttgaaaaggttgaagaggaggaagaagaagaaattccgttgatccacaagaacagccgtcactacagaggaagc

SEQ ID NO: 97771 - DNA, 691 bp, Zea Mays
ttcttgtatttcagatctatgcatctctgcttgagtggacagtttagcttcactggattttaacctttcgatcaaagagaacagaattttatctttttcaagagcttcgttcctcaaagttataacatctgatcgaaggtttccaatcgctatctggtagcttttgtcctctgcatctttttgagctttcagagctttactaagaattagacactaccaaacagaataatgaacaaacaataacagtaagaattgccacaaaaatagtttactataacgaaagttaccaaatacgaagccaaaacgaacaaaccttcaagctgttgtaggcaaggctgtctgcaagttaatccttcgtcatatcagacaaaccaagctcaagcttcggataccccatgttatccatcatctcttggtaaacattgatctctttactgttaggtagacaataaaggaagtcatcctcactgtctcctccataaaccaaggacccttgcgggtatttcaactccttggcatagtgttgcacttcgacaatttgttctaatgataactgccttcccgaaacgtgtcgaacaatgtattccaaatcaccctggggaggtgcttaaggagcaggcaatgtggactttttcgaaagactttcttccatcagccttactggtgtagcccccgaaggtatggcctcagc

SEQ ID NO: 97772 - DNA, 371 bp, Zea Mays
aatactcacattagcagaggcgacagtgcagttgtacgccatggaggaggagctatagccgccatcgatatcggtccatcacaacgacaagctctacctcatagaagcatgcatgcgagtgacagcacacatggtggctctagctgtcatgatggtagaagcagccatacgagaggacacagaggtaactcgaacacatcatcttcttcatctgggcaggaggaggaaccaagatcgataatgaccaatgcatgaagtgtgggaaaattgggcattaggctcgtgaataatggccctggcccaagaccaagaaggagcaaatgaacgtggttcaagagtaggagacattgatgttgatgagaatcgcacat

SEQ ID NO: 97773 - DNA, 733 bp, Zea Mays
gccaattaacttattagctacatcaaagaacctatttgtaagtacttttgtaaaaaaaattaaaacttacattcagtaaacatatatgcttatactgctgaatggttaaagcatccttgcattttggaagtagaataatcgttccgaaattaagattatataagggaaggtttcccgcatgaaatttctcgaataaagccataagttcaatcttgattaggtcccaaaaggcttggaaaaactcaaccggggaagccatcagggtctggcgccttattatgctgcatccagaaaatcgctttcctaatttcatcttcaatgaactcagaagtaaggtaagaattttcctccgctaagacctgggggatatcatgaaccaggctctcgtctagagtaatctcagaagtcggtgtcggtccaaacaacaccttgcagtaagaagtgatatgcctcttaagtttgacgtcaccttcaaccacttcattcatgttcctgaactggaaaattctagactttctatgccttccacttgtgatcaaatgaaaatatcttatgttggcagcaccctggagcaaatgagtcgattttgctcgttgatactacttaatctcttcctccctcaacaactcacctaatctattttgaaggcactgctttaaatctaactcgtgtgccaacaagctgtcatactccgccttcttatctaacgaataaaacttatttaaaatattct

SEQ ID NO: 97774 - DNA, 503 bp, Zea Mays
aagcgaggggataacttgcctttaactttgaatctcctcatcccatgaaatggtgacacctttaagtacacgtacgtggtcaccctcttcgaattctagtggtcttcttcggttatccgcatatctcttatgtcgagtctgtgctatcctcaggttctctcggatcatacaaacttgttcttcggtctcttgaataattttagacccaaagaactgtcgttcaccagtctgatcccaatatagaggagttctgcactttctgccatataatgcttcaaatggtgacatcttcagactggcctagtaactattattataagagaactcagcatatggtagactcttgtcccaactgcctccatgcttaagggcacaagctctcaacatatcctcaagtacttggttagttctctcagtctggccattagtttggggatgataggccgaactgaagttcaactttgtatccatgttctcatgaaggctgttccaaaatcttgagg

SEQ ID NO: 97775 - DNA, 1170 bp, Zea Mays
cctaattattccgatatgcactggtgcctctgcctaataattgatccattgattcaacaataaacaaaaatacgagttgcctgattctatgtgaaaaagagagtcaagcaggtgtacatgaaatgaggtttatgcttgaaaggttcagtccatattgtagtttcaaattttgagttactagttgaatctatcactaatgggaagccattttttattttcccttctgtcatactctgcaattccaagatgtagtttggtaatgcttgtcttcaggaatatgcttgattgcttgtgttatacttaattatgttgatgacatagtgtttccaccaggattgctttttcgtgtctgtggtcatcagaaatatgccagagctgcatgataaaccagtagcagtttgccattcggacaatcctaaaggaacagcagaaatatcgtctgcaaactatcctgctcgaaactatggtgctgctattttattttccattaattgagacttataatttagttatgtgaacacatttgaagagataaaggctggcatcctcattggtgcattccagggataaaggctggcatgtttgttagagatgctaaagctcggtgccctcacctaatgatcgttccttataactttgatgcatatgaggaggtatatattttttaagaattctagatagtccatttgatggctaactcaacttttacttttgttgagtaattgagtttgagaatctgagtgactgaaattcttgtaggttgctgatcagttctatggtactttgcacaaacattgcagtaaggttcaggtaagattatccatgctggagacatcatatcttcattggtgatacatccccatagtttgattattagagatctacatctacagtactgacaatgttatcaacaattcaggctttgagttgtgatgaagcttttttggatatgactgaatgcttacatgacaatcctgaggaagtaacacagagaataagaagtgagatttttcatgcaacaaagtgtactgctagtgcaggaattgctgaaaacatgctcctagctcgattggctactagatctgcaaagccgaatggacaatgctttattccatccgaaaaggtatatgtatgctgttgctaatggacatgctcctaactgtgtgtgtg

SEQ ID NO: 97776 - DNA, 686 bp, Zea Mays
ctacgctctttggcagggggaacggggtcctcttgcaacaccggagaagagggctggaggaaggaggaagatagggtcggaggatgtgaaactaaaaaagagaggaagaagaggggggactgaaaccaaacgaacttacaaattccacaaagcccacctcatgatgcattggagggaaacctggggttgaaatacatatggaacgatgaccccattttcacccttatgaacttctatggccttcatgagccagcgagcgatcttcgcatcattgggaagcggagcgctcaacggactgacatctgacgaggcctcggcggtcatcttaaaaagcgacaaccgtttgtccatgagaggaggcaccccctgatggaggtaattctcaatcatgcccgctagcatgaccccgcgatcgcgaagaattgccacaatcgtaatggcctcgagtgtccttttctcttcttcctttgggacaccccacatccagctttgaggagtctcacagggtgcctaagaaagaaaagcaggaaggccatggccggtagcggatggagccccatggttgcacaggtaaaaccactagccacaacgccccttgttggaggaacataaccgcagggggatgtaccctttggatcgtgacccccgcaagtggatggccgcgcacctgatttaggtcaccctcg

SEQ ID NO: 97777 - DNA, 1603 bp, Zea Mays
gccaagaattcatttttatctgggaaaatcaccatataactagcttttgatgaagcaaatgatgataactgcttggcaagaacgaaataatactggtatccgcctaggatccatcttcaacaacagatattactgctctcatacgaagaaatcatcaggagtagagaggatacaacatgtctctacaagatcttcatatttctatcacaaattatcatcactagtagtctagtggtcaagacatatgactcttctggctccgaggaccaagaacatgttaatgtctaatttagcttcaagctctgtggtgatatgggatttcatagctagtttatactcttcttactcctagtagatcagagatagattacggtaagcatttcaaaggtgaaatccaatgtagttctgctacataaagtccaggtatatgtccattcaggaccgacctttaccatttagcttaaagctataccataccaatcaaagaactataccaagtcaattcagtgactataagtatttacaattctgagagatgtatgcaacacaagcatagaggtcctagataggacgagtaaagtggttcgacgggaacacacaatggtttttcacacaaacattgtgaaaaaattctcagaattacctttcgatgtactcgcaacttcgtgttgctaaggtactagacatttatctcaaagttcgcttcatgccgttcagcgacaaatagcaatgtgccaacatctggttgagcaatgtatgactgagattctagcatttattcatctgataaggtcttattgcttactaataaaatcccaatttgtgatgttttctgcgccaaaaaggctttcatgcattatatatcttcggtttacttcggataaaacttttatgcatgaggagagagagcaaaaaaaattaacttatctgtgttgtattgtatttcaatttattttcccagaatattcaagcactatagagcttgatatagttgttatggccacttggcaatataaataaatatatgatgccacacaaaacaatcaaaaaaaaataaagttaaacaacattatttacgaaggttgcgctatgctgtgacttcagggactcgaataatccaccacattccacgcgagtacaagctccagcgtatctggcgtcaacgtgtgtgtgaccatcaaggctacaacaatgaataagcctccgtaacaagcgcaacaggcgcaattgtggcttgatagtcggggtacaggataagtccacgcaactcggtgatggcggtccgactcaacgggagtggtccgactaagtgagagtacaacatagcaatcacatgacgcagccaagttcatacgacacaaataacgtgtcgtgttgccagggcgcaaccaatgctcgccaatgccataactcaaccgattaagaacaaagtctggtcgacatgtttgagtacccactatatagtttaatcgctcgatatgagtccaaaagctcaacataatataaatatttagagcaatttaaatatacacaatatagagtttacatgcattttaatatttttctgctaaatatctaccacgataaataaaagcagaaaaat

SEQ ID NO: 97778 - DNA, 388 bp, Zea Mays
gttaacaaacaatggagccccgtctaaaccttacaagatcaacacatttcaattgacccttgacccttgcaaacaatcctgcctcatgctcccgcctcgaccgacccctgaccccaaggggcgagggtggggtgggctatccccaagacccctacttgcctgacccttggccgcataaggggtcagagtatgaagccatgtcccgtaatgtccacatcgcctgatctaggggttgagggttgcgcctgatccatcgaatatggaattcacaaggttgcaccaatgaccattccaggtaagggtatgtgtgggtcagcctctaacacgagagtgtggacaagggggttggaatgttagtatgccggcccctaccaccacagaatggtcc

SEQ ID NO: 97779 - DNA, 616 bp, Zea Mays
tttcatcacacccattcatcgcctatatgcgcactaattcatttcttgcgacacatgcactcaaaatcaatccacactacacaaaatacacttatctcttatttatgcgcagacttaacacctttcgggataaagcgtcactataaacaccttacacatatttgccttaggaacctattagttcactcgaagacatctattcaagtcataaacacaatcatacacttatttgtgaagcacaatttaaggaacgtctaacgcatatagactcaacttataattatagaggaagtgatgactacttacgacatgtcatcacctctctacttaagccgagacaatttctacctacaacgaccaaacatttatgtcgagcacactttattttatcctgtctcgtatacaaccatattgtggcatgcacccgagacattaccgtttaatttaacgcaatcactactacaacgcattttgatacgcacgttcgacagcacagtgctcagacaacccacacttccaatttacttatcacatccaaccaacaccacgtttgataacacacctttctaactaaacatacctcgtctttcaaacacccatcatatgtcacataatt

SEQ ID NO: 97780 - DNA, 490 bp, Zea Mays
cgtaacataagtcttaagatagctaacataaatgtccattaaccaacaagggtaacagaacaatttaggacattcatgctatactagtaacagaacccatatagcgttcacatatagccatcagttatcagacatacataacacaagcatgagttattgaatagaactggtcaacatatagcaggttcaataatttggcaaagtcatcactaacacaagtagagaattataaaaatgataataaacattattaagagatcaagtccacaacttgcacgacgaagaagttctctttgacctttcagcttctccacaaagttacaggaagttctctttgacccatgatttgaaccggttttgcatgtaaagtttcacattccattagtgaatgtgataggtgacttctcatcttgctatcagctccaacgcccaggaaacaatacagtccatctgatattcactcttataatcgatagaaacaggatcattt

SEQ ID NO: 97781 - DNA, 935 bp, Zea Mays
tcagctcctattcacttaaaaattgtcgcgttctagagacttgaattattttaacaccttaccatttgttaaagttgaaacaatcaaattagaaccaacaagtagacttactaattttatacaattcattttttttgcactagaattgccatacacaattagcaacgcatctaccacaataatcttacccggcatatatgtgtttatcgatgcgctcttcacatagtaatttgcagtttaacttgggcatcacatgaacactactaatttttacccgcgactgtaaccatgcgcatttagactacaacaagcaatttatcgcgattacgtgcttaactaaagccgtccaacgattcggctaactagagtaacgacatagcccgctaaataacatacacgtcggctagtccattgttaccacaatccaagacacaacatatactacaacgtttttataaacatatatattcacaagtatttttgcacaccgaccaaagcatacgaatcgtaaaccaccaatatccaaatcgaaatcaccatgcatttacttcccaaaccatgaacacataacgtgtatcgaccggactctagatatagaggaagcgatgactacttacggcatgtcatcacctcactatataagccaaaataatttctgctatcgactaagagttctaagtaataaacacattattattttccacacacaaataaacctcaactaaacaccagtgacaccgatggatttttactaaactcatcgtgcgcataaccctgtctcgcatacaaccatattgtggcgtgcactcgagatacttcgatcaatgtggcgcggccactaatatataaactccgacactcatgtcttaacaatacatcctctacgcaaactagcattttctaaactactcgtcacattaataaatatactcccg

SEQ ID NO: 97782 - DNA, 561 bp, Zea Mays
gacgacagctgacaaactctagaaacccagggacttcattgtaaaattctggacctgactttaacagttttggaacccgaggggatggcaggtttattttaagattcaccgagggctctttagtaaaaggtatgcggttgaaggtgtatccttttatttgtgtcgtctgatcattctctgacgaccacgattagatcaagtcttctgcgaaccggtattcaatcgtaccccttggattcgaaatcgacgctgcggatttaaaatcaatgactcgcttcccaaccgctcgatccagactgaacgatgggggccgctgcttctcacctagtggtgtcggtaggggatatggaggtggtattggtggatggtggccggggctggatcatggcacaacaacgttgttgggaggtgcggacgggggcgtagcgcgccggaggccaggccagtgtgggagtctgacaaatggagaacacaccggtgtcggaggactcatataagtttgatttcaaataaattgcaaatccaagttgattctacacattaccaattaatgtacacaca

SEQ ID NO: 97783 - DNA, 402 bp, Zea Mays
gatgtgtgtaccagtttatgcaaatatagtttgcacacgatccggctatccgggcccacgagaagattgtgctcccgcaatctggacattcgtactagtccccacacaaatattggtattacgatgttatatgttttagtttacgaaacagtaatgcacgtgtcgatctatgggccatcgcgaagatttcgtcctgcatattacgtgcatcgggcccacgatcccacccactcgctcgcagttatccagtttacctcacccgcaacgcacgcggcgacggaaccctagacatacccgctgtcgttgccttcatcttctccaccgccgtctctaccatccccctccccatccaataactgcctcacgcatcttcctcctctcacctgtgtacgccgaatcgcc

SEQ ID NO: 97784 - DNA, 529 bp, Zea Mays
aggaccaccggagccagaatggccgaaggtggcaaaaactactgcaataactcccaagaggaggggaatggcaagcgtgctggatgctgtcatggagacggcaagggcattaactcctacccctgtgaagaaggttgccgaggctgctacagcccacgctgaaactgaagctgggccctcagtgcccgctgaggcagagcatgctgaaactgagcagagagctgagcaagaatctttagatgctggcctgattctagaaaagaaagttgtgcccgcaaaagctaaatctgctattcccgaagcaccctccgaagattgtgactttatcattcgacatgcttcaggaaaaaggttgtctgaagaagaaattgcggaagccaaacactacgcccgagaactgaaatacccgaagggggccttggtgtacaatggcaccgatgaagataatttcttatattgtctcccagataacaaagagatatccgtttgccgggagatggccaaaaatataggatttccgaagcttgaa

SEQ ID NO: 97785 - DNA, 556 bp, Zea Mays
atttgggcaccgggggcatctaggagtgtggctgtcggtgtgctccaccgtgtggcatgcggtgccgccgcgcttggcagccaagggaagaagagagacaggagccgtccattcagtgttggacggacgagattagattgaggctatgccgttggttcgagattgggcgtatgggattccatctgagcattttaaatcctgaacgttgatgttagatcgggtggccagggtggcgtacccgtttggtgtcaacctaatataatataggcgcttgaatagacatccaatggccaggattaaagcgtaccccttgggcggtctccaattgcaaaagaatccctgtgtttagaaagaactaacccgccacccatgctagtgtagggaatcctacagaccagtcctaaaatttttgcaaaagcccttgagttctcatgtattagtggccacaatccagatactttattaaatagatctgaaattgatttttagtataaatataaaccttgaaacttgtaaaattcataactaattcgctctaactccaattagttctgtt

SEQ ID NO: 97786 - DNA, 546 bp, Zea Mays
ggcagatctttttagtaacaggactcaggagtccttccgagcacagttgtcagcgcagatcggcctacgagcgcaccagctattggatctacctgcctttctgctagcagccggtgccaattcagaggtgcatctctcctatctgccaggtcttctttctctactgactatgagtggtagatacattgaggagtgggtctgagtattttatgctatcgtatggattggcccggaccatcagtggatgaggttccgtttcgagcgagaggatgtcacattacatgccagccagatacgatagctgtttggatttccagagtcgtcaactcatcttcatagtctgtgctatggtacattagatcctcctcgtcgccctcatgtcagagtttctctagccactgctcatgtagcggccctgttcagacctcctttcatagatgggtcgcgacgctctccagctgacttcacccctgcagtgaagtatctatatcaggtgatgagacagacactgctgcccaggatgggttacagagaggccaccacgca

SEQ ID NO: 97787 - DNA, 434 bp, Zea Mays
ctgtaacactctgcatgcggaaatgcacatgttatatgacttgctgcatccgaatgtaccacctgaatttgcaacaatgggagccataacatctggagcagctagtggaggacttgatgaggagttggatctttttagagcccctccttccatgaacctcgcagatgaacgttctcccgaagctggcagtggagcaggagcggccaaggacgaagataattagagtagtgtagtataagtagtctccttatgtaaattaactaaggaagttgagttgtactaatgagtatgtataattagtactagcataatgtaataaagatggtgtactttcgacatgtaataattcagtatattgtttttcctcagattccatcaagaacacgtgctcaagatggggcgggaacttcccatggcggggaggaaactccaaa

SEQ ID NO: 97788 - DNA, 763 bp, Zea Mays
tgggggcagatattgccagagacattcttcagctccttccattccacagcgtgccaccgccttgcaacttgcaagctacaagttctcctactctgcaccttagccggttctggagcttgctgacgacgctgttttttttttttttgccccctgctgtgacactcgttgacgttttttatttttagaaggttcgctgggctaaggacgtgatcgatggggtacgtagctactggtgcattaatcaagtaacacacaaaagtatccgcgcatttcggcatcggaaggaagtagtagtagtagtaggtggtggcctcgcccactggcgcaacaagtcaagacaggtatgcatggatgggatgttccggccggccggggagtggacttcccttcttctttgaggctgagggggggatcggttctctctgtactgctggcaggacaaaacgatgacaggaaacgacggctgtgccagccaaaggcgctgctcccctttctgctttggttgctctaacgacctagctaaccaccacgcacgtagtcgtactcagcaaatgcgctggaccgcctggtgggtttcatttggatcaatcagtcgaaaattcgaagcggactcacgcatgcaggctgcacggaacggccacacactgcgcatgcacagagagagatgcttgacgacgatcacatggaatggaagcaatcactgtggtgtggacagcgtcgaagtaaaaccgtgtgtcagtaacactcgtgcggaagagtggtc

SEQ ID NO: 97789 - DNA, 659 bp, Zea Mays
ccctttggatggggacataaacttagcgcgatgattagaaaggattcatcggctgtaccagacactgagagcaaagatttctattgaactataaagcttgctcccatggacgaacataataatagccaactcaattatgcataagttcgagtattggttgtactaaaaaatgaatatttttacttgaaattattcagcaatattgattatgaagtttgcaattaaacaataaccgaatagtgataagaaaatattataagcatgttcatctcatgaataaacatgactgaagcaaattgtagcaagaatcattactaccaacaactgaaatacttcggctttatgtaagcagcagcatatcacaactatccatatgcataataattcggttgcaatcctccataatataaagacgcatatggagcaaaatgatgccataaacgataaccgaacgtaccttgggacgacgtatatggcatagctgaagaatatggacgatgcaatgaccaatagctttgttgagctggggcaaacctttcacccaaccgtcttgtacttgctttcttttttgtgtttgcctttgctccacttcttccaaaagcatcatccttacctggatcttgagaacttccattagatgcccatgtcatgcctcccat

SEQ ID NO: 97790 - DNA, 436 bp, Zea Mays
aaaagttgatcttcggtgcgtggatgtgggaaaatggttgtgggccgttggaagttcggagtccgcagatgtgaagatctcatttaaacgatatcatttgagtattcatttgtctgaatcagggcatggatgggggatttggttgtgagccgtcggtttcgcatcaagggcatcgtttcctcctcttctcaaaaaccatagccgcccctccccttccctcatttttgcagcagccgccccccttcttccccattgcagtcgctcctctcctacccaaggtgctgcacccacctccctctaaactctagtcgccccctagttcctcctttggtgtgctgcattctccattggtggattggtgggaggaagaagaaagaaagaaaaggagtccaaggtgatattgttttccttttggtaattgtgctgcaattttgtt

SEQ ID NO: 97791 - DNA, 303 bp, Zea Mays
tatgtttttttctcaagttagtcactattttttccacactgctaaagaccaaatttcattaccaaagcaacaaaattacagagttttagcgagtagcaaagatgaatatgaaaacgagaaactaaacccagcatgcccatgaagttgataacagagggatccgccccaagaatggaaactaccgctacgactgatgtgaaatgcagcaacgaccaaaaggtcacccaaggccactctcaggagttccatacagagctccagcccagacggcatgcaggcccagaaacgatgctaccaacaaac

SEQ ID NO: 97792 - DNA, 336 bp, Zea Mays
gtcgttttctccttgtccatccaggaagcaacaccatgcacagtgcactgtctgcgtaaccagttgtccttgtataatacgctcgctatgccccattggctaaaacctgtttgagtcttctgtatgaatgagtttattcgtgcctataggctataattgagaggccaactacccgggatcgcttgagcctgggtgctctgctcgcaggttgttttctcctaatacatctactaaagcaacaccacgtacaacacactgcacactgtctatcatagtaaccagttttctcttgcctaggaggctaggataacaaaaaagatcaatttcttaaaaatg

SEQ ID NO: 97793 - DNA, 680 bp, Zea Mays
aaatattgtacatttttttaaaactccaaaacttgatgtataaatgtcaaataactttttttctggaatacgcaggagagcttcgcatctttgtattaatagaagaataagaaaggggggagagaaccccattacagcacacacaccgctagagactaactaaggatcaccgactaacatggaggaaacacgacccacaacgctgttttaagccagcaactcatcgacttggaggaaggacagggccttggctctagtcaaggaccagagcaccgcctcttccctagccaccataagggctgtgaccaagctaggattacaaccataaaaaacacatctattcctatgcttccaaatggtccaagcacctaggatcactaaagaattgaaaccttttctcaaaagatcagatgcccgagagctgctagacttccaccacgactcaaaggaatcctcatgagctggacacagctcctgcagccccactgaactaaggaaatcaaactagaactgcttggcaataacacatttgaccagcaaatgatttatggtttcagcctcttggtcgcacaaatgtcaaataactcacttgaattataacaccgcttgacacattattaaggtggaatatatggccgttgtctgtcgggttatgcagggcagtgttttcgagtcaagaa

SEQ ID NO: 97794 - DNA, 467 bp, Zea Mays
acttgtagcaacaggagtctgaataatgccttttatatcagcccgcgcattcatgtcattcttcatataaaaccactccttcgcccattcattcgtccacttgcttcgacatgcaagagccagaaacattgagccccttcgataagcaaagttatagcaaccaaagctgttatggaggcctctagtcgctttcgtccgtaagtgtagctcctgaatttgactaaaggcttcgtagaaagctttggcatcaagttccaccccttgactccgaacagaccgaatgaaaatttctagacgcactatagcgtttggggtgagctgatgaaggtaaatgttaaaacttttcaaaactacgactatcgtcttatgtagaggaaatctaaggccaaccttcagaaagctttgaaacacgacaactttgtcttgctttagattggcactaagtcatcacctcctaatcgcacccg

SEQ ID NO: 97795 - DNA, 573 bp, Zea Mays
atcacttctccttcgtcgttgaaggggaagtcaagactcccaaaatggatcaccatttcgggaggtcggttgtcgtcgcagcttgccatctggagcttggatgatctcatcgcggaacacgcaagttccctccctggtgcgccaactatcggtgtttcgtaccttgcttcgacaagtaaatttattgtgtgcattctaggcttcagagggtgtgcacggagggagcaagatttatactggtttgggtagaacgtctctacatccagtcgtcagtggcttgcatgaccggcaccattgatgatcaaactagtagtaggggttataagcagttgagagagggaggagaggctcccagatcccttatctggggtggaagtggagcttagaagctataaggtggagtcctagctaagtattggcttagcgggccttcggcctcctggtcctcgcaggtgctcctcctcctgttcatccttgtgggctcgtctccgcctgaaggcgtttggtcatccctcactccgtccttccgttccttgattcgtcgatcttgctttgtctgtcccctgttttgag

SEQ ID NO: 97796 - DNA, 716 bp, Zea Mays
cacattcagtgctgagaaaacatcctatttggtactatcatgtgaacctactgaaagagggcaggggcttaagaagaaaatagttaaactcaacttatgttgggtggggctgagggttattcagtaattccaagctagacattgcctgaagttacacaaagttttcaataatcaaaactcataagatgttacacattatcagtctgcaacagtgaaactaacttcaaaactacaaaactcaattttaacttcaattaggagtaatgagttctcagctataatggatcagcctatagcagtagtctataaattcaatgattcacacaaattaggctaaaataaattacattagaatcaaggtatgccaattcaagagtagtataggtaaagcactggtgacgcaaagatgctaataaataaactgaaaccaggcagtcaagtacgatacaagcagtcaaaacttcaagtgattcacaaaattatcttcacaaattggtagagttctctttctatgcacaacgtggtgagtggggtacagcgacggatcagacgagctgagaatcgaacacacgcaaagcagaggaggcaggaaggggaaccccaacatagctggtagtggtaggtacctcgggagcaagagtagggggcgtggtcgtccgtcgcccgcttacgctaactgggagggggaggagcgtgacctgtggctgggattcgaa

SEQ ID NO: 97797 - DNA, 471 bp, Zea Mays
ggttgtttatcaataggctctgaaggcccgacttcgacgctagcttggctcactgcaccttcaacttcggccggtcttgtttcagcttcgatctgtaatttcgaagcctcgacaattttccctgaagaaatagaacttgaagcctttatcgtctccagcacatctagcacactggccatcctttttttcttgggggtcgccgcaagacctttttgtgcattcggcattgtcacttctgccgaagggcttaaaacttctaatgtttctgtcccttcgactcttgtctcctcaatattatcagtcttcggctcagctaatttggctgagggtgccttcggcattgcagccagctcttcaattttctgcgtaggaggagcaggttcttttgcttcagcaactgcagaagtttccccgccaaactcaggcactgtggccggttcaatgtagcgtggtcggtgggtaaggaccttc

SEQ ID NO: 97798 - DNA, 354 bp, Zea Mays
ggtcaccgcaacctcccttgattcaatctgctaaattccaggaatcgccccctgaaatatctctacgttcaactgcccggagatctcacacataacatgcatgcccattactctcggttgacgtgatagtctaggtgtgatatttgataaccaaataaacaaaaggcaaaatttaaactgtcgtgacttaggtaaaggaggcatcatgagattcagtcacggtgttaacatgcacatctagaaaatcatatttaatcaccagaaatctataggctgcactattatgcgcatatcctagaaagacacaatcatcagtttttgtcccaatatacgtttcttgcacgcatgcacatg

SEQ ID NO: 97799 - DNA, 327 bp, Zea Mays
tgagtacttttcggtccctcctagaaggccggaaaggaatggccagtcctatgagccgcatagggcgagtattaatacgccacaaaacccaagctaatgggaggaagacaacatactaatatccaaacaaccacacccacgttggaccagagagcctatggactcccaccggctgccattgatatagtgagggaagagatagccggggcgttctgagataagctcggatttagcatgatccctagggggcagtcatatcggagacattatgatagccgatttgactatcaaacattcccacacggaaccaggatacccaaattcgcg

SEQ ID NO: 97800 - DNA, 547 bp, Zea Mays
ttggtttctatgtttcacaggggcccatacgcgaaagtgcacagccgaaggggtatcgtgaggtttcgaccgtccgattagagatcaagcgctgggatctaacaacatttaaaacgaaccggtatgctaggtgggatgtcggatctacaatctacgatcttgattaaatcgagctttacactgaaccgttacgcaatcgcgatcatcgaatcgacgatcaatggtctagttttatgaaacacaatccaccccacaccatccctcgcccgattgacggctaggatctcaggcgccgaagggggggtaccccgatctaatcttatccgtccgcccgcaatctaatggtcggaggctttcttctccctccctgacgccgacgacgagggcataataagcctcccacggtggcgccattgcagtgcgtgatcaaacctcaccatgtcgtctgccatccactagaaaccctagctatgaaatgcttacgataaaatggtctgggtcccaaggttttaccggagaatgagtcggcgattgccccgggttcacg

SEQ ID NO: 97801 - DNA, 371 bp, Zea Mays
ccgctactcaaacaggcagcataccaaagggccccttcgtcctcgtcttcctccaccacctcaaatcgagggaacgccacataacagtgtgagcacagaatggccggagggaggccaggcacgtcttcgacatcaccaggagccacatagaaccaaaaaacccaccagttgccccatttgttcctggcacaagggactatctccacgacttcagctgaagtcttcctagtcctcggcgtgaaggtgcacgatccaaattgtgctatcttatttcctattttccttttctgccaatgcaggcaataattcttggcaaagacctccacagacggttgcccgccgtaggaagtaaccgcccaaacatacttcgc

SEQ ID NO: 97802 - DNA, 854 bp, Zea Mays
gtccccttgccaaaaagtattttattctagtatggtctatacttatctcaatctattagatctgatctcactcttgtgcttgcgacatctttgtaggtgcccctgaccataaccttcttgtcttttttgggattctttcctcttcgtcattaaattgctaccatctggcgagctctagtcctttggtattgacatgcttgtatctctttaatgctcttgtttcaaacacttgactctgaatttctactgcctacttagacatttcagtttatatgtccttcctatcttttgagaccctttcctcttctgttgttaagtcgctatctttcggcaatatcttgtgttttggtattggtatgctcatctccttgaaaccttacatgctctcatatttttatatgcttacttatatatccaatgccaatttaaaacattttagtttacatgcccttgaccacccttgtttctcgatgatccatgagcattcattttatttcgcacatccttggtgatctcgtaaattcttttgtaattttctttggtaatgaatttttacttcaacccttctgttggaatcatacctatcttacccttgattatttcctccacttcgccacttcgtgagtcttgccttaactctatccttggttatgcttctcacgattgtcatctttacccttgtcgcctctacatcttactttgatgcttatattatacatgtccttttaaaaccttctctcttccttctaaattttatagttgtattttacatattttccctcggtcatatcctcttccttgtcgcttgcgagtttttaactccattctttgttgtacttataccattggctctt

SEQ ID NO: 97803 - DNA, 379 bp, Zea Mays
tctggtcttgcaaagttggctcaatggaaatgtgagacaaagcaccagaaggaatcacttcgatcttcattttgctcaactcatcacacaaggtgttaatgcgagaatccatcataacatagttgcattgcaatttctgactcaaggcatctgctaccacattggctttccctgggtgataatgtacctccaggtcataatcattgatcagctctagccatcttctctgcctcatgttgagatcaacctgagtaaagatatacttaaggctcttatgatcagtcaagatgttgtagtggattcccatcaaatagcgtctccacattttcaatgcatggaccatggctgctagctccatgtcatgagtgggataattttg

SEQ ID NO: 97804 - DNA, 450 bp, Zea Mays
ggattacaaagctatagctagccacgacacccatacgtatggtaccctattagcttgcttttcaactctactatacacttgcaaaaagtaagattcatgagaaaaaggggcagtttgacgagtaattaaagtgggcttattagaacggtctgatttagagctaccttacaactttttaatcattagatagtacaaaagacaagagactagcatagattgaaaatgttgtttcgtacatttcattatgggtctgattggttgggtgagagagcttggcgtgtctcattggagcttggtccgtcggagactgtacgctctcttcgtacccacgcatgcaaccaggtagtgtattttgtaattgtcttgcagctgcggatgcagtgctggtttggaaatatgcagggaaccaaacaacgtccgccgcttggtcaacgcacgggaagagtctgc

SEQ ID NO: 97805 - DNA, 288 bp, Zea Mays
taagcgccagatgatgaaacaaggaggggctgcaatgcaatgcggcttgcaacctaatctagggctagggtggcgagaattcacacaaggcggctagcgagggcaaatcgagtaatgtggtttctcgacttgtaatctgggtaaggtggatgggatagcggcggaaacaaataacagcgatggagcggttgaactacgatgacgacacgacctaaaccagcaacaagactcgacacggacacaaactcaacaaagcaatctaaaatgaaattgcaaggctaaacaagg

SEQ ID NO: 97806 - DNA, 517 bp, Zea Mays
gtgaaaacaaggttggcatgtcctttctgttttatatttgtcttcctattcaccttttcttttgttgattactcttacatctaaatccttgaaatttctttttgtgtgaattttctgtggttaaacaccgagcatgatttttgtgttatgcttactgctattattttccttgtgtgagattccagtaatagtggtggtatggtagatgatcaaaagctcctcatttttattctctgtccatgttatttttctgtatgtacaacaggacattttaagtgagtatttgttgcactagctaagtacatttagcaaatatatcattcttgggactctaaaaatagaccattcttggctttctgagttcacagttcgatgcaagtatgaactaggtgaactatatcagattttttattgctcttgctcccttttcttgttactgtaggttttgggtggatttgtaggttggtcatgtgaattgcatcaaacagggagttagggacgatattgaagttgtggc

SEQ ID NO: 97807 - DNA, 544 bp, Zea Mays
tttgtggtgttacaaacctacccctcttaaaagaatcttgtcctcgagattaaggaacttctgagaataactgagggaattctgctctgagttcatcttctctttccaatgtggcctcatcttccaaatgatgactccactaaactttacacatgttgataactttactatgtgtaattctgcgagatatttccaaaattttgatagggtactctgaataagtcaaatcctcattaacgttgagttcttccataggtaattgttcctctggtactcttaagcatttcttaagttgtgacacattaaatacgtcatgcacgtccgataaactatcgggtagctctaactggcacactacttcaccttttctttccaatattttgaacgggcctatgtagcaaggagatagtttacccttaaccttaaatctttttaatcctctcatctgtgaaactttaaggtatacgaagtctccaacttcaaagatcaactctcttcttctattgtaagcatagcttttctgtctcgactgtgttgttttcaa

SEQ ID NO: 97808 - DNA, 405 bp, Zea Mays
gagcgctcggtgaaggatgttgcaattgcatggagttgacgtgtggagagggggttttgttgagcagtggggtgttccttggcgtctgtcgaagatgaagaggtgcatctaaaattgatcgccctagtgaactccgaaaaggtggtgaagagtagtgtcccaccagtcagagagccaagaggcgatcagaaccatagatctggtggtgaggcctaagtaacacccttgagtttacatgtaaatgtattaataattagacggtccatttgaaaaccaatcattgagttatgtcgattacaagctacttgataatgtcctgattgcttacataacaaacatcaataggctgacgacacggatgtattgtgccttgaactaaaacaacatgcacatgccatctgctaa

SEQ ID NO: 97809 - DNA, 470 bp, Zea Mays
gttcgaggaaggtctggggggctccaccgggaggtctgggaagatttcgtggaaccgcctggcgggattggtgaccggtggaccggggacggtgtgccgcgatccctcctccgccatacatccgcatactcccgggggcaagctccattgtcgcctcgctcaccggtatggctctctgacctggttcgttgatttcattagccagtagccaatggaatggattgcggtcgtgggggaaacaggaccaccgcgggggctctgctccggtggtctgctgctcggaggtaggcgatgtactagggccgcccgattgacgatgggcatccaggattagagctagggaagggaggcattgtggccattggatctttaatatgcggctgtgattagttagcgcgtaacagttcggcaaggttgatcctgagcgttgatctgaatattgtcgggcgaggttagatctggggggtttt

SEQ ID NO: 97810 - DNA, 484 bp, Zea Mays
tggtcatgccttcgaccccgctcacaccacaaagttccgcaaccagtgtgcaagataaggtgtgcatcccatagacttttagatttatgtagcaaacagtacgcgctgtgactgaccccttatatgcagactattggtattggcagcagcactgtggttccaggtgctactcccgctataacaaaggaactgacaaccacgcctaggaagaggtaagttccgcttcgtcgcactccaacacagctttattacaggccttcatggttcgtacaaacaaaaaaatgtaactgatagtgattagtgtgcatatactcaattttaaagaaaaatgcaaataggaaacattttgttgcatcaccgactcagtcctcaagatcatgcctctcatggggtagaggtatctgttagcttcagttaggtttagtctccatcagatttacatagtgttcactgtcgacacagttttcatagttttgacagtcta

SEQ ID NO: 97811 - DNA, 637 bp, Zea Mays
gtctgccattgctatggtcgtcgggcgtgggctgcgggatggccatgcctcggtgaggcgattgggcgcgtatgctacggcacggcggcagtagggtgtttctccgggtagacgagcgcgggatctccaacctaaaccccggggattgcttgtcgacgaggggcgcgccgctgtttctgtccacgtcgtggatcggcaccttcatcgccttatcgccggtatgtaacccatgtctgcgttcactgttatcaccacgtcgtgtatccctagtcagatcatagttcatggctaggaattgggggatggcgtggactggccatggcgtccgccgcatcggatgcgcgccgccgtgttctggggatcagttggggaagagaggtcgtgaaccgttgatgcgtaatgagcggtccagattaattggatcataccgcttcggttagtgcaatccaagccgttggattggccgtggaggggtaggattagatctaggttccgacccttggatttagatctggcggcccatatcacgtattagttcacttaagggcggatttaatctgagccttccatctcagatctggcggccagtgatcaaccataacccttcggctgtgtgatttttcataagagcccctgc

SEQ ID NO: 97812 - DNA, 506 bp, Zea Mays
cggcgacgtcgacacgcgcaagagtacatcaggcactctgttcttcctcggcgacaatgcgatcacctggcagagccagaagcaaaaggtggtcgccctcagctcctgcgaagctgagtacatcgcgggcacagcagctgcctgccaaggcacttggctcacacgtctcctgtcagagctgagaggcaagaaggagggtgcgatcacgatctttatcgacaaccagtccgccatccagctcagtaagaaccctgtttttcacgaacgcagcaaacatatagacaccagatatcacttcattcgtgagtgcgtcgaggaaggcagggtgaacgtcgtctccatcgacaccaccgagcagctggctgacattttgacgaaggcgcttgcgcgggaacgtttctgcgaactgcgcgacaagctcgggctcgtcaagattaagcagagatgcaaggcttaggaggagatttgttggataagcctcgcatgtagttagttgcatatttccg

SEQ ID NO: 97813 - DNA, 683 bp, Zea Mays
gtacaacccgttacccgccagaaaataccatagaatgtggtcatgttcattttaccaagaacatcaacaacttgacagatataatataatgacaaggaacatagttcaaacttcaaagtccacaaacatgatcgatcatccacaaacataaacataagtctcaaactcttaagataattaattattacaacacaatgttttaggataaaatgaacacatgggcaatattttgacaggctagtaaattaagcgggtaacgggtaatacccgggggcgaaattttatatacgtcaattaccggcgggtgagaagtgttgcccgtatccttacccgtgggcgagatttcttacccgtatccatgcccatcgggtatgaaacccgcggatatccgtgcccgcaggcaggattgccatccctactggccgcatttcaaggattgcatatgagccattgatggaagccactttcccgcgtctgtcccggccacggagcaagcaaagtatattggtcgtcacggttacgcatcacagaatgtcatggtcgtttgtgacttcgatatgaggttcacatttgttgtcacgggttggccaggttcagtgcatgacactagagtcttacaagatactttgataacgtatgtggataggttcccgcatccaccagaatgtataactatcttttac

SEQ ID NO: 97814 - DNA, 504 bp, Zea Mays
gttggtttaagttgtttctgacttaaacttcttgctagttgagagtttgtatgcggacgaacacagaagctttattgataatgaaaccttttgtttacaaagtgcggcttgccgactggagttttgatgtactgctacgggtagaatttcctgaggtgctcaatattccacaagtttcccacttcggttccgtccatctaggtaagtcggtaggatcctgaccgagtgacctctgcaatgatgaatggtccttcccatggaggtgacaatttgtgtcgctcttctcccgtcagcacccggtggagcactaggtgccctattgcaaaggatcggtgccgcactgccttgtcgtggtagcgcctcaaagtttgctggtacctagtcgattggataacaacattcagacattcttcctctaatatatcaacatcctctagtctggatgctttcgctttagctatactttcaaatgtttgcctgggtgctccaaagatcaaatctgct

SEQ ID NO: 97815 - DNA, 444 bp, Zea Mays
agaaaatccaagagcttgttgcggacccattgccaccgaattatctctatcggatgcgaatctgaacctcactagagcttgacccaaatgggagcgctgaatgctcctgacttgaacatttctgaaccccactagatattctcggataatatcatcaaaaatgtgaaaattaacctcatgctccagcagcggctgcacaaggacgatgccccaatcatgagtggtgggctgagggcgggtcactgtacgaaccatgatttcccaatgatcaacctgttgtgccacgaaatcgtgaggaagaaacgacacaagatcaactctatgaaacaccatttcctcacaaacttcctggcgagcaacccgcagaggcgacaatcgtttcacgcgaagcagcgagcgagggtgcgacgggctcttccacagaagcgaaatgggagagggttt

SEQ ID NO: 97816 - DNA, 339 bp, Zea Mays
ctcacatgtccctttggagcgtccgagcacccgtcgtcgcccttctcgtcgcaggaggcagagacggaacaaccgcaactgtgccacccatggcaccctgtgccctggcgaaactctcgcgatggccaatggtgtagactccctttcgagggacctagccaacatcagcatcgcacctggagcgccaacggcggcacctgcatcaactctcctggtaccacctcctccagcatgggaagtaccagctccacacgccattgagggagctataccagccacgccggacctcccactcgtgggtcaggaggagcaggtcattccttggcaggacatgacaag

SEQ ID NO: 97817 - DNA, 683 bp, Zea Mays
ctaggagcgagggagaagttccaggctgcactgccaacaagttgatgctgtcctccagccatctcgggccgacaatggtagaggtacttacaaaacccaaaatgaggaagaattccaaggaaagcttcacaaagatgaatacacacaacaatttgaagaacaaaactagggtttaaatgggtaagattcagagaataaaagtcgagaaggccgcggaagaaaggagaagctggcagggctagtccccggatgagaaatggcatgaatataacagtctcgtgggtatcctctgtcgaaacagcaaccccgtgccagatttgccaggagcacaatttttttggcggaagaacaacaatttcaacgaggtgtagaaggtcagcttcgcaaataatagacatgtgattaccagtgaatgggagttggctgttgggatcgtggtctctcaaacgatgcgggcgattcaggaactcaggaaattgggaaacggcggaggaaaaagtgagaactagggttcagaactcaaggggggacatcagcagaagtatgggttggcgtgttaagtcgggcgcaaagcagcaggccgataactcaggaaaagttaggatcgcaggaaagcaaacatcactcgagcattacctccaaaatgctattgagccatcaaatgcatgaacagagcgtgcaac

SEQ ID NO: 97818 - DNA, 338 bp, Zea Mays
taaagagctataccttgttgagtagatttcgagctttgtttctagctaactctcggccatcctttgcccaaatttgggtgataaacctgttgcctatgcttcgagcttcggctggaatatcaactaggtccgatgccgaaaggttgaaatttggcctattaacggcccttgcgtgattgcacccggcttttatgaaagtggtggtcgtaccccgagaagccactagcgcacagaagtcaccatggccagttatgacttcgttgaggatgtcaacctctttctcaacgcattggagtgcttcggggacatcttcggcagagaggctagcttcctcggat

SEQ ID NO: 97819 - DNA, 493 bp, Zea Mays
atctttaacacgtaccattttattcggtattacaagccaagggatgtaaaattttaaattgaagagcacacttgcaaagggcaaggaagggggcataaaatcatgtattgtccgctgacacggctttgtctcattactgaccttgccggttctaatggtggtcagtttggccggcccgtcggcaggactaccgacgaggggcggatctagtggatagtctatatagaccacgacacaccctaagaatgtagaatagtaattcatatattggtgtaagtattgtatcttgaagttattcgagtcttgataaaccttgttttttgttactgtccaccactattaccgaccgatagggttgatataaaccacattggaccatggtctatgtcaacatgaggacgatttatctaaccatccttattccctcactgcataacctctcttttcatacccatatctttatcttttgtatctccattgttcttctatagat

SEQ ID NO: 97820 - DNA, 1026 bp, Zea Mays
tcttcgatgatggtttatttagctatggcattggacctcccttcttgggctttaaaggccatagacaaaattcggagaaatttcctttggcgaggaagaaaagaagctatgggtggccactgtttggtggcctggaacaaagttactagacctaaagagcttggaggcttgggcatctcccacctgcagcatatgtgttgggccctcagattgcgttggctctggttaaaaaaaactgaacctgaccggccatggacagccttcaattttcatgtgcacccttcagttctggccttcttttctgcggcagtttcttctgaagtgggcaatggcaggaatactctgttttggacagataaatggttaaatggccaaagcctacaacagttggcacctcatcttgtcaggatggtatcttcaagggctaagaaaaggagtgttcaggatgcactcactactggaagctgggtacaggacattagaggggctattactgttaatgtgttgtctgatttttttaaagtctgggacctcgctgccagctggattttgcacccggaacaggaagataagcatatatggctgctctctagctcaggaaattataccgccaagtcggcttatgatggtttatttattggcttaacaacctttaggtcatggaggaggatttggaagagttgggctcctggaaaatgtaaattcttcatgtggcttgtggcgcacggccgttgctggaccgctgaccggctggcaaggagaggcctgcctcaccctcaaagatgtctgttatgtgaccaggaggaagaaactatgaatcatctgctagtttcctgtgtattctcaagggaagtctggtttaatatcctgaaaacggtcggtttgcagcacctctctcccagtctcaattctacttcctttgatgaatggtgggaggatgtaagcatgacccttattagcccctccaataagaagctgcgcaaggggctgaactcccttatcattttaggagcttgggccatttgg

SEQ ID NO: 97821 - DNA, 396 bp, Zea Mays
cctagtttcgcgccgggccattgaagcaaacccggagaatatcaaggcaattgaggcaatgaggcctccagctcgaatcaaggacgtccagaagcttacggggtcactggccgccctcagccgcttcatctcaaggctggctgagagggtgctacccttcttcaagctattacggaagtccggaccattctcttggactgaggaggcagagcgagccttccaggatttgaagcagcaccttgtgtccctaccaatactggtagctccggagccaggggagccgttgtacttgtacattgcagtggctatagaggcggtgagcatggtgctggtcgtcgaaaggatggagcaacattcccaggggagtcaggaggttcccctaggagaaggtggtgg

SEQ ID NO: 97822 - DNA, 764 bp, Zea Mays
cgctgcccccgtcgctgcctctatagtgacggctgttcttgcggatcagcagaatttcttcttcttcctcttcatcctcgtcaaacacactgccagcagcctgcgcatcatcacaactccaacattgacctcaggaatggcgtccaccaggccatcaccaaggatcgacgcagaaggaccagcatcttggtccaggcacgacagtcgccgaagtcgcctcttcttcttctcctcgacaggtgcagccgggtgactcacacgacgtgagcgctttgggcgggcacctttgggtttctggatctccacatcctcgccaaactcttgtccagtcgtgatggccataggctcggtacgggtagagtaagacgactccccagccagcagagtaagcacggtgtccatctcagcatcgtcggtgatagctgacatctcaaagtgagtttgcctctcagcctcaggaatactccgaagtggggcaatcaaggcttcaatttcctcgagggagggtcgcactctattgcccgggctaccatcacgagcagcagggttggagacaaattcagagaaaagcctatcttgaggcaggttccacatagagtaagctaaaggagcaccaccattcgataccctacccctcaaaaccatatccaatcggctcagcaagtcctcattgggaatctgtctgttcgtgacccgggtggaatcattgatgccggttgttggggacttactctcaaatgcttcggcttaagagcaaggcaaca

SEQ ID NO: 97823 - DNA, 396 bp, Zea Mays
ttatgattcatgaagctactctgtttctgtttggagaccctgggcaaacaacatcatatcttctccctccgccggtggagctgctgcagagacgagggatgagaagcacaacaagagcaggtctgaggtctctcctcatcatcgatatatgcaaagccatccagggcaatctcacctcaggctccgctgaaaaacgattagctcatctcaagagaaaagaggatgactaccagcttactgcaataaccacactaactactaccaggaaccaagcgctgatggcttccttgcaaagtagatgcatgtttcgttcattgcagtcttttaagctctctttaagttgcattgtgtttttgttgcgtaaagttttaaaaaatatggctaagcatccattag

SEQ ID NO: 97824 - DNA, 430 bp, Zea Mays
tgaggtaaactgtgagcctctatcagaaacgatcttctttggtacaccatgtaaacacacaatccgagccatatataactccgccaactgagatcccttgtaagtagtcttgaccggaatgaagtgagctactttggttagcctgtccacaatcacccatatgaaatcataccctttcggggtgcgaggcaacccgacaatgaagtccatacctatctctttccacttccatttgagtatctttaacgggtgcaatagtcaaactggtctttgatgttcagctttaactctttgacacacatcacacatagccacgtgtgcagccacatctctcttcagcccataccaccagtacttctgcttcaagtcctgatacatcttagtgctaccaggatgaatagaataatcagagtcatgggcttccttcaat

SEQ ID NO: 97825 - DNA, 386 bp, Zea Mays
gaagaattcatggatgtgtttccagaagagttgccaggaatgtcgccagaaagagaagtggagttctacatagatctgatccctggtacggcacccatcacaaagaggccataccgcatggctcctaccgagttagcagaattaaaactccaaatcacagatctgcaacaaaagggtacattcgtcccagctcatccccttggggagcaccagtcctttttgtcactaagaaggatggaagtgggaggaaataggcatggattttgtaaccagactaccccggacgcaaaaagggaacgactctatctgggtaataatagaccgtcttaccaaggtagcccacttcatcccggtgaaaactacctttggaggatccacccttgccc

SEQ ID NO: 97826 - DNA, 402 bp, Zea Mays
atcagtgcttcgtactctgctgcgttattggacaccggaaacaaaagctggagtgcatacttaagttgttcacctctgggagcaataaagagaatccttgcacccgctccttgtagcttcagtgaaccatcaaagtacattctccatacttcagcaacttctgggctctccgggacctggtgctcagtccattctgatatgaagtctactagtgcctgagtatttattgccatgcggggtcagaattctatgtcatgcgccccgaggtctcatgcccacatggctatccttccaatagcttctttgttgtgaagaatatcacctattggaaatcctgtgactactatgactttatggtcatcaaagtagtgctggagcttgcgagcgattagaagtatcgtg

SEQ ID NO: 97827 - DNA, 419 bp, Zea Mays
ataaatctttggaccgtcactacgcttccttttatttccagtaatgtcagcctacttccctggcctgacatctttcaccttctctagctcttgtaggacctcatccacagtgaacctgccaggctcatctttgttttcatgcttaccattgaaatccaagctattccgccatgaatgtgtccttttaaggtaacgacgatgtccaatgtagcataacttgttccttattgccagagacaacgaattcttgtcactataaatacatgcataatacccttttgttgttcgcccagataacgtggccagcgctggataatcatgtatacaccatagtacaacagcacgaaggtcgaacttcctaccagtacatgcatcataggtcttgacacccttccatagcttcagcagttcttcaatta

SEQ ID NO: 97828 - DNA, 350 bp, Zea Mays
caaaatgttcacccctgccaccacctaggtgaggcacaagtactctagccacttaattcgacaatctgggtaccatttttatgtctctttttatctgggtatgaattgtttatgtctctattgggaaattaagacctgtgaagttgcatcattaagtttgttatagatttttgctactaaataacaacgtaaaatttcttttcagggcaatgaaaagcaggagacacatttccataccattgttaactgcatcacagagtctctgaagacacaaattattggtagaacttatgatgaagtcgcaatatgtctctttaacactgtaagctctttctcacatcagtaagcat

SEQ ID NO: 97829 - DNA, 482 bp, Zea Mays
catcctttgctttgtatttcgtcagacacttgtaagagcttggtaagatacaatagagcgtgttcctgtgttccacccgagaggagcatgtagtgagattattagggataaccttcaccgtgtgtttcttgtttttgtgtttcgatggcaggcgacgaagaagaagcaaggatccctacagacttcgatgaatgtgttagccgccaagatcttgaggcaaacaacaagctcctgaaggagcaaatggaggagacggtccacaagtcagtgcatgatgccttcattgacatgaactttggcaagacttacgagaggctagatcgatgattgtcctagattatcgacagacttgctgtgttggagacgcaacaacaagcaccgccaccaccacctcctcgtccacgtcttcccgatgatgcggtgtttgatgaagaaggtaattatgatgaagcggccaccagagatttgcgcctacgtcgccg

SEQ ID NO: 97830 - DNA, 447 bp, Zea Mays
ctcgcccgcacttggatctggaatgcggaggagtttcttcacgaatttcttgatcatcatcggagtcagattcaactactgacgggttcctatgacgcaccatccttaagataaaaaggagaacatatggtgagcgaggagatcgatgttcaaggattttaacaaacacgtttgagtaaagatacgtatgatattgagcatgcacttcaaccgttcatgtgagcggttcaactacaacgaacaataccaaactactaaactcaaacaatgttcgagacaaaatagaacagtttaagtgtggcaagcacctaaactatatagtatccttgaaaagatacataagataatcaagaacggtgttagatcgagtaaaaaacatgagaaaataaggcaatacctcgatctgacgattcaaccatagaaatcccaacgaagaggaaggagttg

SEQ ID NO: 97831 - DNA, 438 bp, Zea Mays
tagagaaagttaagaggattgggagaggtggctcaatatagattggtttagatgcacctctcaccgaagcaccacattctaaggctacactgcttaggcaatcgacatgacacaatgttcttatttactcttcaaagggacaaccctaggcacaacttagagtttcttcaccaccatagccatatgtctatgagagagatgattttgaggttgagaaggtccaagatgaccattgactattggatctttgtagaactacaaccgtctatgttcatcagttttgtcatgttctagttgcttaatgtttactagaacaaaggggcactaaagcaagagtacttttcagcactaccgtataggatccctaccgagctcagctgttagagaggattgcacttaaggaccacaagatcgttcagttttatatcttcatagagg

SEQ ID NO: 97832 - DNA, 303 bp, Zea Mays
ctgttatttgttgtggcttttagaactgaaatattcttccgtgaggacttggcaaagagcgtgggagctatcaatcgtgccgacatgccatcgatccaacacgaatgccaaaaagaggctttaaccccattgcccactatcaccactatagacgcatgaaagagatcccgatcaaccttgctacagggaatgtccaaaccgacccaagctctttcttaatttttccattcaaaccaaagccaacgaagccgtaaagctcttgcaaaacgctccagatcgacgattcccaaaccacctaggttc

SEQ ID NO: 97833 - DNA, 423 bp, Zea Mays
aatattcctggctattgatatatacacatgtaacaaaaaagtattgcttacatgtttttcagatcttgagcagttaccggtacgttctccggcccatcatgcatttctgatatgaaatcaactatgcaatgctgcggcactcagctatcatgcattgcatccacaaaatttatgaactcagcatccctaaatttgttgcaacgtaaatgttgtttctctgcttcgtcagttatgaactcatggttatgctccaagtttaccagttcaatttttgtagctacaaccattttgttttcatcatcatatatttttttaaattttattccagctttgcattgtgtacgccccgatgatctattcctcatcctaggtgtatcatttgattttgctgcacttttaccttcacgtgaacaatttatccac

SEQ ID NO: 97834 - DNA, 348 bp, Zea Mays
ggtaagatgcccgggcacgtggcaaacggcagtgagggatcaacggtggtgagatcctacccgagcgatcggtgaacaagggggaggtacggcggctagccggattggtgtccagctcatcgacgacgatgatctttctaccccgagacgttatccacttatcccgagcacgaatcgagacgccggtggcacgaatcgtggcggagagatcgtcagcggcgagggggaagaatcagatgatctgatctgtttcaggtcactgtacaatggtgttcttcattcagtgcttctgacagagcaatttgcagagtcgtttacttccaattttatgtagtaacttgattgtct

SEQ ID NO: 97835 - DNA, 434 bp, Zea Mays
tggaaaaacagcagacaatccatgtaatagcacccaggaacgttgatatggaatgatcatccacttttgggaccaatgcaccttcatcggactattagctgccaaccaatccataccaattatcatatcatatgaagccagatccaaaactctcaagtcagtgtcaaacacgcagtgttgaacggaccatctagcgccaaccagctggcaagaacacttcaaacgattgccatccgctacctgaaccagcactgatttggccatatcagttacacctgataaccgcgatgccacccgagatgcaatgaacgaatgagaactacctgaatcgatcagcatcaccacttcaatgccttgaatcagtccccgcaacttcagagtatggttcaactccaatcctttaacagcagcaatggagatggccaaacattcag

SEQ ID NO: 97836 - DNA, 609 bp, Zea Mays
gagaccaaacagggcgttggataatcccttttatatcttccctttcaactaagttattcttcacataaaaccattcttccatctaggctcctgtccacctcttccgaaacattggaactggatagctcacgtcagagcgaggcacgaagccataacaaccaaagttattgtgatactgttccttcccagtagccttcgtttcgtaagacagctcatgcatattgcagaagcattttgcacatggatctagtccttggcttctcacagcccaaataaagacccccatcctgatgatggcttcgggggtaatctaatgaagaaaaacttcaaaggtctttcagcacttcaaccagaaatttacttaacgggaatcgaagccctaccttcatgaagctcctgtaaacaaccacttcatctacttcgggtgcaggggcggcgctatcccctccaactctcacaatggaaatatctcggaaatatctccctttcatagcatcaatttgactctgcttaagggatgattttccgaagatggtgtgactcggcctccagggccaattttctacatcttcgtcttcactttccacatcaaagccttcgctatcgtca

SEQ ID NO: 97837 - DNA, 432 bp, Zea Mays
gattaaatatatgttacaaaagtcgattcttagtggtcgggtcagaaagtgggcatatgctttgatagagtacgatctaatttatgagtctttatcttctatgaaagggcaagttatagctgattttataactgatcatagggttgatgtagagcaggaaatctcatgtcctaatacttgcccttggcaattattttttgatggttctgtgtgcaagaatggcagggaatcggctatgttttggtgtcaccaaatggtctagtacatgaaacatcaattaggattgaatactgctgcactaacaatcagattgagtatgaggctttgctgtttgggttaatgcatttagatggtatgggaataaaagatgtagacatgttcagggattcattgcttgtggtacagcaggtgagaggggaatttcagtgttta

SEQ ID NO: 97838 - DNA, 756 bp, Zea Mays
ctacaaggttcaaagcacacatatgcatcatactttatacaggttactctgaactctgaagtagtctgtattcacggatcagttgccaaatttagttgaatgaaacactggggtcgggtccaaaggccacttgatcttggtggtttaggaattttggacctggaaattttgggttgggctctaagaatgaggtgactatggttaaaaaagatccaacctgatcagccatgggctgctctagatttacaggttcactctaattctatgtccatgttctgcatttcagcttattctgtgttaggtgatgacagcgcattcaagtcagcaagtttgaggtatgattcagttctaaatttagtgttatgtttctttttcatcctcctttttttcttggggtgtctctgaaaggggtgtgctgctggttctagcaggacgctgcgacactttagcacgacccatctcatttgctaggccaaccgaactgtgcatgcaggaatccacctcacaactgtggttttttcctctgattacgattacttgtgcgattgtctcccacggaatgatgcgtatacctcatcaatgctactggctctcacacgcctgttacagtcccattgcttcatgtgttaatcttcgtagaaggatccatcatctaccaatctcagtcaattctgacttgaatgcagtctccgtgctgacttgacggcgacgcaaaaacactgttctgattctattggatcatgatttccgttggtt

SEQ ID NO: 97839 - DNA, 562 bp, Zea Mays
cttgtgtccagagactactgtaccatctttgttgtttccatctaattctactttggtaacattaacatcaagaaatttgttgcgtagctggatatggaacataactgtgcaagcgtgtcatgaataatatctccttgttcctatacttgccatgtattacttagagcatatctaacaatgtatgtataattgtctgtattcctttcaatgttacctcaatagtagtcaaaatgtgcaagcccaaggatacatttccattttgtgataaagtggtgatgatgaactacggaaaagtgaaaacacaactaaagtatgatcatgagggagctcctgtcaaaccttttgtagtgcttatggtgaatgtgaacatatttgcactggatcatctcgttaacttctatgacagtgctgtagtgtttatctttcagccctccccatatgtgtttatatatattgctttgttgtaaattaaataagtatctcaaggaattttggttgctgctgatcatgggattcttttttaagtcctctgtagctgtcaatcttttagctaatagataat

SEQ ID NO: 97840 - DNA, 365 bp, Zea Mays
gcttatttcaaacccttatattatttctaaagcattaagataaaagtaacaaaagtagaggaaacataaactttaccatcctcctcttgttggcacctaatcctagtcgcgctgatgctaccttttccgaccaaaggacttcatgaaagggtattcaacctagatggaaagatgggcattaagagccatgtataccataaataagtcattttaccataagtacataagtattctttgataggctgctacagtccagatatgcaagctgcacatgttcatgcggtaactataaagatcgatacatgtctggcaccatgtgttacatgcttagtctcattgtttactctggttggacttcttcggag

SEQ ID NO: 97841 - DNA, 1204 bp, Zea Mays
aaggaattgaagaatcaactagtcactacgctgcatactcgtaccagggaatgttgcaaacggaccttcgttgctgggctagaatagaaactgacgtatggaggacttgtgagatctttcactcttcgacaacaaaagccttgaggacatcagcgatgtgttatagggacgtctcacgatcttgcttctagagtacgtacgggccaatcgagtgcctaaccttgggtgctccgatcttgttcgtgaggaagaaggaatgccttcttcgttcaatgaatccgcataccaccaagggaaaaagaagtctgaatccgtgtcttctctgccatttgatttccttcaccactagcaccagccccgcaagctactagagtatagctactttcgctaccttgactcttgttattatccagacccatcaaggcattcaaaagcaatgaaatcaagattcataagcaaagcgaaggccaagcctgatctccctttcccttgatatggtggactcctaaaataggctttctttgttcgtatgattttttagaatactataataagccactcctaaaatgggctggctactcgaaccaaatattgaacttgctctttagcataggtagacttcactacccggataggtcagcctcattcccatttctctggtcctatatgtatttttgcaagtaccattcctgttattcgcattgattgagtactttagagttttcttcttgatggaagtgtcaaatacttagtaggaagtcccggtgggtaatcaccaaatgttctagtacgagtacatccagtttcgggtggtcatctagtatgggacctaagagaagccctttttgaatccttttattaagccattgctaatcccgtaagacaatccttcaacgttgtataaaagagttcaatacaaaagcacacaaaggctttagactatgaaaggctacctttatcatgcatgaataaggccgagggattatgtcctcaacaaacctatctactactaaataacaattaaagggacgccaacaattggaggtgatggtaacggtgaagattcttctctttttccagggtacataaagataagaaggcaacgaaaagcactttgaaaattaagaaaccgatccactatttgaaacatgtcatccacgttagaaagagagccatgaaaagcatagatcctcaaggaaaggaa

SEQ ID NO: 97842 - DNA, 371 bp, Zea Mays
atttggaagtgctcagcgagggtgaagaggatgattcactggaggaggaaccaaccctatctgtaatagccatgaagggtctgaagggcagtcgcactatgtaggtcattgtagtaatggggtggacaacgtctggtgggcttagtggatagtgatagcacccataactttattagtagccatgttgcttctttggtgcagatcacataatcgtcagggactggacagaaggtgcaggtagcctatggcgctcgattgccatgtcttgggcggttgtcagatgtccagttttgcattcaaactcacatcttctcagactcctttttggtgattcccttagaaggtttcgatgttgttttgggggtgcagtg

SEQ ID NO: 97843 - DNA, 414 bp, Zea Mays
caggatatggagtatgcagactttactgatggcgatcttctctcggacaaaatggaggtcgatctccacatgtttggtgtgttgatgttgaacggggttgatggagagatacacaacaccgatgttgttgccgtagacaacagtgcaccaagaagatggattgtggagctcgttgagcaactgatgtaaccaagtcatctcaaccattccattggcgacaacatggtactccgcttcagcactgtaatgggagacaattttctggagcttagccgactaggacaccaggttgtcccctaggaacaccgcattgtctgatgtagagcggtgcgtgttcggacaactagcccaattggtgttgttgtagagtgtaggcgacaaggtcggagcaggacgatcgacgtagaagaagac

SEQ ID NO: 97844 - DNA, 356 bp, Zea Mays
gggaggtacaggtggcgggtttggagtttcctccccgccgcgggaagttcccaccccatcttgagcacacgttcttgatggcatctaaggaagaaagatatactgaattattacatgccgaaagtacaccacctttattacataatgccaaactagtactaattatacatactcattagtacaactcaacttccttatttaatttacataaggacactacttatactacactactctaattatcttcgtccttggtcgctcctgctccactgccagcttcgggagaacgttcatctgcgaggttcatggaaggaggggctccgaaaagatccaactccccatcaggtcctccacta

SEQ ID NO: 97845 - DNA, 669 bp, Zea Mays
agagtttgttgctcagccttatcctcaggcgcgacaggcttcgtctcaataggcactgaaggcccagcttcagcttcggcctgggctttgacaacttcgacaactttcttcgtagaaagaggggtcaaggtttttgtggtctccatgacagcgtctagcatgctggccatcctccttctcttgggagttgtggcaggagcctttgtcatcttcggcaattctgcctctgccggtgggctcaaaatttttggcatcatcactgttttttccaattttggctctctggccgtatcatctttggcttcggctgcccgactgtaggcaccttcggcactacaatcgatccttcagcgctctgaatggcgggagcaacttgttttgctttggcagtggaagaggtcccttcaccaaattcaggcactacgaccgtttcaatatatcgaggctggtgggttaaaacctttattttcttgcccttcggcacgatagtggtggccaaagcggtagttttcctcttttttccttgccttctcaaggggtagcagtaatcaggatatatgaagccaattgcatcaaaaaccctgttcaatcttttcttgccccgacccccaaaggctgaggacaaggcatcatcttcggccctagtatatgtcccaagcaactcgtcgc

SEQ ID NO: 97846 - DNA, 291 bp, Zea Mays
tttgttcagtgactaaggacaaaaagaagtggatgagaactccacttgtggctaagcacaaagaggtcgaaagtctgatatttttgaaggggtaaagccactagaatctctgctgtctagttcactcccaccaagagttagcaaataagactctactgctcactgctcatcaaaatagaccaaatttggatattatagtgttgagcagtctctagatctttaaccctgcaccacaaccttatctctatcccattctttactcataaacacaggcaaaggacaggaaaggag

SEQ ID NO: 97847 - DNA, 553 bp, Zea Mays
cacagcttcataaatgtacccacgaaacattacaggcatgatcctttccataattatgtggaagtcatggctcttcagtccattcatcttcattgtcttcaagttcacagatcttctaaaaccagcagcataaccatcggggaatttaatatccttcatccacttcatcacttctttccgttgcttaggttttagacaatagtaagcttttggtttgcctccgttttctctaagcacttgggttggacgatcacatatcactgctaagtccatgcgtgccttgtcattgtctttcattttatcagggaaatccatgcatgtatttatgagggattgggaaaagttactctcttgatgcatgacgtcgatgttgtgcatcaaaatcaatgacttaacataaggaagctcccacaagccacatatgtgagtccagttatgctcctcaccaaaaccttgataccttttcccactctcgtctaggacaagtttcctatgctcttctataatttctatcccactacgtcgcttgggcggtcccttcgtgacgatggtg

SEQ ID NO: 97848 - DNA, 434 bp, Zea Mays
agcgatcgaggtgatgagagtgtgtgtgagaccgatgccttggttgttactcatcgttgtcgtcgttgaacactactgttggtggtgatgaactgctagctgctgatggtgtgcctatcaagacgacaatcaaagataagctagtttatcgacggagagacaggaaccatatcactgttttacggttaataattaaaccagttggatggcgtcatgctgacgggaggccgaggtcaccaccggccggtccaagttgggcaggcatgttggcggtccaagagcagcagcgtttgactccccactccatcgacgtgttatggttatggttaggtcgtctgagaatctgtctaaccagatctagctagtcaagcccatacgcaataaatctatccgattcccacgtcctggattgtttcatttcatgccgtgcaagc

SEQ ID NO: 97849 - DNA, 401 bp, Zea Mays
ttcaagtataggagctagtttgatgagccaaatgacgactggctgaatgccatcgaagcaaccagtgatgaactgcttggtgcttactcaagggctgaggatgatgctatgtcaacaaccttcgggggtcgaggcaggaagagactgaatagagttttttgatgtcatcggattcgtgtatccggactattgttatcttgcgtggaagcaagggaagaagaggaaaactactacttcggtgactactggcacgccgaagtcaaaaaagattaaggttctgactcaccggcccaggcatattgaaacgactgaagtgccaaagctaattgaggggtcttcttgcgcatctgagccctggcgccccgctcctatcgaagctagagcgaagccagctgaagagc

SEQ ID NO: 97850 - DNA, 540 bp, Zea Mays
agaagacaaggcattatctgcggccttcaggaatcgaaaaaagaagagactaaacagagtttttgacgctatagaatttgtgtaccctgactaccggtaccaactacggggtcagaaaaggaaaggtgctgctcctgtgaaagatgttgcttcggctgtctctagtgaacccatgccgaagaggaagaaagtgaaggtcctcactcaccgaccacgctacattgaaatggccacagtgcctgattttggcagtgagacctcttcggctaacgaagctaaagaaactgcgcttacgcagaagaccgaagagccggctgcaacgccgaaggcaccattggccaaattgggtgagccgaaggtcgagagaacaaagatatcagaagttacaagtccttcgacagatgtgacagtgtcgaaggcacaaaaagatctcacagttacccctaagaggaaaaggatggtccacgtactagatgtactggaagaaataaagacttcaagctctactccaaggaaaacagctgaagcttcaaagacgca

SEQ ID NO: 97851 - DNA, 456 bp, Zea Mays
ctctaccccccccttaaaaagaattcgtcctcgaattctgacgcttctatcgaaacgacaaggaaaaatcagcgacgacaaaaactcaccccataacgaaaagtttggtgtacttataccgcatcagctcctcgaactccaacgattctaggatacgtagcggacgacactctagagtcaggtcttgctacaagggaatcgactctagctcgatttattgatctggattgcccaaatactttctcaacatagagacatggaatacatggtgtactcggatcatagactccgacaattgcatgggctatgccaagctgccaactcaggctaagatagtagacagtcatatatacctcggacgaagctttcctaacaccaaatcaacattgacacatgcaagtacttcaatgaatatatatatatatatgaattcaatacatacggtgctcctatagc

SEQ ID NO: 97852 - DNA, 777 bp, Zea Mays
aatagcttcaatcggtatagcaggagccatctttgtggctagaggggcagtttctgccctttcaattaaatttggcacatcggtcgtctcaatgcgcctcggtctacgtgtcaagaccttgattttcttcgccttcggcgtaccagtagatgtcgaagcagcgactttcctttttctcccttgcttttggatgggaaagcagtaatctgggtaaacgaacccaataacatcaaccactctattcagcctctttttcccgtgagcatcgaaggcagctgtcatagcttcgtcttctgccctcaagtacgctccattcatcacttgttgcctctatagcgtccaaccaatcatcatttggctcatcaaattggcttctaaaccaaaaggtatacttaagataaaccaagccactctggctagagcgagcagcggcttccttcggcatttctcattcgtttgcaagaggccatactttataagcaacgtgctcttaaactaaatctttcatgccaatgtaggtgcatatggtgttgaaagcaatttggcacgcctgcacttcattctcaagtgcggtggatggccttctaatgccgaagcgtgaccatataggacgttggataacgcctctcacatcttccctctgatttaggtcattattcacgtaaaaccattccttcatctaagaacctggccatttcttccgaaatgtaggcacggggtaatttgcctcagagcgaggcacgaagctgtagcatccaaagttgttatgatactgtt

SEQ ID NO: 97853 - DNA, 619 bp, Zea Mays
ctcaagtgatcatattggggtggtttgctagaccacacctcctttggtgtcttacactcaattgttgttgacgtggagcggttgatcaagtatcatgctatggtaatagcctctgcccaaagactctatggtaaacccgcatgggaaagcatacaacgggtcctctccaacagtgtcatgttcatatgttccgctactccattttgttgtggagtaccaactatgatgtagtgtatagtaatgtcgatgtcccggtaaaacctctcaaaatattcagagcggaacttagtgccattgtctgatctcaaatattgaccttcttttctgtctacatttcaaccatagccttccactgaccgaaacaagaaaatgtatcatccttggactttagaatgtagacccaaaccttactgttgaaatcatcaacaaaggttagcaaatattttccacctccaactgaagtaaccggtgtaggaccccacaaatcagtatgcacataatcaaatatgcatgtagtcatgtgcacagacctactaaatttcaaacaagtttgcttcccaaaaacacaatgttcatagaactgcaaactgcatgtctttcgactgcccaacaggccacg

SEQ ID NO: 97854 - DNA, 968 bp, Zea Mays
ctggatcatatcgtcttactcaaatggacggcacagaaataaggaactcatggaatatagagcatctcaggaagttttacctctagctagatttcaaaagctattaggacggcattgtattctgtaattggataatacaccatcaataaaaagacttcattctcaaaggcactcgaactgtttattgtcaatctgcatacttactcgactcagggtgaccactataccctactaacggagcaatcggcttaagtcggcgatgacttaagacggtgagacatgctcacgcttactaaactcagggtgaccattatgccctactaacggagcaatcggcttaagtcggcgatgacttaagacggtgtgacatgctcatgcttacttaactcagggtgaccactatgccctactaatggagcaatcggcttaactcggtgatgactaaagacggtgtgacatgctcacgcttacttaactcagggtgaccactatgccctactaatggagcaatcggcttaagtcggcgatgactaaagacggtgtgacatgctcacgcttacttaactcaggttgaccactatgccctactaacggagcaatcggcttaagtcggtgatgacttaagacggtgtgacatgctcacgcttacttaactcagggtgaccactatgccctactaacggatcaatcggcttaagtcgatgatgacttaagacggtgtgacatgctcacgcttacttaattcagggtgaccactataccctactaacggagcagtcggtttaagtcggtagtgacttaaatcggtgcgacatgctcacgtctactcgatccagcataagcacacttgcgattactcgttttagggtgatctctacgcctcgcgaaatagaaataagtttcaaaaccatcacactgcacttacttctgcaatcgtaacaactattgaattcaaacaacagaaaaat

SEQ ID NO: 97855 - DNA, 403 bp, Zea Mays
ctcgaggaggtaaacgtgggggggtagatatccctaggtccttataactcagattggatccatgggtctttagatgaccaggtagctagttttgtgggctgaccagctaactcaagcccaaagacgtcacaagacttgaagtccaaggcatcatgacggtcgtttatgatatggcagacacaaaactctatgttgcacacaagtcagaacaaatttgtgagcatgcacgattaagtgatgatgaggaacccagtctcgtcgtctatataaggcaggtaaggtacccactacaaaatggaagatcctcgtataacctgagagagcattctcatcttccagacactttctaacctcaaattcagagcaagaatatctccacaacacacaagacgcggggtattac

SEQ ID NO: 97856 - DNA, 331 bp, Zea Mays
tcggtgtagctagtggctgtaaatctgatttagaaggcaattgcaactgtaaatacttgtatcctgcagtttcttcacttctcctacatttatcccccgaaaaatcactgcaccaaacagatacatgtgccacaaattagtttgaacacaagaattatatatcctgaaaactcaaattaatagcattgcatgacacaaatggaaaataaaacaatgtggatactgcttcctaaaaaatacaaaacagtagcacataatgattaaaacggtctaaccgcgcaacagtcgtcgtggaagccatgacggctgccagtccccacttcatctctcc

SEQ ID NO: 97857 - DNA, 398 bp, Zea Mays
tcggcattggtttttatggcttcggactgattaactttttcctatttcagctgaattatctccgccgccggaaccgttcgatcccctggccgatccagaaacgaaggaagtactggagatcattaatatggttgaatctattgttgatgaagtcgtcaataaattgctaaatgaagttgtggagaaagtcctaaaagaagactagcacttattgtaaaaacattttaaaatggccaatgtaagagacactagaatggacattgtgcttctattgtaactgttggaacttgctcactggcgcaagctgatccaacgggggggagtaatagcgcaaacagggtttcagcacgtgatggcaaaagctctgttcatccagcctctcaagggcactgtgcggg

SEQ ID NO: 97858 - DNA, 455 bp, Zea Mays
cgtcccaaggtggtgttcgtgccgcgtttgggagaataggttctaggaaggagaagccacatatgctgcagacaaggattaatacaggtccgttctctaaggcaggaaagaatgtggtccattttgttggtcaacagtggactaagtggttccatgcggaggcgattccagggcataaagctaacggtccatatttcatcaatgcattcaaagagacacaaaacatggtgaatggggatatatattttatcattttcaatcaatgcccagacactacaggagtttgagtgctatagaagaaagcaaggagagtttgttatgaaaaacaagcaagaaaggaaagaaagcagtggctagcgatgatgagaccgatagtggtgataaaagtccacaataccaagagtctgtcgatagcagttcagtgacatcttctgatgatgctggtggtggtgctg

SEQ ID NO: 97859 - DNA, 348 bp, Zea Mays
tgcactcgtaccatgtgtgttaccttaaccttgcctgaagaattgatccactgaatgtggtatggatgtgggcgtggacgtgtggtcaagccaagcttcttgaccaaatctgaactcaccaaattattgcagcttccaccatcaataataacacgtgcacgccgattctcgatggagaagaaagtctggaacaaattatggtgttgctgcttctctaatgattcaggctgagaactaagaacacgctgcaccatgatgcttcgaaggttcgccgtagcatcagcaccaagcatggcatcatcattagcagcaacatcactggagtcatcatcttcaccctcaccatcg

SEQ ID NO: 97860 - DNA, 794 bp, Zea Mays
cttcccacttccattcaggtatcgggaggggttgcaataggcctgcaggtttttggtgctcggccttcgttcgttggcagatgtcacaccgagccacatattgagctatttctttcttcatccctttccactagtatctgtttttgaggtctaggtacatcttggtagtccctgggtggatggagtaggctgagttgtgagcttctttgagcaggacttctcgggcttcccctttcggtacacacagacgatttttgaaccaaagggctccttgttcatctatcctgaggtccgggagttgttccttgcgggccctttccgcaagttttgctgtctctaggtctaggcgttgagatttgcatatgaggtcttccagcattggtctgacttcgagactgtcgctgtttcccagacatgtattcagttgagccgattctttctttcaatcttctagaaagttggtcccctttattccaaatggttttcgactgagggcgtctgctaccacgttggccttctcggggtgataatgaatctccaggtcataatcctttattagctccaaccatcttcgttgacggagattgagatctagttgagtgaagatatacctcagactcttgtgatcggtgaaaatgtgacatttgttcccgattaggtaatgcctccatatctttaaagcgtgcactatggccgccaattccaaatcgtgggtggggtaattttgctcatgcggcttaagtaggcgtgatgcataagcaatgactttctcgttttgcatcagcacacaccat

SEQ ID NO: 97861 - DNA, 384 bp, Zea Mays
cttgaaagtcattcctactattggcactatatttagatcaatgtttttttgctgcaattcattgacaatgttgtttgtaccacggattatgatcataacaatctaatcaatcaagaatcaaatacaacaattggacttacatgtgaatgcagtatatgaggcgtatccatctccctggagctaatattggacatcggaggtcgaatccgttgttctccttcctccccattgcttatctcgtcgattacaggccccagtagaataggaggtggtgtaaccattaagttaccatcaactactccctcagtgtctagacgaatctgaccgccatctcctaccatcgtcggcgattgtccagagccggccatctccaccgccaactag

SEQ ID NO: 97862 - DNA, 372 bp, Zea Mays
gaaactttccacgtggtttccttccttgacccattcttttcttacaatggtggaactactggaccaaaagatacttttaaacacgccagctgaaagacggcgtcttcttgaagaggttccagaaatcgttcctgatacagagtacagagaaaaggaaactgaactccaagttgcggcaagcaactcttctcaagagattagaggtgccaacacttgatttttttgtttcttaaagcacttttacctttgcatctgtttcacattcataatggtcccgaatacttaaatcgttacatgctcgatccaaatcgacttccacttcgtccgtgagtgtgtcgccgtcgacgatgtctaggtccttcacattccgac

SEQ ID NO: 97863 - DNA, 808 bp, Zea Mays
gccatcgctgtcgtgacggcacgaatcaacctgtttgctctctcaacagtgttcttcaaccccattgtgcctctttctcactataagtctatagcactaaccctaatcccttcccctctcgactgtctcgagcaagatttccattctcctctagtcctccctcaagttagatctcctctggtggccccttgccggtgactccggtgctttggttggtcaggtgaactctcgattgttagccttttttacttaatgtgttttgaatgtcattgaggagccagagacgtcgtggaggggccagtcacaaatttcagacggatctttatctagttgccgagtatgcaaggcatgagattgaggcacacaatgaggctctggatgccatggccctgttcgacggcaatgtagacatggttaccaacgtcgatgttgtgccgccgagtaggaccatgacgacgatgggctccttgagcccatggccattgctagcatcgctacttgtgacagtcgcatatgaggaagagactaccaaaatctagactctaggctaactttaacaaggtgacggcgttcgacggtaaaggtaaaaggtaaggatctttgatatcaacaaaccatgcaagagtaccctatctgctagatcttcctctagtattagacacttgctacaacaccaagaatattataaagctaagatcaaacatgatcgagcggacattatttattccatacttaagtataatctcgatggctctgtgcaacgttgggagtattatttttcagttgcgcgaactgaactatgttgttt

SEQ ID NO: 97864 - DNA, 675 bp, Zea Mays
gctttgggatgcttgagagagtcaattcaatttttattaactcaagctatcaatctacagtgatctacatatccaagattgacccaaggttatttcaaattattatgtctaaaactcatatcatctcgggaagatattaatgttgtaggaatcaaaaaaaactaatcccatgtcgaaaagtcaagatctacaacatggaggaaagccaaaggatggtaacaattatgttttcaagtgcaagtatctcaaattatcatttcttatgtgtcttgtgtagttacatagaaaaggaagcactcaaaatgttcttaaaattatgtcaccattccttgaagatattcctcccatatggtagattgtatattcatcattcttatactatggcaatctacatgttctaaaattattaaccaatccatggcatgttttacacttattatcttattactgccatgattctagatatagagagatattccaagttcttaaaagaataaggtgtcacgataggaattcaaatccctacgacacctacaaaaggaagattctctctataactagaatagtgagtctaatgcttttatctaaataacccatttagtctcactagtagagaatatgtttctctttggagatgcgtaatttaacataaaaagaaaagtcaatccaatgact

SEQ ID NO: 97865 - DNA, 677 bp, Zea Mays
gtcacctaagggtgcgaagtcgtctactagacgcaacatttatccatgcaaaaattcgcctaagggtgcaaccaaatatgcacaagcagtgcgcgaagtcacctaagggtggaattcatttgatagactcaacatttatccgagcaaaaagtcacctaatggtgcaactggatacgcacaagaagtgcccgaactcacctaagggtgcgaagtcatctgtaacgcatcactcatccgagcagaattcgcctaatggtgcagctagatatacacagcaaaacacaaaagtcaaacataaaaaaatgtgcgaatacattcaaaagctgaagacccacatagtcgttcctcggtgaaggggggcgagggcagcgtttgacttaaattcgtcgagccacgacaatacaaatcttctaaggattacaaaggctccactttcgggattagaccaacctcccaaaaattaaacaacataagcctaagctctttgccttcaaaaagcgcactaaggtccgttcttcaaaacctcgctcagttgttggcacaagaacaatccagtgaggcccctcttccgattgtgctctcccttgcttgagggtgcaggggtgacatacgaagctcctcgtggagcgagacccatgggcgaggtcctcttagtcccataaggcgacgccttcgag

SEQ ID NO: 97866 - DNA, 831 bp, Zea Mays
gttgttcatggttgtgagctgcgcgatgatgcggtccagcttcaccgaatcaggctcaggatcgcccgcgacgctggacatggtcggggcacttgtctccgataccaatttgttgtggttgctgcgtggtggtcggcgaggggaacgcaggggagagtggagaaggagagtggcttgagaacaagaacgcagagcgtagcgaggaggtctgtcgtcgccggcggctgaaggcgccaccgtcgaagaacagcccacctctaggaggtaactgtattattcttcgatgccttcttacaaactagcagccagcctttatagtctaggcggcagggaacacacccaatcatcttattgctttccataatggaaataggaaactctactgtctgctacagcagaaataggaaactactgatatagcagaaataggaaactactgattgatatactggagataggactggcctgatcctcttcccttaattcggctgcctgattgttgcttccttttcctgttcttccagctcagttgccttcctgagcctgcgcccataggtgttcttgtagaagaatgagtccacaacacataacatccactaaatccaccaaataaattgcaccatacttgacacaccatcaaactaacggttcaaatcgctggataacctcttctaccttattcaaatcaaatggacaatattatttaaatcatcctctatcccgcatccctcctcccccccaactccgctgcccctagcgtccctcttcctccacgtccttgtcgcccctccccctcctccttacttgcgccaccaccaccatcaacccctc

SEQ ID NO: 97867 - DNA, 527 bp, Zea Mays
aggggggccatcgagctacgaacaagttatccaagtgagatccgaccaccctttggctgggcgaagtctcggcgagtgatcccactgggggctcgacccactggggcatctcattaagtcctttcttattcgatcccatatcgaccctcgaccaaagaggggctccgtggccaccccgtcggctggatttccacgagagaatgtgaggtacgaccttggacgtgaatctgagcaaatgacctatgggccggtcacctaacttgcgactcgctgggagcttgctcgattcacccctcgctctgcttggggattttaaatgcatttcggtttcttacctgagtggttcgaggtagttactacggtgacacggtaataatgggtagccatcatcatgttgcttggtgtgggtggcctgttaggaagggaggcaatttgcctacctcgtcgtgcttggtgtcatacctgggttctcggggcaccaaaacccggacgcgaacttcaccaagtgtgctgggatcaagtctcac

SEQ ID NO: 97868 - DNA, 519 bp, Zea Mays
ccaccccagggtacaccagctcgtcttagaggagggcaacagtctcaccagtgacttgctcagcagacaccacaggtgacaccgcggaattcgcgccctcgtcaggttgtccccactggcaccccggcgagacctactggccagaacacagctacaagcaccacatgcttcaagtgtggtgaggttgggcactatgctaatgtccgttcgaattggaaccccaacacaccggctcatggtaattctcagggcaagcagacacagactccagccagcaactgtggttacagtatcaccagggttaatcaaatcaatgtcgaaggtactgaggatggtcctaacatcgtcatcggtacatttttcattaattccgtgtcagttgctatactttttgattctggagcttcgcattcattcatatctactcgttatgttcatgcagatagtctaccttaccttgctatgcgtagacctatgatagtcattacacctaaaggggcttatgaggcaacatatatg

SEQ ID NO: 97869 - DNA, 490 bp, Zea Mays
gagatgcaacgtttcatctaagaggaaaagtagaaatccagactcctccaacaagaaatagtggatctacaacgccatcacagacactttcccgagccttcgagcaggggccctcctcaaggggacttcaaagaccatggctggccggccaacaccccaaaacattccaaaactttaatttcatagatgaaagatgcccattgtctgcacgactacaatccaccccttggtcgcagaactaccactcagaaaactagcccaagtacaatggcaacacttatccatcataatacatcatgagttacatgcgtcagtggactcatccagaggtgatgataatgtgatgatgaagtctttcattatcactttagagagatgaaagggaaatggacctcgaataatttctatattagttttggcgtttgatgaccaacacaactaattagactaactagtttggtaagtgattgattatagagttcaaagtatg

SEQ ID NO: 97870 - DNA, 707 bp, Zea Mays
ctatctttaacgtatacaactttatatctaactttttatctttaacgtacatacctttctatatttaacaagttttttattattattattttcccgaccggtcccccctcccctcatcacctgtgcttccgtgaaacaacgctccgaattcaacagtgcataaattaagtgacacaaccctaaactttcatatgactactatatagcatgtgttacacacgatcccgaggagatgatcgatgatggcggtggcgcaagtgaggagagggggaagggaagggatgagggatgattcaaataaagtagttcatggggaagggagatgagttatccaactatttagaccgctgattttgatagtgtgttaagtttgagtacaatatgtttggtgaatttagtgggataatgagtatggggtgatttagttgtgtgacttttgcaaagtttaaactgatggattatatagtggtaagtgcataacttttttctattatataaatatatgtaactttctatctttaacgtatacaactttatatctaactttcgatctttaacgtacataccattctatatttaacgcaagttttttaattattattattttcccggccggtccccccccctcccctcatcacctgtgcttccgcagaacaacgctctgaattcaacagtgcctaaattaagtgacacaaccctaaaccttc

SEQ ID NO: 97871 - DNA, 464 bp, Zea Mays
caaatttgctgaagtcagatgggtatgttgctattggaaaatggaagtattttgccctcaaatttgctttgtcaggcaagcagaaggagataaattcaggcatgaacagtagctgaacaagatcacaagttcagtgaacctcatcgctagtgatctgcgcaccgtgatttgagcttgccgcgaagattcgtgcttggttcgagtaggatattaccaagggaggatgaaaagatcgcaaggagactggattgagcctatgcgtcgtacccactttctcggtaacgtggccgagcggccctcgccgtggtggctgccgtctctcatggttgcgcaatggcgtggttgtttcaccatgtatctataaccgtggcaagcgtggagttactgtctttgagcctttgtaccgatggacgccacggtgaactcggctagtgaaacatctcatcgcgccgtgggcatacttg

SEQ ID NO: 97872 - DNA, 277 bp, Zea Mays
cttttggattgtacaagcggtgatgggttcttgattagctgttacaattggatcattcagctttgttgattacatttttgtgcagggctagtgagctatcctcggatgagcttgagcacctcgtgatcctggttggcaaccccgctagttcaagttccccgaccgattcctcaacaggaaaaaggactataatgatggtaggttctctcaggattttttcaacactcgtcatgtgtgtttaagacttagagcaagagggagagggatatggtagggg

SEQ ID NO: 97873 - DNA, 614 bp, Zea Mays
tcactcccaaccttgattagggttagggttttcactctccaactctaattcatcctctcgtgctctccaaaatttcgacttagtacgttataatgtgggcctctccaattgccaatgtgttcggttacaaatattatctccttgttttggatgattgctcacacttgctttggacttatttgcgatttaagtctgacaccttctccactttggctaactttttttcttatgtttgtacccagttcggctgcaccagcgtctagtgcgaaaatgttcatgagttcgacaacgcctccacacggtcccttctcacccatggcgcccttctaccatcttgtgtccctacacattccctagaacaacaaggttgagcgtatgattcattccatcaacaacataattcgcttccttcagtttcatgcatccttgcctcctcgctattaggttggactccacatcgctacacatttgttaaaccacctctccacaaaaaccctctcgcaccctaacctcttttttgctccccatggcacctcgccttcctacgagcacctttgggcatttggccacacctactaccccaacctattcgccaccactccccacaaactcgc

SEQ ID NO: 97874 - DNA, 565 bp, Zea Mays
caaatagttatggcacagattggtgacaagggtgttcaagtcattaaggaaatgatcaaacaaaaggtggacaaatacaaatgcttctgtcaggacagcaaagggattctatggtttggagaccgattggttgtccccaagaaccctgagctcagaaagaaaatattggatgaagctcacctttcaaaattctccatgcaccccggcagtaacaagatgtatcatgacctcagatccttgtactggtggaccagaatgaaaagggaaattgctaagtatatatctgaatgcgacacttgccagagagtcaaggccagtcatttgaaggtagctggcaccttacaaccccttcccataccatcttggaaatgggaggatatttgcatggatttcatcgtggaattgcccaatacctcccggcaccacgattccatttgggtcactgtggataggttgaccaagaccgctcatttcttgccagtgcataccacccacaagacagagaaatatgcagaaatctatgttgatcaaatagtgtgtttgcatggaattccgaaaaccattg

SEQ ID NO: 97875 - DNA, 463 bp, Zea Mays
attggatcgagctggtatatgattggcgatttttttattatgtatttatatattgtgtatatctaaatatatactgtaaattttaaaaaacaaaacatcttttaaatgaattgacgagtattttcgagaggtttggtcagcaggtaaggaaattctccatcaagcaacacagctatggttgcagtgtatgtggcttggaaggattgagctttcttttcgcatgggattactcaaggttgcactacttctattctacttgcactgcaccaggtgtcaagccgggaactactggtgtggccgtgtggcgtagtttagttataggagagagaagaactgggtttagtgatccttgcaagggaactggccggctatgtggttgcagctgctagcttgtgttgagcacaagatgggtctttgcactagaaagaagaaagctttaaggaattgtcaagttttggagaga

SEQ ID NO: 97876 - DNA, 583 bp, Zea Mays
ggtctggttggctagaacttgggctagatctagtggcatttctggaggtgcagggaggtgggtctcgctcccttccccccccccccgtcctctccttcgatgcctaggagggacccttgctacaatttctgaggctgtaggcgtggttctattcgaggccatctgccagaggggagaaggatcactactgtgcatatgtcattttttgcaaccacttcattttattcaacaaacgagttcattacaagcatgacagcaaccatatagtacactatgcctcagcgtctcctactaaagtgttcccaaactccttgagaatctcatcaaggctagcttgggatacttcctcgacatcggaaaggttatctagccctcggcaaggcaatgctggcttagactcctcctccaagtcagtctagcatccttggtttttgaaacgcttccggaccttcttgactggggcaaacctcttcggtttcctgtgtagtcctcctttagggtcatgtatgcctcccgagtgttggcttcctcgctttctgccatctcgagactattttggagtgatgtgttttcttccttcagt

SEQ ID NO: 97877 - DNA, 314 bp, Zea Mays
agagggtccagattgtttattgaagcttggacccctgggtggaagcccaaagggtcgagctctctgtgacgttcttgctgttgcgctcggaggacctggaattttctcttgatgtgccctttttcttcgcttttgctctttccacttgaatagctttgttggaaaggtgagagaagctgtggaagtcctggctggcgaggatggtcttaagttcgggtcttaatcctctcaggaaacgggccatctttctagactcggtgctgacatcttcaggcgcgtagcgggccagctctgtgaacttgtgcacatattca

SEQ ID NO: 97878 - DNA, 359 bp, Zea Mays
ggttatctggcacttgttgctcggtccactctaatacgaagtcaactagtgcttgagtcttgattgcagtgcgaggtcgaaactcaatgtcgtgagctcccagcttgcaggctcacttggctattgttccgatggctttttttgttgtggagaatatcccctattggaaatccagtgactactatgactttgtggtcgtcaaagtagtgacagagcttgcgtgcagttagaagtactgcatacaatagtttttgaacttgaggatatttcttctttgagggccccagaacttcactgatgaaatagacgggatgctgtactggataggcatgtccttcttctgctcgctcgactaccaa

SEQ ID NO: 97879 - DNA, 471 bp, Zea Mays
aactctaccagtgaagttggagctgttttagtgaatcatttggcaaaacagctccacacgtgaaggtccttaaaacatgctctcatgcaaggcccgccagagcgagttggagctgggtgaagctactattttcaactctatctcccctccatcgctcatgagagcatgttttaagagaatctatgagtggagctgttttattttacccagcacaaaacggatctaaacagctccaggaataggtggtggagctgtgccaaacaggatccagcataaactggtttcatcataaactcttgctcgcaaagtaacatttatatctaattagcatcaaagctctaactgaacccattttgagaacaccaccaaacaatgtgatttcaacgatgtcatccaactacaagtgaaacatcacaaatagggtgtatgccgtatttacataccagaaatacaaggcataggtgcaaaaac

SEQ ID NO: 97880 - DNA, 625 bp, Zea Mays
gcgggctgtgaagaaatcttattttttctgttgttcagtggctatgtggtcatataatcatgtggtaatgtggacttattttctcgttgtttagtggactattgaatttggactatggctacaacaccttgtgagtgcttgtttccggttaattttttccgttgaggtaaattccgtccgttttcggttaattttccgccgttttggttcgtttccgtgaacccgtataaacccgaccgactttcgtccatggttgttccgctcccgaacccgtttccgatgatgaattgcgggagcggaaacgggagaagagttttccgtccgttttcatccctattgcttcttcagcgatagtgcattcagccatactgcgcctcctctaactccgacaggaaccagttgtcgtcttcctctatctctatctgacctcatctctaccccaccgccgtccgtgccttcagaaggcgttcccggttagggatggcaacgggccggctataataaatacccgcgaaaaattccagaaaatataatcataactagcaaaaaatctagaaaatttatgcatatagggaacacttcaaacaagtattcatgaattattcgtcaacacaggcatacagaa

SEQ ID NO: 97881 - DNA, 350 bp, Zea Mays
ggttatgttgatcatcaaacaccaaaatcattttagccaaatggctcggggtccatttaaccctacaatacataagatgctcagacctcaaggcatcattaccttccaggacaacttacaaggacctgaggggtgctttcggtggactatccatacgacccttaccgtcggaccctcggtagtacctccaatgacgaacaccgatgcatcaacaggggatgacctcacaatccccatgaatgaagcatctactgctaccaccatgtggctggctaaagaaaccaatagatccaacctcagcttctctgatgaacacaatacaacgatcatcagttctagcctcacaacca

SEQ ID NO: 97882 - DNA, 598 bp, Zea Mays
ggatgaatgagaggtattctacaacttcaatgtggttgcgaatggtgtatacatggccttcctttagattagttggcaagtcatgatgagccccaaccagaggtagaggggcaataggaggagggagctccctatccggttctgcgacagataaccagacctccttgggaatatcacaagggtccgagcaccaagcccaaagaacaaaggatctcgtgcgctccgtgcgcctcgagtgctcctggacatagtgaatagcacggctccttcccaaatccctagcagccacatcttctccccagcagtgaatcggaattccctccactctgaccttcactctgaactcaaagctgatcttcctggcatagcactcctctgaccagtccccgaagtgaaacacccgaccacgataggagactgacctcctatccagcgcccattgcttggttcttgaatcagagaagatgataaagaacgactctagaaagtgtttgacaagttgatacagaccgtggtgaagatcaaaagtctccctcaccatatcccctgctgacagcacgtccacctcatgactgtttccatcaaaagagcaaaccac

SEQ ID NO: 97883 - DNA, 466 bp, Zea Mays
cactccgcaaaacttgcactacaaatttaacgtgaccatacgaagcgtctaatcgcaatcatgaacacaatcacaacaccacataccactcaagtattccaacatcaacttgctaaacgttagaaatattagacctaaccttcatattactaaccatatcacacatctacatgcctacccatatccttcgcataaaacctaaactttcacacaacgcaactacaccacactgctgaacataatcacatcccacatgctacaaacaagacaatcatcacaattaacagatcaactaatccaattatcaaatcacttgccgaaaaagcgaaacaactcacccatacgaaatcggctcaacccacgggaacaacgacaaactctggttcaggctttctgtcgagcacttgatgagcaacgaacaagacttcattttcttcatttacagctccaccatcttccagcaagc

SEQ ID NO: 97884 - DNA, 819 bp, Zea Mays
ccgcgatcggtgccatcagggaagatcatttcttggatgggtctacgatgcgggggtgttgaagatgatggccaaggagtcatcgtgaatcaacgtctcatcccctacctagcacgcaagctattggtgtttttgacctgactacgcacgacggggtatcctaggtgatgcttttgggcaggacgacgtcgttgattgtgactcgatggtacgtgtggatgcatgtcagaacacaacatagtttatacaggtttgggccgttggaatgtgtaataccctatgtctttttgatgctgagtattgagcattgccggtattcaaaggttacatatgagttgttggcggtgatggatgaattctcctatcaatctaatgacgacgtggttgctttaagagggatgatgagatatgatatgggaatgagatgaggtggttttgtaggggtaccccatcatccttatatgggtgactggagggatatccctttacaagctgtgaagtttatctgattcccatctcatatctttgacgtggcaagtgctcctgctcaccaggagttcgatcgcctttcctccaagttatctcctgagtatctagctcttcaggtacatgtgaattgtgtgtgcgagacattagcactccttctgtgtcaaacatgtataactcagctgttttagtcaccacacttcttggtcaaactcgttcagcctggactcggcccaacggtacgccttgctaggtgaaccatcgggggcccatcatacagcccatggtacattcccatgcttataagtacccatgtgatatctatctccacag

SEQ ID NO: 97885 - DNA, 306 bp, Zea Mays
ggcattttgaaagggtagtgcaaggcaaaagagacaaggaactacttgcagaatttgattctaggagaaaacaacccagaattaaagtaatgacacccatgttgttgcaagtaagcaagttgtacacacccattatttttgaagctttccagagtgaatatgagaggtccatagcatcacgcattgaagtgttaggaaataatgaataccttgttgccattgcaagtcttgatcaagaattaatatttgaggatgagcatagagttactggaaatcccatggaggaaactgttacatgcacctgca

SEQ ID NO: 97886 - DNA, 438 bp, Zea Mays
aaaaggtattcaatactcggcgccttcacgcatgcagcagcacgaaggtgggccatttgcaacaacgacatcttccttggttctttaattgtcgtatcctactgcactacatcgctagccggttttttgttgtccttcttgactaatgcctgggtttcatttcgagaggtcactggacacatggttggactgcgaacgcgacaaaagtgttgggcaagtgagtagggagaaaatgacggaatcaacgggatggagggagtacttataacacttgatattggtttaagccaagtgtttgagggaggttataatacctattaccctttggttctagcgcacaccattgtaatagttgtaccatgggagcttgtagtcttgcaagatcacaccaactccatttgtggtgtggccattgctaggtactagatgaaacgaggc

SEQ ID NO: 97887 - DNA, 420 bp, Zea Mays
gcaaaatagcttcgaaggtggaaggatttagttctctcgcgttcgaaaatgtgagtttatgcatagaactgtgcctctatttatagtggtgaggtacaacttcgtataaattataatcatgcctacaaattcaatacatatgaactacaagtcttgtaagggtaatgtcgtcctttattcccttcttatcgtgatggttaagcttctggattcttctcttccacatttgcttcatgcaccaatgtcataagctctttcaaacctgtccgtatgtcagctttgtgaagttgaagccatccaacttcgtctccttttcatgcactacttcagacgaaggccaacttcgctatctttgttggagtacctgaaatatgctcgattcattaatacactgctttgacgaccttcggcaatagaggc

SEQ ID NO: 97888 - DNA, 348 bp, Zea Mays
tattaagtctcttttttccttggtcgttgaaggcgactgtcatagcttcgtcttcagccatcgagtaggctccaagcagctcatcacttgttacctctatagcatccaaccaatcatcatttggctcgtcaaaccgatccctaaaccaaaatatgtacttcagataaatcaggccaccctggctggagccagcgacagcctccttcggcatttcccatccactcgcaaggggccatactctgtaggcaatatcctcttggatcaaatccctcgtgccaatgtaggtgcatatagtattgaaagccatttggcatgcttgcacatcatttccgagtgcggctgaaggtt

SEQ ID NO: 97889 - DNA, 479 bp, Zea Mays
ttcacttattatctttcggatgagttggcttccttggaccaccatctttttttccttctctttctgtcgaatggcccaagaatccaaccaaaagcaacaaagaaatattatgttagcaggatcaataaaactttttccaccaaaaaaccaatcatttctggttctccaaatagcccaaaacaaagccccacaaccaaaaatcagaagatttgacattttgtttttaggatttttcatccagctatcacaaacttcatcaatattttttggaatgtaatccaaattaagggcaatttgaaccactctccagacaaatctggcaacagagcatttaaaaaataaatgatcaattgattccatgccaccacagaagcaacactcatcagaacctttccaatttctttttttcagattgtcttttgtaagaattttgtttctaatcaccagccatagaaaaactttaattttttgtggcaatt

SEQ ID NO: 97890 - DNA, 322 bp, Zea Mays
tatatgattaatgatgatcaatgtagcctacgaggaggttgaattatgtgacttacaactctgcttggtgatgctatctctaccgaaaaaagttatgcaactagattgtaattctatcaactagcctattaacttaaagctaggaagataaatacagccatagaaactttttcctcgatcgtaactgaagaagaatcccttggcggtcaagaaaacaaaaacttgtgcgcgctaactatatagctagccacttcagttatgataatatggtccaaaaaaagctatccaactaagatccaactcaactcgaattcatttggac

SEQ ID NO: 97891 - DNA, 346 bp, Zea Mays
tcatgcgggtgcttggtcttttgctaaacttgttatttggctctcttctttgtccctagttcctgtttcatgccgagtttctataacagtacctgcatcctgccttttagcttatccgtggaccagtgctctttctttccgctttgaacggacgcctacaactagataatttgtcggatgacaatacaatactacaagcaggaggggacacaaatcctttagattgaagtaactcaatctcaaaagggcgagagtttgattcaattagaaatctcaaatcaaggcaaatccgttcattgaaggaagtgagctagctcccatcacttcatctgctgcctgttcaact

SEQ ID NO: 97892 - DNA, 782 bp, Zea Mays
atcgacatcgtcatgatttttgttgtatggcggatcgatgccttgtcgtcgtagtctcggggaattttcggaaatgtgctggtgttttactgatggggtgaatgtacttctgatgtcttagaataactgcatgtcgaacgagtatccgaaaatggtgacaattgggtatgttggtaattagaaaatagtcacgacgttagccaatagccaagcttatgccgaaatttaaaatatgggcaatttgagttgaaattatgcttatctaggcatgaggattaataataataattggaagaatagtcgttcatattggtcattccaattaagaatgattttgcgtgtgaggtgaggtggtgacatgcccaagtagtcactgcttccctatgtttataagccgagtcaatacccattaggcgttcattaattttcacgtcgcgcatagtgtatggttgtactcgtgacaaggaggtgtaggtcttactcaattagaagtttggttggatgtgataagtagattggaagtgcgggtttgttaagcactgtgttgttggacgtgtatgtcgaagtacgttgtagtagtaattgcgttaacttgaataagagtctcaagtgcatgtcgtgctatggttgtatttgaggtaataaattataagagttgcgcgatatgaggtttgaacgatgtagttaatatggattggactgtagagaggtggtgacatgccgaagtagtcattgctttctctgcggttaagtcgagatcatgtgtgatgacgctatttacg

SEQ ID NO: 97893 - DNA, 428 bp, Zea Mays
aaatgatgttcacagcaagaaggagaccatgttctattgaactacgattccatctcaggttccatgaacagttcacactaaaatagacggccagaacacatactaactttgtttaggtcggaatttatacggttcgaaagctaaggagataagatatccaactcaattgttcctgacttcaaattcgtttggagtcatcggttatcaaaacaagtcaacgttaagattctattttggtgttgtgacaccatttgttgtgttgttcgcccatatatcttgttggagcctactaggggtgcgtctaggggtcttgcacgaccctaatctctatttaatcgatggtcgtcgctgccattagggtggagtttttcttagattcactctgtcaccgaacagtatcccgttcatcggtttgtgagacccccgaa

SEQ ID NO: 97894 - DNA, 744 bp, Zea Mays
cggagctccaaactgagacggtatagaagtagtcggtgcaggagtaggcgcggccagatactgaggaaaaccctgcatcgacacgaactgagaagtcctgggcacatagaactgctgcggagggagtggaactaaaaattgctgctcagcgcttgacatcaagttgaccgtgccctaagaagaggaggaagtcactgactcccatctgagcttcccattgggattcctcctacacatcacatccttatgatcttggctgtagatagagcatctgccactccactgacactcggcacggcgatgtgcatcaccacaacgaaaacacaccagccctagcccgggcttaggaacagcccgatacctctgagtacttcctcccaaagtacccgattcagaggatttgccacggtagggatggtggcgctggtgctgaggcttgcccctcttgtgggctggacccccagtgttgcccctccttgcgtcctggccacgaggctgatcaacacccgaagacttctttgactccatggtgtactggtgttgcatctccacacccaatgcctactccactgtagtacggaaatccaccaacggaaaggctcccagggcatgcctgatagaaggtttcaggccctgacgaaaattgctcgccttctccatttcattgtaagccacatgaggaacaaagcggaccatcttgttgaagcccacttcatactcggtgacggacttcttctcttgctt

SEQ ID NO: 97895 - DNA, 516 bp, Zea Mays
gttctagcgaattcaaacgacactatctgtccacgccttgttaggtctgaaattaatttgttcggtcatagattggacgcgtggctggttgaggcatatggctctcagctggacatcaccctgctctgtgcttcaatgcctctgctgattggacttgcagttcagtagctatatttggacttcctcccatctcagccgaactcttcctttcgtcacagtacattcattgcgtatactgtgtggatatgacttctttagaaaaccttttgaaaattcttggcgacacacccaatgggtgtgcccaaggggtgtcttggtacatagagtgttcaccacactgtcctggagtagtaacttgatgtgaccgcggggtgtaatcatattgcctgagtagttgaccttggtccaaacggtgtcgcgttacgcgaagcggcgcctgttgcctgactcattttcaggcggcttgaattgcttattgaatacttgcgactgttcggcgagcgtggtaggaagtgg

SEQ ID NO: 97896 - DNA, 292 bp, Zea Mays
ttccaaatgttatttgcctcagatgccgtccaggactcgtggacaggatggtgcgggaacctcccatgggagggaagctactcctaacccgccaccagtacccccaaccttggctgaggctatcgctgccttagtcaatgcaacagccgataacacccgctttctgcgggaaatggcgggacaacaaatgcaacagcaaggcgggcgagcgtatccgcaaggaccccgcgaaacttcatatctggatttctcagaaacgcgtcccctgctatttgtcaaggctgaagatcct

SEQ ID NO: 97897 - DNA, 661 bp, Zea Mays
ctgaagagcactcgcgaggctacaaaagttcggacactggtgtgttgctggagagctttggatttacatcaacaagcgtggatgagggcttgcagttagccatgccaacactgtcaaggatctcaaacatatactgacgctgagagagacctgagcctgtgtgctggacttgcatacccagaaaatgatgatgagtgccttaatccttcatggagaactcttgctaatgagcagcaatgatgcgtccgagtaagtccgagtaactcgtagagggaggctgtcagcacaatgtcgttgacacaaagtagaagataggcagtatctactccatgatggtagacgaaaaggacgtgtttaacttggcttcaacaaaaatgaactgtagaaggtgggaggcgaacttgctgtatcatgcatggggtgcctgtttcagtccattgagagaatgtttgaggcaacacaagtaatcaggatgactggagtcctcaaatccagaaggtttaacacaataatctgtctcggacaaagtaccacggaacaaaacattggcatggaaaaatgtcacagctgcttttagtaaccaatgctaggccggctaggtgcatcccctaatggaatttcaggtggggagtcttttcctccggtagaccctaaaaaaaag

SEQ ID NO: 97898 - DNA, 366 bp, Zea Mays
gcccatttgaaactctagttcatgatgatgcttgtcataattgcctttcatcaccttattgtgtatcatctatccttaatctctatagaaattcatcacaagaaatcattttttctcaactactcgtaccttggactgccttgcctcataggacatcaaggtaggggggtcaccaccataaatcaccttagatggagtcatgtgtagagctgtttggaaggatgtgttgtagcagaactcatcccaaaggtagctagcacaaccaactcttcgattggtctctactcgaccacaaagcagtgaaggtaaactctcaaaattatatatgttttctttgactgacatttgtttgcacctagaaggcgg

SEQ ID NO: 97899 - DNA, 652 bp, Zea Mays
caaagccccatcgagcgagcctacgaggtgggacgaatgaccaaagtctacgacaagcaagtctgcaaggcaggccgaatgaccaagtccccgccgagcaagtctgcgagtcagggcgagcgaccaagtctccatcgagaaattttgcgaggcggggagaacgaccaagttcccgcctagtggacccgcaaagaaggaactcaggctgacgttgctggcccacgatggtcgcgacaagacgcatcatcaccaaactacgttagaccatatgtacagtaccaaaagggctatgacaaacatgatggaacacctccgtgtgcaccctcggatatgccctcactgactcatggggccggtcaactccaattgcggtgaccttagcaccgaagtctctacagtgacccatatgctagaaaggacaggacaataccccatactgggtgtatgcctacgtgtgctagaaggtgacgcaaggggtttgacggaagattaggaacacgaccctgaacctcaccgtaagcccactttgtaggacccgccaggtactggaatgaatgacaccaaacaatctacagggatccgtatggaagagcggacagtgtagaatgtcgtatcaagagaacgacaacgcatattcacttgtgaatatgtt

SEQ ID NO: 97900 - DNA, 623 bp, Zea Mays
ccggtgtagggtcggcctgccaatgatggcattgaaagggaggttaacctccgcaacgtcgaattggacgttcttagtgcgtaagttttcctcagtcccgaatgtaaccgtgagtgcgattctcccaaggggatacaccagttgagggcccactatggagaatgggcgtgagggccccaatcgggaccctgggatctgcagctacttgaacgtagcgtggctgatgacgttgagcccatccccaccatcaattagcacatgatgcagcttcatgttggcgatgacaggggaggtgatgagtggtagtataccagcccttgccattttttcggggcagttggatgccccgaaggagatagtggtgctccaccaccgctgatgtagggctgccttcgagacccctggagtcgccgaaaggacctcgtggcgtagtgacttcacgttcctacgagaggtgagctcccagcttccgccatacataacgtatagcttcttgcggcggtcgttgtcatcaccagagtcggagtctctagtgagaatttccttgagaacttgcttgggggcctgatacccgaggtcccgttctcccgcggccaggtcgccttcgtcgaccttctccttgc

SEQ ID NO: 97901 - DNA, 614 bp, Zea Mays
aaataagacaagttgtatttgttgtgatgagtagtttaggaaatgcacgtttacgtggaagacatattattagacgtgtgtggcgaagtgctttatattaatggttgtgttagacattgatggaagtgttgggatgtatgtcgtgatatagttttattcgcaatagggaattagacgtagtgcgtgtaggcatgagattgaagggtggtgtagtggctatgcgagaaataggtttagtattcaataggctagctgacatgttcggttagagttgttttgttaattttgcttctatgataaagtgatgcttgctttaatagttgcatcgtgtgatatcccataggtcgaattataggttatgtgaagaatatttcggtggatgtttttgtcacgtatgtttagatgagttatatgcaagcaaaggtggtgtattggttagacgaaaagtagtgtggtagacgggtgtagtgtttctaaggagttagctaataagtcccgtaagattgcttatgatgatttttatgtatgaggtgaagtcgatatcttgccataatagccgcagaaattttacgaactctgctagtgctttgccggttaggttaataaaacttgtg

SEQ ID NO: 97902 - DNA, 568 bp, Zea Mays
tatctgaaaaagtgaggataaagatcagggcactgtagaatcggatgtgtttgagtgaattggggtaaggatcgaccgcggggaggtagctttcgacgtgtcgcgtgctcgcggacctagcccgagcctagccagagataattcaccgacggccaccgcggctcggtcatttccaccgccgtgtcgctcatgccttgctcctccctcactgtgtcccttctttacgtggtaaccatgcacgaacgatgtaatccgtggccatggatcgctagccagaccaccgggcctttaaatagccccgccacccacggcgaagtattcacatcatcactagtgagctcagctgaagcacaaattcacggaatcctctccacctctcccaaaattggtagtgcacggtgaaaccatagtcctttgtgaccgtgtagccccaacctcacctcctaattccgcgaggacccgtcgcggcaccgttttccccttttcagtcaccagcgagcgaaaatcctccgctctccatggccagccactcccaggtctgctcctgctcttcttaatcgtgtttcag

SEQ ID NO: 97903 - DNA, 645 bp, Zea Mays
ttttttttggatagatggtgttagaaggcagttgagattaacgatttggtctctcgaacgaatccaccattttctatgcacatgttatgtattaataatatataatgatagagagctgacagtctgtcttttccacacattagattttagggttttcctgtgaggctgtgaaaaaaaccctttatgtgaggaaaaaatatttcatgagtaagcatgctatgtcaactaaatcgagtggatattgtgaattgtgaactttgagtctgtgaacttgttatctttatgaacttgttatactataaacttgttatattgtgaacttgtgatctttgtaaactttttatattataaatttgtgatccttgtgaacttgttatattgtaaacttgttatatcatgaattgtgaacttgtggtctttgtgatcttttgttaatttttttattgtgaagtttgatatgtttaccgatcgtatttaagatttcgaccgttaccggtgtattttccgcaccgaactttcgtttctaatgttttcgaaatatcaatatcgttttcgttttcgttttcggagttaccgttttcgattttgttttcgataaaaaatataaaaacggtaatagttttaatgtttaccgacagtttttca

SEQ ID NO: 97904 - DNA, 886 bp, Zea Mays
gtgggccaaaacatgaatcgcagcccaactcgcccacgcgacagctcccgaccccgtcgcaagcgcccaaccaaacaaattctactgccctactggtgaatgttttccccaaattccaaattcccaaaacacatcaaccgaatgagaaaaaaaacaaaaagaataacgtccaacttctcttttttgcaaaccgggtatcacactctaccccccttaaaaagaattcgaccgcgaattctgacgcttctatcggaacgacaaaaggaaagattaaagaatcaacaacacttacccacaacaaaaagttccggatacttctgccgcatcagctcctcaagttcccacgtagcctcgcgctcagactgattagtccataagaccttgacatacttaattgatctcttcctcaatacaagctccgagaattccaatatacgcaccggacgacactccaaagtcagatcctgctgcaccgcaattagttccatctcaatctgatggtccggatcccgcaagaactttctcaacatagagacatgaaaaaccggttgtacccctgccatggaatccggcagtagcaagcgataagctaggctgccaactcgggccaagatagagaatggtccaatgtatctcgggctgagcttcctagagacaccgaaccacacaactcctttagtaggtgataccctgagaaggacttggtcacccacagcaaattccagatcccgcctcctcacatcagcataactcttctgacggctctgagctgccaaaatattctgacgtatttcctgaacctttttagaggtctgctgaacccaatcaggaccaaccagagatctctctcccaaagtctcccagcacagaggggagatacaccgcc

SEQ ID NO: 97905 - DNA, 336 bp, Zea Mays
ctcaagctagcaccgcttaatttttcactgaaataagcaaccggttttccttcttgtaacaaaacagcacctaacccaataccactagcatcacattcaagttcaaacactttctgaaagtcgggcaattataagagtggagcatgggttaacttatctttcaaagtattgaacgcctcttcttgtggggggtcctaagcaaaagacacacctttctttgtgagttcgtgcaaaggggcagcgatggagctaaaatcacgcacaaaacaacggtaaaatcctgcaagtccaagaaaactccgaatttgggtgaccgtcgttggtgtaggccagtca

SEQ ID NO: 97906 - DNA, 282 bp, Zea Mays
tgctactgcagataatacccgcttcttacgtgagatggcgggtaatcaattccagcagcatggcggaagagctcctccacagggaccacgtgaaaccttgtatctagacttctctgaaacacgtcccccactctttgttaaagcagaagaccctcttgaagctgatgagtggatcagggtaatggagcagaagttcggattaatccgttgcacagaaacacagaagtcgttgttcgctgctcaacaactaagaggacctgccagtacctagtggggaaattt

SEQ ID NO: 97907 - DNA, 487 bp, Zea Mays
cctgcctgtggtctcgatgctcctacatgtcactaatctttatgatttccttgtcttggacaaaaagctagcttcggtcaggctcccttgattgacacttggagccgtccggttgataagttggtgataacttggcggtgcagggagcgaggaggaaagcgcccgggggcgtagagtccgtgttgttggcaacgaaaaacacgggcaacaagatgctgcgccagctgttggcattagggcaacgaaaaacacgggcaacagatttgtgttgatctggcagcaggtgcaggtcaatggtcttaatccaatgatgcaaccatcacttctcagacgtgcaccgcgctcctgctggttaatataatactcagtccgatcctacgagtctctctctctttccagccatcatcaacaatcacacgggatctgagctgagctgagctgaggatctccaacaagatgcgctgaactgcaatcaacacaaatccgg

SEQ ID NO: 97908 - DNA, 506 bp, Zea Mays
cgaggcggtggattggctaacttacgtggaggataagatgaacgtctttgagattgtgtatggtgatcgtgttcgctttggcacacaactgccgaagggagaggctcaaatttggtggagaggcgtgtaggcagctcactcctattcaccaggagtcatgtcctgtgatgttttcatcaggcagtttgagaggaggttctactcggtcaccttcctggagaaaatgaagattgatttgcagtcctacaagcaagagaagaagtctgtcacagagtatgaagtgggctttaacaagatggtccgctttgttcctcatgtggcttacaatgagatggagaaggcgagccagttccgccagggcctaaaaccttctatcaggcatgccctgggagcctttccgttggtggattttcgtactacagtggagcaggcattgggtgtggagatgcaacaccagtacaccatggagtcacagaagtcttcgggtgttgatcagcctcgtggct

SEQ ID NO: 97909 - DNA, 479 bp, Zea Mays
cccgtgggtggaaggtaatatcctaatatgtgcccgcctgagttcaaatcggatttgggtctgacccacaagccaaaaacatgtatccatacccagctccgttgggtcagattttcgacaaatgcgaatccactggtcaaattgccatccctaaacctactattgcatcagtctaggatcagcaatgtcttgcaaccagtttttagaccatgcttctctagcaaccttcataaactaattggtattttgactttggtgtgaccaactatatgatcttagatgttcatatactcatcctcttatttattcttttcctttaatattgttgtcggtaataggaaccttctcctcgttactttcagtagaactaccactcttccacctcaacttcatctcaatatatccctatttctcctaatattattaagaatcttatttctattcgctaatttacatttgataataattgctctatgggg

SEQ ID NO: 97910 - DNA, 380 bp, Zea Mays
ggtggggtatacttggtaaattggtttaaacttagctaaggtaagtagtagattaaattttggggttccactgaattccttttaagtcttagggagaattgataagttctcaagttggacttattggggtgaggtttatttcttcttcccttttcttttattctcttaaaggttttggagtaggtttgaactacaagttgcttttataaaattctaaaaattctgcaaaaattacagtggcttgctactggtgtatgtttctctgtctcaaaatttggggatcataaagtgagtagttttctctggacaaaaataccaaattttagggcagaaggggtactttgaactacaactattatttaacagtgggtaattctcta

SEQ ID NO: 97911 - DNA, 440 bp, Zea Mays
cagattcccaatgagtacatgttgagccgactggatatgatactgaggggtagggtctcgaatgctggtgctcccttagcttactctgcatggaacctgcctccaaataatcccttctctgaatttgtctccaatcctcctgctccagatggtagcccgggccatagagtgcggccctcctccaaggacattgaagccttgattgctccccttcggaatcttctcgaggctgagaagcaaactcactttgagacgccatccagcactgatgatgctgaaatggatgtcgttcttagcctgctggccggggaatcacctgactcaacccacaccgagcctatggcaattgcgattgggcaagagtttggcgaggatgaggaaatccagaaacccgaaggtgcccgccggaagcgttcatgccgagtgaaccacctagttgc

SEQ ID NO: 97912 - DNA, 442 bp, Zea Mays
agcaaatagaagttgaagctacaataacccagactgaaaccgaggcagggcccacagtgcctgctgaaacgaagcctaccacaaccgagcagggggccgaaggaataactccgggtgctaatatagcttttgagaaaagtgtggccaaagaagccgaatcccttactcccgaagcattctccgaaggtcttgattatattgttagacatgctttaggaaaaagactatccgaagaagaaatttctgaaaccaaacattatgctcgggaattgcagtatccgaagggggccctagtgtttaatggtacaaccgaagatgactttttgtactgcctcctggacaacaaagaattatccgtctaccgggagatggccagaagtatgggcttcccgaagctcgaagctggcctttgcgccatgacgaaggccgatctcgcagatag

SEQ ID NO: 97913 - DNA, 469 bp, Zea Mays
aaattagtagtctgttttgttaaataagagtagatgagataaaattacttgttaggcaatttgtttggtagaaaggacatctagcatctaggtgttctgtcaagatattcatatccaactcactcgtgaaccaaatactattgagctatctatccgctctaggccagacgtcaaccaaatgagccctatgtactagaacattatgatagatatagactaaaaatggtgtactagagtcccatgtgtcacgtgtgtacgtgctgcatacgcagagtctgtagaagcatatagtgttgctagcgtgtgcctgttcacttggctttaatccgtacccattttattatttctacggtattttatctttataaattataactgcagcaattcaaatatctggttttaatctgaagcgaacaacctgtgcttctcagttggcatgcacggtcatggttgagtcgtagcttgttag

SEQ ID NO: 97914 - DNA, 448 bp, Zea Mays
ctcagatttggagtttgagattccaagtgtcagttggagcaaaaggttgaaggaaaggtgcaaaatgagttgtaggttgggatgtgacaaatgcgatgacatggtgatttggagtttgagattccaagtgttagttggagcaaaaggttgaagcaaaggtgcaaaatgagttggaggttgggaggtgacaaatgagatgacttggtgtgtttggatagactcaagaaacatttgttcaagtcatagaagtgcccaagagaagagccaagtgaagccgatgaagttttatcaagactagacaatggtctcgctattgattgtgcaccggatcaggttcagtggtgcaccagaccaaagatggacatagcctgtttggggcatagagggctttgacacgcgagatcaagtccagtggtgcaccaaactaagtatgtagagaggctatttt

SEQ ID NO: 97915 - DNA, 489 bp, Zea Mays
actaagagcccaaatgtaaacacttaatctaacaatagcattgggggtcaactgatgaaggtaaatcccaaacttcttcagtacaatagcaatcatcttgttcagggggaaccttagaccagctttaagaaaacttttaaagactactacctcgtcttttcctggctttgggatagtatcctctccaccaaaacgaattaattccttcttggcctcactaaaattactcatcttcaccattttaggaagatcagcttcagaaatggtggactttccaaagtccaaatgactaggtttacttggcaccccgcagctgtactcatctttggaaccaacttcttcaacattagcttgtgttgcttcggcagtaggtgtgtcctctgatgaaaccagcccagaacgcctcattgcttcggaaatcggaacagtttcagcggcttcggtctcatctccatcacgctcaaccctagcagtggagcgtactctggc

SEQ ID NO: 97916 - DNA, 403 bp, Zea Mays
ggttaaccttactagtttggatatttttcttagttgagttgttggatgaagtatagtgacattggttaaccaagtattgtgttgttgtgctgttagtgctctttgtggagcttttggcatttcttcgatgaaatgtgccgcacagaatgttattggcttcttgttggctttattgctccattagttctatagattttctccctttgtggggtacaaagaatgttagattacatgattatcttttcatgatggcaagaataaggtttaggaagattaggagttttgtttcaatagaactacttgtttcgtggtgctttgaggtgaggtgtttgatcttcttatacattcgtcaggtgtggatgtttcaccatttaattaaaattaattgttgaagttggtaagg

SEQ ID NO: 97917 - DNA, 366 bp, Zea Mays
ataatttctacgaagttgtacctctctaaatctgaagagtcatgcaacatgactactgcctaatgcttcaactccaagcttaattggctaaagtggtgtctcacagcatggacatgatccaagtcgtatgagaatgatgcatagaggaaatacctaggaatgaataagccatggtatgtactcgttcttccatggttggtccccacttcctcagcctagtccaaccttccccaccacacaaccacttagccaatgtttgttcgttgttacccaacaccctctatgccatcattcgaagaagtgtcaacattccccatgtgcacgatagatctactcatttatgtgtttgtcgaaagtctagtccca

SEQ ID NO: 97918 - DNA, 477 bp, Zea Mays
gtcttggtgcaatttgtttagtggatttagcagaggttcagtgtggaagtaatttggttgggtgcgttttgcacaatttaaactagtggattatatacagtggcgtagtgctcggtatggcgatatgtggcgctcgtcgtacctgaattcgacacctcagcacaacccgcctagttcgttttggcatctctgactctggtcagagtgtctcgagcggcaacatgtatggtgttgttcgccatggcactacacgtcgacgccatcccatgcgtgctgttggtccacagacgattaggcgattagcataggacaaatacagggtgcaagtcatggagggcaagttgggaggtggtggcggcgttgacgcttgccgcagccatgtccgtggacgagctcttgggccaggaacgagttggaagctgacggagagatgacatgagcggctccactgccatgccttatttcttggtcatgctc

SEQ ID NO: 97919 - DNA, 415 bp, Zea Mays
aataccatgcaaacgcactatctgatcaacatagatttctgcatatttttctatcttatgggtggtatgcactggtaagaaatgagcggtcttggtcaatctgtccacaatgactcaaatggaatcatggtgccaggaggtattgggcaatcccacgataaaatccatgcagatgtcctcccatttccaagatggtatgggaaggggttgcaaagggcccgctgccttcaaatgactggctttgattctctggcaggtatcgcactcggatatgtacttggcaatttccctcttcattctggtccaccagtataaggatctgagatcatgatacatcttgttactgccggggtgcatggagaattttgaaaggtgagcttcatccaatatcttctttctgagctcagggtccttg

SEQ ID NO: 97920 - DNA, 678 bp, Zea Mays
cgagggtgtctcgtgcgacgctctaggagctacctgcctcggccaaccactctgattacagaaaggtgtatgtccccgccttatgggtaggtctggtgctaccacgtatccagggaggcggtaagctcagggacttcaccaacgaatctggacccccatgggtgggtcctggacccccatgtacgcaatctagaccccttggaaggtccaggacctccgtgtatacaaaccggactcccgatgagggacccctccccccgtatggagtctaggtcgccaacaagggctcctgatgctctggggcagaacatggcacatgccctactctagacccaggtaggggtccggtgacgcctcgtggtcgctaggcgcttagtgcaaaccttcccatggaagcaaggtctcaacccgcattaaatgcaaggcggcaaaggcgtgctctgaccaagcgcacgacattggtaggcttgtgataggtctctgtaatcgtctgcgcgttaccgatgcgcactgtagcatggccgcgcagcgcacatgaaatgctcgctcagagctccgcgtgttaccgaggccgttgtgacatgtgcgtggaagacaccatcatgaagcgtcgttcggtcgggtaatgtgtctgttatagtgatcggccggatgtgactaggactaggcataaaaccc

SEQ ID NO: 97921 - DNA, 612 bp, Zea Mays
ggaactatatccacaagagattggcactcgttttgtagcatgacaagaccttaccatgtcttgtagcatgcatcaccgttctttcttgtatgtcattgttcagttgtccaaaacaaaccaagtgcggcaattgagaattttaccttacaaagcaacttaatctgcttttagaatgttattgaatcttgctatctaattgtgcacagggtgcttagtatttaagcccaatctacatcatttagtgtgatctatacagtgtatgcagagccctttgtcttgtccttctttacttgctggttcacttttcatgcaaatttgttatagtttacttgtaccaagtactgaatacaagcctaattagattgttgtttgaacctggcaagctgaagtttcagccgtatgtactgtttcaagttgtaagccatcgtaattactttacccatttgacatatccatccctttgcttactgaagaattaaggctcggtacccatttttgaattttgagataatgaactaaaacctggctgctctagtaacacatataattaatcctgtgatggcaaaactgcttgacacaagaatctgatctttggtgtttactgccttatgg

SEQ ID NO: 97922 - DNA, 355 bp, Zea Mays
acgagagcatgcttagggaacttgaggctgctagagcttcagttgaggtgtccgacaagactgaatgtgatgagtgcgttctacacatgtcgaacatcaccactttgcagaccaagtgctccaccttgctagatgagcgcgacgagttgagatctagttttatcctgttgggtgcgtgtactgtttgtcctggcttgcagtctgagctagcagagagagatgctaggatagctttgcttgagaaggctagcttagtgagcgcccctgcacctgtgcaatgtgcactttgtgagggtttgcaatctgcccttgagtcctacagacacgacaagacaagaatcaaggaagaaaacac

SEQ ID NO: 97923 - DNA, 399 bp, Zea Mays
gcaacttagaacaaggcgccgatgatgtagaacctacacaaaatgctcaatagacttgacattccatgggtagatattgtgtggagtaactactatagtgatggcacaataccgttagaaagaaagtagggtcattttggtgaaagatgtcctaaagaatattcacactctcaaagaattagctcaagggaacataagagacagtcacacaactacgctctggtatgactgatgggctggcatgattaaatgagatgaatatccagagttgctatcatacgccataaaaaagaatatattgtgaagttggcaagaatgatgagccagccctaagagatgttccacacaccaatgtccggtgaatccttccaatagttccaaaatctcgttgtgttgtta

SEQ ID NO: 97924 - DNA, 960 bp, Zea Mays
ggatcctctccattagaagcctcctgctgccttgaacttggctccattgtcagtgacaatctgcaccacatattccttctcaaccttatcaatttgcttccccaacaagtcagccaaaatatgtgcatttgctacctcacttgaagcatcaacagaccctaggaagaatgtccctgctggactattagcaaggaaattgatgagatggtggtggcttgtgtcagtccactcatcggacatctgcaatatactcatatgcaagcataatatcttaggatggagaaccaaagaatagcagagggacagcacaacgagcaagcaacctagcagaggctgcagagtgagggatgggggaggagagagaggaagatggagagggaaaggcacacaccttcatcggaggagctcatcacgaatattggcagccacttgaactggcagagggcactggctacaccgctcactagagaggaggatgatgcatgggaaacagaacagcacacggaggaggaatcatgagcgggagtgggaaatcgtgcatgggaagggaggagtcgtgtgcgggagaaattacagccatcgtttggatttacctgcgtgtctcccttgctttgtgtttctgtggtgctcttgtactcccatacgtaggcccagttaaacaggcttcaaaaaacagagcaaccaatctggttgtccctgttctagtcggacgactagctttctgaattctgatcgagctaatcgtcttggcacctccagtccagtcgattaggatggttaatggtgaacaccactgatggtgataataggtgctttacctatgtagggtgtattagagaaaacaagtgagctaatcctaaggtccgtagtgtcattcttccaagataagagtatacatgtcccttatgagaagcataattcaagtaatgattgacatttgacaattcatattgccatagt

SEQ ID NO: 97925 - DNA, 1634 bp, Zea Mays
tgcgagcttagttgggccagacaattcgctggagagacgctgttgggccaaccaatttgtactagagaaacagcttgctgggccaagaatcaaaccggagaaaggaaccctagcaagcagaagccgccgccgccgcgggcaagctataaatacggccctcctgaacgtttctacttccaccatctcttctgtccgccgccgccgccgccgccgctaggaaacgacgtctcgtctcgtgccttcaatctctccttttgccgtcgtcctgtgtttatcgcttgatttcctctgttatcccgctttcttcctctgtaagggcaaatgatgatgcaaagtcatgcaccactctgaatgaggggattatcctctctttgggctgacaaacggacttctacccatttttcgtctgagccttgtgattacatccgatttctttattgtctccctggcttttcttttttcttgctgcttactgtgacactgatcttattgcgtttgattaatggagctgtggagtgatctcggagaactagatgatgtgggtctgccgatccaaccatgatgcggactgaattttatttgaggtcaaatgtaatggattctgatggttctcgagtttatctcccttctgacattggcatatttctttcttccctcgaatgggtcatggagcgaaaattagtgcggctttgtttttgatctcttgctttcaattggtttgttggttagaaagctcaaagaaacaggtgatgaagccaatttgcagagcaaaggggccagataagtggcaatctttgcattgaaggttggccacaacgaaactgcagttctccgtgccgctcagatttctctgttttgtgacggcctcgaacaagctgccacattatcatatcttatatgttatccattttgttttggtttttatcttcttcgtatcgtgtctccagttaaaagctacggaaactaacatgaactacataatacatatgtacagtatgtagcgcatatcgcatgacaaccgaacactacatgccacagatgaaagacagatagtgtcagtaaagaaacagacggtaaagccaatttgcagagcaaaggggccagataagtggcgatctttgcattgaaggttggccacaacgaactgcagttctccgtgccgctcagatttctctgttttgtgacggcctcgaacaatctgctacatggtctcttatctgtgatccaatttggtttttggtcttttttccatcctagttaaaatcaaacatgatgaactatactaaacattacgtgtcgcatgacattggctttgaagcggcagttttaacagatgaattactgctcatcattaaagaacgagttaatatcagtaaagaaccgagtggataaatcagagcagatcagtaaagaacggttaactagggcccgttccaatcgcaactgctctttggtgcctagtaccgcagtgtggtatttaattatggttgaacggtatttgattatggttgaactgaagaggtgattgttatcgatctatgagtttgagaatgattatgcacacattgaaacattgattttcaagaatctacaactgaacaaaacataccctaatatgctgtatcaaattacga

SEQ ID NO: 97926 - DNA, 428 bp, Zea Mays
gataaacaagccaaaattgcatggacaaagtggtggaaactcaaaggagatatccaaagtttttagggaaagagtttttgtggagggcgcttggttcgaagaagaagatgcaaacaacatgtgggtgaagatgacaacttgtattaggaaggtggcgttagaggtgtttggagtcactaaagggagcataggtgtaacacccaagattctattttaagattcatatgtgtttctccaaaaagatgtgagtgagaaagtcatagaaccctttactaaggatagtcccctaaagtaaataaatagtaatgtcaaaagcttggtagtttaacacttaaatccaaatcttgaaactaaagttcaagttgaaactatggaacaataagtaaaagaaacaccttcaacatatttattataactttaaaattaac

SEQ ID NO: 97927 - DNA, 451 bp, Zea Mays
agccgaggaatgatgggcaaccgatgaagttgcttagctacaaccttcgtatctgccaattcaccctcatcatttgtcacctcaacatatctagaagcttcgcaatgcttacaacggtccatcttgtcatcctcctcaaagaatagcatgcaactgttgggacacacgtcgatcttctcatatgtcatcccaagaccagccaacatcttctttgtgaagtacatattctttggcaacttatgattctccgggagaacctcgcccatcagttggacgatgtcgttgtaagcactgtttgaaatgttgtgcttcgactttatcgccattagtcttgtgagagtcccaagaactgacatctgagtgtgctcgtgcagtctctcttctcccgcggtgagtagccggaagaattcctgagcatcgcgtggaagctgccccggctcctcagcgttca

SEQ ID NO: 97928 - DNA, 409 bp, Zea Mays
gaaacctttcgggaagaaagcaacaaacttcctagaagactagaagaaagaatcggcacaactgaatgcttatttgggagaaaatggcagtatggaagttaaatcgatactggaagatctcattcgcaaagctcagcgcttagacaccgagatagcaggacttcaaaaaagggtagcaaagaacaactcccagatatcaggacagatgaaaaggggaccctttggttcaggaaccgtctgtgtgtaccaaagggagaggcacaagaaatcctgctagatgaagcccacaactcagcctattctatccatccagggtctaccaagatgtacctagacctcaaagccagatactggtggagaggaatgaaaaaggagatagctcagtatgtggcctagtgtgatacttgtc

SEQ ID NO: 97929 - DNA, 541 bp, Zea Mays
cgctttcattttttggggggatttttgcggtgatttattacatggctccgtctagttaaaaacctcaccccctacgaggaagagagtgtgggcccaactaaaatagtgtctgcacaaattacaaaggcgcgaaagccttgggactagacgaagaattttcttaagttgtctacattccatgggtgctttaggtcttcgtcggatggtgatgtgagtctgtaggcgttgggggacgtttttgtcttgacgatgaatggcccttcccatttgggctcgagtttgccccgagattctgttctagtggttctgatgaggactagttctccttcctcgaactctttggggatgacagtgttgtcatgccatgccttcgtctgcgcttggtatttgttcagtgcttctagggcaagaactcgatctctatcgatagggtccttggagttgactcatcgacatcaagagtagttgtggagcttgctcgtggagatccatgcttcaattcttgtggcgtcattgcttcggatccgtacatcaagcggaa

SEQ ID NO: 97930 - DNA, 343 bp, Zea Mays
tgtggttcactcagagcaactcccatgagaagatgacagtgactatgtgatcttctatggccaccttgttgccaaggttcacttccccgattctcgtttttcatgtgccatctttaggtattgtggtatcaagcttgggctccttattgttagggttcacttggtgcatcattttctcatttctagttgatttctcttgttcaatgtgaccaatcgacctctgcttcatcttgagagatttcatttgccctagtgtcttttagaattgtgattacctcaatgtcctatggaatatcttcaatttttaatgcatgcacaataacctttccttcactagatggct

SEQ ID NO: 97931 - DNA, 584 bp, Zea Mays
gtagtttcttggtaaaagggtggtagagatagagctataccgtgcgaaggggcgagttttccatctggtgcagctccttttactgatgatacagctgaaaacttggagaactatctagaggtgactcagctgcttaactgttggaggtgttgtccaacatgcagtgaaggagtattcattgtcacactgtatttctcttcgacgtggtggtcatgcagaagataagtggagcatgttggctctcttttaccctctgtatatgaccccaaacggaaatccaaaccggctgcaacagatgtccttgttttgggcatataagcacacaaactgagatcccccaagttctagcggattccatacttctccaccgcgccacaccattcacaaacatctagggtaagccctcaaaccttgtccaaacctctgtttcaccaaaaaggctagaacaccgagcaggctctgactgtggtgaccataaccatcaaattcttcatctccccgtggtcagcccattcaagaaggtaacatgttcgatgtgctcatgtttctgaacccagggttgtggtggtgctcacggaatctta

SEQ ID NO: 97932 - DNA, 393 bp, Zea Mays
caaaaatgacactggcattgagggcctgtgagagaaaaaggatgaagaccatcatgacattccaatacgattggaatgatgaagtcattgcacaattttattcttctctctggattaagcatgctgatgaggaaagtccatacaactttccttatctcaatttttttattgaaggaagctggtataaggtgagctacaggaggtttgctcacatcctaggatttactgatggggatgtctcaggagacaaaatcaagattcatgactttcgtcctcccaccaaggatgaagccaaggatcttcacatctctgagtctgatgaatattggaaatccaccaatctgcacaagtactacaggtacatcaattctctctacagaatgactctcatcc

SEQ ID NO: 97933 - DNA, 497 bp, Zea Mays
ggttttcttaaggaaccgtcactaaaaataacacaagcggttgataatcgaatccacctgtaaacatatatcgtcccgcagcctttgagcctttttgtattagtgatatgctcagtggattggatgtattttttgttgttgttatagcgtaactaaggtagttgtcgatatatattgtccaacttgtttgtctctacaaaatggaatcgccgtcgaggcataagattagtccgcttctcctcctgacccctcgtactgactggaatcaccattagagctaatagtgtgtacgtaccttttaggttgagaaaagcaatcatccaagttatgtgtattatatattttcattgtatcctgcgtgaatgtcaatatatacaaaggggtggtcatgttttatgagaacactgatgtgcatttagggtaaaagtccatttattagggtctatatatacaacgggactcgtgtgctaggattgagagagacatcctacaaccca

SEQ ID NO: 97934 - DNA, 679 bp, Zea Mays
cggaaaagcgaccagatgggggtgaatgggagccacaaaaaattctccaaatagagatcacgtgacttgattctccttttcaatccaacccaaaggaacacaaaaatcagcttaaacaaaaatagttcaatcgagtgtcgattgaccgcaccaaatcgttagaagaggaacactctagaaaattgcagaagatgactccagcaaagagttttagagcaagtagcattaccatgcagaggttcggtagtgctgaggagcaaaagtgccacacgttagagcggcagtgccgcatgatgaaaatgctcagaatgatctctaatttccaagcagtaagcacggaggatgaagtgatttgtgaagtatgagcatgaaaagattagtgtaaccaaatagattcaaaaacacatattcgaatggggtttggcaacttcaaatcaaattgtgagagaacaacacatacccatgatctgctcgaaccagagactaaaaatgatcccagagtagtcctcaaacatcaagtaaccccaaacacttcacacgatcaccaagaacagagtttttctcaaaatccaaagaagaagggatgggaataggaggaaaaacacatcaagtgaaaaattcaaatttgacctgagacagatagaaaaggcacacttgcagcatgtggttacgaccacac

SEQ ID NO: 97935 - DNA, 281 bp, Zea Mays
ctcatctaaatcatttgcttggattccttcttcgatgaatctctcatcaaaccctctaataaccaagtgactctgaacctgagattgtgttctgtaggacatgcatcgacatcttgaacatgggcatggtgcagtttctcctctagtagtgccaccaaatgtagtttgtatgaactttctaaaatttgtttgccactcatttgtcatgaagtgcatgcgcatccaactcctattattctgagacatggctttctagtcaaagattcaaatcaccagtcgag

SEQ ID NO: 97936 - DNA, 644 bp, Zea Mays
cttgtatcattatcgtcctgggatagctggggggcagcaccagctcgtgggtggtgcgagtctggagatgcgccgtgggaggaaaacggaataccttgacatcccactcaaggatagcattaaaggttggcgcttagagtggttcattgtgtaaaaccatggcaagtccctcccccctcggtcagggagacaacagatgttcgtgctccaagttggattgagtcccctacagacttggagataacagaagccaaggttctgcttgctgagatttgtttgttgaaggagagaggtctgactgctgaagccgtggtagcagactttgtttttaagaatattcagccactgaaggacagagcgtacccggcttatttgtatagtggtgtcaccgactcaacctgggttaccaacaagaggattcctattgtggatttggtgacccgactggaaatgatccttagaggcaaagtatcaaatattggtgctcctgttgcatattctgcttggaatttgccaccttccaagtcctttttcgattttgtgtccaatcctcctgctggcgatagtggtttgggtcttagagtgcgaccctctctcgaagaagttgaggttctggttgcttcacttggtgatcttcccaatga

SEQ ID NO: 97937 - DNA, 442 bp, Zea Mays
agggaaccgaagtccggctttcataaagcttctgaaaattaccactttgtcagcttcgggaagaggaacattattctcccctccggctctcacgatcgaaatatcgtgaaagtacctccctctcattgcttcgatctgcccttgtttaatagtcgattttccgaagacaacatggctcggtctccatggccgatcttcggcatcttcatttccactttctacatcaaagctctcactatagctagagtttttagatatcccagctagcatctcattggcgatcttctctgtgtttgtcttctccatggcttcgtaaaaaccggccagcgcagggtcagtgatcttcttctcttcagccatttagacgaaggtcgcgttgatgccgaagctcaaaaatcaatcaagctcgaaaaaccaaagcaagttaaaatggcaaacacag

SEQ ID NO: 97938 - DNA, 390 bp, Zea Mays
taagggtgtaagcatagttgttgagaataaattggagataattaggtccaaagttggactgtcaggctgatacagtctgaacttccgattaatagtgactttgatccaagtttgagagccatttcgactaagatccagtgagaatctacctagggttgctataacaaagttgtagagctactatacaggaacaactttgctgcagaacttggtatgtgttgccatgaagatttgagagaaaaaccagcccaaagattggctgtcaggtgctctgatgggagctcgcgatggtacagtgtcccaaatggatcagaacgacagcgcaacggtctcaccgccgacgaccgatctccaccgtgattcgcgccaccgccgttgtgattcacgtcg

SEQ ID NO: 97939 - DNA, 408 bp, Zea Mays
tagacatgtaccctgggcaacaacagccacccatgcacatcagcgataaatttgccgatctgcacatgtccagaccgattgcacgtgagtgcggaccgtctgggccagcaacggccggtaccatttgtaatgagttactgagatatgcatccgagctgccacttgctacgcgagccctaaactacccagtaggaccatccgcatacaacgacggacggtctgcatacgatcacggacggttcgaccatatggccggacagttcgcacacgcagccagacggtttgcgtatccgaccggacggtccggcacatggttgtttgaggaggattgttacctaaatcctcatccgtcccagcaacactttccatcgcactatacaatgcaccagcaccataacttaccatttc

SEQ ID NO: 97940 - DNA, 583 bp, Zea Mays
gttacgagcatcctcagggtatataaggtgttacatgtagccctgtctcgtctattggttgtggtggccatcaagtccctgtacacccaagggatacaccgagcgtgggcaacaagagataacggagggagagaaggagaagtcgtcgttgttgaagaacaagttgtggcgcgccaccccttggtccttggagggtggccgtgaggaatcactggggcaagccacacgttcctagaggctagccgagcgtagggagcgatcagagtattgggcctcgctcgccggagttgaaaaagatcgagtgctaccctgtgccatggaccagatcggttgacaccttattcactggtaagacgcctcaacctagcttgccatggtctctgtattgtgtatttgtgttttgcggtgagggttgggtgtcgggttatcagatgattgtgcgtgccgacgatggcctccgtcttgtgctgcgcggtgtcgtcgtaccttggtgaagtgaggtgagagagatcaaagtggtcattgatcgtgaatcgtgcaatctagattaggtcataggataccccttcacgtcataaagttt

SEQ ID NO: 97941 - DNA, 409 bp, Zea Mays
cccagcaccgccagatcgacgatcaacggtacatattaaaatagaccgaaagggtaaacgccatctaatcctagccacacgcgcatagatcaacggctgctggccttcttctaccccacggcgtccagacggagttccagagcttgccgccgatccccaccactaccgatttgcaaagtaaaaagattatccctagaatgcttcacagggaaagggaaactgagctcaccggaggttagtgcgccagggagatgggatgctcgccacaggtgacaagcgacccggcgccgggacgaacgccgccggtgtagatctcttctctcacctcccgctctcattgcgtcgagtggaaaaacgagagcggtgatgctagattgtggtctctgcgatacaccgaggctagccaatg

SEQ ID NO: 97942 - DNA, 641 bp, Zea Mays
ccttgagccatgagcaatcactttgccttcctgcatcaacacacagccaagaccaatacgcgaagcatccgtataaactgtgaaacgcttaccgctctcaggcaaagctaggataggggcatccaccaacttgctcttcaatgtctgataactgacctcgcaatcgccagaccagacgaagagaacacccttctccaagagtctagtcaaaggcttagcaatgctggaaaaatttggtacgaagcgccgataatatccagcaagccccaagaaacttcggatttcagagacactagagggtctcttccacttcaccacagccgcaacattcttgggatcaaccgcaatgccctgttgattaatcacgtgccccaggaaagccacttcggacagccaaaaggcacacttcttcaacttgccatagaactggttcttccttagggcacccagaatgagacggagatgcggctcatgctcgtccttggtctttgaataaatcataatatcatccaggaacacgaccacaaagtcatccaggaattcatgcaacatcatattcattgcttccataaaagtagcaggggcattagttaagccaaaagacatgactatgaactcataatgcccatacctggtgcaaa

SEQ ID NO: 97943 - DNA, 767 bp, Zea Mays
atgccataacttcgtatgaattattgacatgtatatgattcacatttttatattcagttatgtctctctgactcatgtgctcacctcttctgttattttcaatgtgacgacatgcccactcgcgtgacttgtcccctgcttgacttttctcgagaaacgtgccccaggtacctagctctttccttttctattctcatctcctgctttgctacacttgcttatctctctggttcttgtgtagcgtgtcaatgttcagtcaggatggtgaggaccaagaatgtcaccccagtagggggaggcgatgaccaggaccctatttgccccttcagactggacaagggaaagtatgtctaccttgagcagcagggaggcaagaagaagagaaagatggatagagctagtcgagcagcagtagcagcagcaacaactgagagagcagagcagggaggccaattgaggatttgctctaatcagatcaccttccgtgtctgtcgcctctcgtctcagactcgctccactccagctcggtttgacccctcatctccagtcaccactaccactccaccttcctccactacgccagcttccgccactccagtgcctatcaccacaatcgctacgcctacagcctccaccacacctacttccaccattctcactccctctaccactccaccaattcctccacctcgtttccgagagcgtgacaagatagaggtgcgaccacttgctgaggatcctcggctgtctgaccttcagagggccac

SEQ ID NO: 97944 - DNA, 352 bp, Zea Mays
attacttgttgcatttgctctcgatgttcatttatgtaagctctaagagattgaatgtcatatattttacttacattggggtgggtgcagtaggtcagagtgatgttatgtcagtctccctttgtcagatgaccttctgatgttggtccatcttgaaattggtcaagtactttgcatcgccttccttgatcaactacattttgtactctttgaattcttgttgatctttagcggatgggttctccatagtctgcttcacgatgttgcttggggaggtatcagaatgatcctttgaaccaaccatatgggttgatccctgttaggccacacatcttgtccccatcgaactcgt

SEQ ID NO: 97945 - DNA, 537 bp, Zea Mays
ccagaatgaagagggaaattgccaagtacatatccgagtgtgacacctgccagaggatcaaagccagtcatttgaaggcagcaggccctttgcaaccccttcccataccatcttggaaatgggaggacatctgcatggattttatcgtgggattgcccaatacctcccggcaccatgattcaatttgggttattgtggacagattgaccaagaccgctcatttcttaccagtggataccacccacaaaacagaaaaatatacagaaatttatgttgatcaaatagtgcggttgcatggtattccaaagaccattgtatctgatagaggagcactgtttgtggcacgcttttgggagcagctacaagaatcacttgggacccaggtaatacgaagctcagcataccatcctcaaacaaatggccagacagagagagtaaatcagatcctcgaagacatgttgcgggcatgtgtactacactacagaaaggattgggacaagtgtctttctttggcagagttttcttataataacaact

SEQ ID NO: 97946 - DNA, 475 bp, Zea Mays
gaagtcactcagccaggatcataccgacttactcaaatggatggcacggaaatagggaattcatggaatatagagcatctcaggaagttttacccctagccagatttcaaaggctatcggggcagcattgtattctgtaatcggaaaatacatcatcaataaaaagacttcattctcaaaggcactcaaactatttattatcaatctgcatacttactcgactcagggtgatcactataccctactaacagagtaatcggcttaagtcggcagtgacttaagacggtgcaacatgctcacgcttacttaacttagggtgaccactataccctactaacggagcaatcggcttaagtcggtagtgacttaagacggtgcaacatgctcacgcttacttaacttagggtgaccactataccctactaacggagcaatcagtttaagtcggcagtgacttaagatggtgcaacatgct

SEQ ID NO: 97947 - DNA, 375 bp, Zea Mays
ttagcttcccaatctgtagtaaccaaaatacgatccaacttttcgaaagttgggtgtggaaggttattggcccaagtgaattgtctccctgtcatgttaagctccttaaggtttaacccgtcaacaacggcattgaacaaaaaatgccatcttcgtactgtcctaaacggccaatgatactcaccaatagcactgtcggttcaagtgacatcctgacaaatgatatccatggatgacactaaagagtgatgctttgatccggcatgtcgtgcctcgctgatagaccacccctcactatcgattaacacttgctagtatgaattctagcaacgatgtgaggtttcaacccaacagcgattacgggttctgctacat

SEQ ID NO: 97948 - DNA, 309 bp, Zea Mays
cttgtatgttatttatatatcattactagaatgtaaaaggcatcatgttagggattgattccatgctcaaggtaggcttatcttttgaggagggacctttgggtcgtaagggccccaaaactgcttctcttgataggtgcaccagatgcaaggggccttgggaacttatcctgctaggtgtcctagggtgtgagaggctcaaagggtttatctcgctaggtgctcctatccttcctgaggccacaaagccctctaaagcctcccctgaaattgcatcctataattttcattacatattttatgattttc

SEQ ID NO: 97949 - DNA, 355 bp, Zea Mays
gcgtattcggaatgccggctggaaagctacttgggtttatcgtcagccatcggggaatagaagcaaatctagagaagattgaagccattatgaggatggagccaccacgatcatagaagaaggtacaaaggctcactggatgcatggcagcgctaagcagattcatatcaaggctaggcgagaaaggaatgctgttctataagttgctcaagaaggtggacagatttcagtggaccacagaagcgcaggaagccttggaagcactaaagaagttcctgaccacaccaccagtgctcaagccaccacgccgagctacatccgatcagccgacggaggatctgctgctatatatttc

SEQ ID NO: 97950 - DNA, 321 bp, Zea Mays
gttgcagttgcggatatgattgtcggatgtttgcaatatcctatccgaatccgatccattgccatccctaaatggcactgcctggcacaggaccgaaccagaggccgagcgagagtagtgacacccggttgcatcaggatggcaaagacaccgaaggatgcagaaaagcagcaacatagcaaaatgtagctgaccaaacccaagaagcattttctcaagcccctcactaaagctatcattagagcttcaccacttgtctctctatccttgtctccacttgtaaatattataagcttcaaaatgtgcagaatgttgctcaaa

SEQ ID NO: 97951 - DNA, 335 bp, Zea Mays
gagattaaatgatcggtctattgaaagaatattctgattgctttgcttggaattacactgagatgccaggattaagccaagaaatagtagagcattggttgcctattaagtccggtttcagacctttcaagcagaaagctagaacattttgtccagaccttctcccacgaataaaggatgaaattcatcgatagctagaagctaattttattagaccttgcagatacacagagtgggtctccaatattgtgccggtgaagaaagaatcaggtaagctcagagtatgtattgattttcgcaatttgaatagagcaactcctaaagatgaatatcac

SEQ ID NO: 97952 - DNA, 445 bp, Zea Mays
atacggagtatatcatttatattgcttggttttgggttttggaattttatgggggattgagtatagtgcttgctgggattgttgggatttttggtgtatgaaaccctatcacgtattcctcctggtctactcgtgtagaattacacggcatctttaatggaaggaggaattaaataatttacggagtgaaatttacgtgtagtttagttcgtgtataattaataggtatctttatgggtgaaaaattaaatattatacaaataaaaatttacttgtcgttctcaaattattacacccaaagtggttcagagaggaatagcaggagcaggtaggaggaggaagagaggtaagacttgggaaggaataaagttttgcgtatcttcttacatgcctcacccgacatccattacctcatacataagcctcccagtgcccactagttaac

SEQ ID NO: 97953 - DNA, 720 bp, Zea Mays
ctagcttcgactgacacagagcgacttggctctgcaataggagcggtcccctcaattagcttcggcacgttggccatttcaatgcacctgggctggtgtgtcaaaactttaacctttttttacttcgacgcgctagaagtcacagtggtagcagctttccttttctttccttgcttccgcgaaggataacagtagtctggacatacaaatccgatgacatcgaataccctattcagcctctttttgcctcaagctccgaaggcagttgtcatcgcgtcatcttcggccttcgaatatgctccaagcaattcatcactggtcgcctctatggcatctagctagtcatcattcgattcatcaaattggttcctatatcgaaaagtatgcttcaaatacaccaaaccattttgattggaggcagcggcagtctccttcggcatttcccatccatgagcaagcggccacactctataagcgatatgctcctgcaccaagtctcttgtgccaatgtaagtacacactatgttgaaagccgcctggcatgtttgtatatcattcccaagagcagtggctgacttcctcatgccaaagcgagaccatatagggcgttgaataatccctttcacatcctccctttgacttaggtcattcttcacgtaaaaccattcctgcatctaggagctcggccacctctttcgaaatgtaggcactaggtagctt

SEQ ID NO: 97954 - DNA, 291 bp, Zea Mays
gcggcagaagagaagatcgtcgaggagatccagcgagcagaggcgactgagaactcgaaggcgaacgcgaaccctgaggaaccagaccaagaaaccggcgtgatctccgaagaacccaaggagggaacgagcgtggtctctgaagaaccaaaaccaaaggaggcagctgatcctaccactgcgcagaagcgcgaggaggcgtccgacgagccaaaaacggctgccggatcgaacgcgtcagctccgacgacgccactgacagaagcggccaactacgacggcaacgacgac

SEQ ID NO: 97955 - DNA, 609 bp, Zea Mays
tgcttcccctttttcattacagggaagcccttgtcgattgggaagcatcaccctctattggatctttgtggtcgggccctctgtcttccctcccctaggagtcccgggagagttatgacgttttttgtgtaccgtaagaggctatcgacgtcgaactacttcgcgcgtagcttgtcgaggcctatggtcatgtagtcggttaggcaaccatcccttgtttattatctagctttcatgtcccttctcttatcatgtttatctcttttgacaaccttggaggtcgagctggagatgttgcgccaccgctcatgtcaggttctggactacatccgggcccgaggttcctccttggtggaacatttagacaatgtcctatgttgtatctgggacatcgttgatctcggtgttcaaaggggagccacagtgacattgctcgttggggagctccgatctacctgtggcctttgagacgtcatcggtcctccctcatccctttcagacgaagggctggaggacatgctggagggatttgatgaggtagccagtcatgttgtgcaaaggttctctacggacgatgttgtgtgcagcgcttgctaaccgtagtgacgc

SEQ ID NO: 97956 - DNA, 414 bp, Zea Mays
gcttcctacgcgaaatggcgggtaaccaattccagcagcaaggcggaagggctcctccctagggaccacgtgaaacctcatacctggacttctctgaaacgcatcccccactctttgttaaggctaaagatcctcttgaagctgatgagtggatcagggtaatggagcagaagttcggattaattcgctgcactgaaacatagaagacgttgttcgctgcccaacaactaagaggccctgcctgtacctggtagggaaattttgtggcgattcaacaagccagacattaggtcacttgggatgaatttaaattggcatttcgtgagcactatattctagaaggagtgcttcacatgaaacaagaggaatttattcgactaaaacaaggaggggatactatgatgcagtatatca

SEQ ID NO: 97957 - DNA, 388 bp, Zea Mays
gctcattgacattgagtcatcaagtgggtcttcttcaagtgaagaagaaaatgatgaaaaagttgccgccatcgatggggacttctcttcaccacctatgcctcatggctagaggtgaacagaaggtacaaaatgataatgatattatttaccatagtgatagtgatagtgatgatgaatttgcttcaccttcctatgatgaactagctgatctgcttaaggaatacactcaaatcattaggaagtcaaaagccaaatgtgataagttgaaagatgaaaatgaatttttaaatgccaaatatgacatagttgtaaaagctagtgatgagatgaaagaagaaaacaaaactatgtcatccactgtaaatgagcttaaatcctccctaaa

SEQ ID NO: 97958 - DNA, 415 bp, Zea Mays
gacaatttcaacattatctcccacccactaaatgagaaattagtagaatctcaaagggacactgatttgcatgaatcaagttgctcccaagtactaaattatatctaccttgcacctcgatgatgaagacggtcatggacaaagtattgctcccaaaggtaagctccatggatgcaacacctttggccagaataggaccacctcttccaacttctccaatcgaattgttggccttaaacaactcatcatatgtgccaccaaacttcttatatagcaaatatatggcataaagtttacttttgccccactattcaccaacatcttaggaattggcgtcccattaatatacccttcacatgtagtggcttgagatgattgatggaattattagctaaaatatgacactttgagtaga

SEQ ID NO: 97959 - DNA, 441 bp, Zea Mays
tttaatttgagtttgtttggtgtaattaaaatcatgtcgtatgtcgtagtcttgctaatcgtaagtaaaatagagaatgtagccttttgtgaggtcaagactgatgtagtattaaaatatgtgaggcgtagacactaagtttatcataaatttaaatgtaagctattaaaatgagtagggctcagacactagaattaattctttcgtgattaaagttagtagattatattattttgagcatgccccttctaataaaatatagaaaacccttttaataaaatatataccccaagtctcctggtgtgtagttgtccgttagatttcatcactcgtacaaacacaatacttctccctaagatgggtgactaacaaaaccaaatcgaataaacctctgtacccaccctgagaagagcaagcactatgcaccagccccattgacgg

SEQ ID NO: 97960 - DNA, 299 bp, Zea Mays
atgtgaggaggcgggacttggaatttgcagtgggtgatcaagttcttctcagggtatcacctactagaggagtcattcggttcggtgtctccaggaagcttagcccgagatacattggaccgttctctatcttggcccgggttggcagcttgtcttatcgcttgcaattgctagaatccatggcaggggtacacccggtattccatgtctctatgttcactacaagaaaaaaggcaaacggtgtcggccaaaaacccacactcttactgaaataagccgacactcttagtataagagtg

SEQ ID NO: 97961 - DNA, 395 bp, Zea Mays
cagaggtggaagggttcccacacctgttgcgaagttgtgcgcttcgcatgggaatccgcaagaagccagaatatgtctggaaggagtatctcgagaacggtatggaaatgctctatggaaatctacctgggagaaagccgaaactatacaaaccaaccttctgtccaagtcactttcaccagataccgcttcccagatacttgccaaaatgttgcccggaaagccctccgacaactatgccacagctacaaaaaggtgatctttgaaaccccccttcgctacttcccacccagcaacaaaaatacacctacatggaggaaaagacttcaggccctgtcaggaggagaccctattgaggatgaccccaccatcatctacatggttggataccttca

SEQ ID NO: 97962 - DNA, 424 bp, Zea Mays
ccccgtgtgtatcgctaggttgttgtaacaaccgaacaccagctggctgggttcctctcgcgcgggaccatgggctatggccgctataaattggtggccgtgaacctcatctcgtccgcccgattgtggactctagggcaccatccagacaaagcaatgccgagcaaaggaaataggatagagagagagcctccgcctaaacttcgctctggattcgctggggatttggggcaagttgttgggccaccgggatatccatggtgcgcgtgacatccgtgcatggattgcgagtgatgagatggtctcatgactgggcaattccttgtcggaatttgaacgtgggcgccatgccgctgcactgcgtggcgagcggtttcgcaacttcgagttctggtaagaccctctctgcaacctccgctttttc

SEQ ID NO: 97963 - DNA, 490 bp, Zea Mays
ttgagaaatctcaacattaatttttccaatacttcaattcactactatgtcgcttcctcctccatcgatgctcttgaagctgaaaatccaagaatgcacctcctctagcttcttctccaacatgatttgctcatcttcagatagcaacaccttccatttctgcaaaaacgaaacaacatcacggaggagcacaaaagggttgcatgggaactctttctcgaacatcatcttatttctattacgccataaggcccagaccatgcctgcaagcagaaataaacgaaaaagataagccctcttaggtttcgcttcaatccagaagcagaacatctcttccaccgagctgggaatattgttccttccaaaaacttgcctcaaacaactccacacaaaatatgccaaggagcactgaaagaatatatgatccactgtttcttgcttttgacataattgccacaaaaaactttaatccggtcactacccttccaac

SEQ ID NO: 97964 - DNA, 1126 bp, Zea Mays
tgcagatagaataaatataaagcctattaaaaacaattagaattacaagtagccaacaacttgacttagaactcggtatgtttaaaattggtaaattaaacacggtccatacccggatcagcaagttcatcatttaacttaatttctaggtcggtctgggcaggaacaggctggtcattacaattctcctgagctaaaacttctgagaaagggaaagaatacatttaaaaaatgtcaacacagtgcaaacagcacaagttttcatcaccatctccgcagatcagtaacaagttgtggaacaagtattaatgcaatattaccttcaccagtctccttaattagcacatcacaatcatgttgcagatgtttggtgtggagatcgttagaaaagatgacagttaggggttttcctgcagattcaattgcacttgcttcctgacggaagctcttttcaacggctatagggctaactgcatatttttcttcatgctcttcaatagggaaaacaaaagacaaaacatctggagatttagcaagtttaatttagtgaattgaaaatcttgaagcaagatctttagaaaaaaacagtgaatgagagctggcacaggtggatttagatgttcagcatacatattatcttcactcatcaatgttgcagagcttttattggggatacaggattaattcagttgtacctttatcagtctcttcagctattctgccattatcatgctgcagacttttggtgtggagatcaattgatatgacgttagctaggttcttttcctcaggctcgttggcatttgcttccaagctaactctccgttctccggatacagggctttgctcttcatggtctgcaacagtgaaactaattgataaaccatttggtgattttggaacgacaaagtcttcctttcagtatataacatgacaataatgcacaaatctaataattagaattacacgtagccaataatttgacttagaactcagtatgttgaaaattggtaaattaaacacagtacatacccggatcagcaagttcatcgtgtaacttaatttctaggtcagtctgggcaggaacgggctggtcattacaattctcctgagctaaaacatctga

SEQ ID NO: 97965 - DNA, 540 bp, Zea Mays
accaagtgaagcaaccagaacctcaacttcttcgagagagggtctctctctaagacccaaaccactgtcgccagcaggaggattggacacaaaatcgaaaaaggacttggaaggtggcagattccaagcagaatacgcaacaggagcaccattatttgatactttgcctctaaggatcatttccagtcggctcaccaaatccaaagcaggaatcctcttgttggtaaccgaggttgagtcggtgacaccactatacaaataagccaggtacgctctgtccttcagtggctgaatattcttaaaaacaaagtctgcaaccacaacttcagcactcagacctctttcattcaacaaacaaatctcatcaagcagaaccttggcttctgttatctccaagtctgtgggggactcaatccaacttggagcatgaacatcttgttgtctccctgaccgagggggagggacttgccatggttttccacaatgaaccactctaaacaccatcctttaatgctatccttgagtgggatgtcaaggtat

SEQ ID NO: 97966 - DNA, 867 bp, Zea Mays
ccgaaactcgtgcaaaattcgatgggcatgggtatgaatataaagttctacccacgggtagacctaataatgggtcacccgacccgaccaagccgacccaaccaatgcaacgggcgagtacaaaccataatttttgacccataataattcacgggccggctacggaccgcgattttgactcaaaacccagcccaaaaaaacccgacccaaccagaaaaaaaaaccagagcgacacgttaaacagggagttacggaccgatccgacccaacactaggcacaggccgtgataaatggccaacgacccgaccttaacccgaccagcacgatgcttgaacatgtctaccgcaaatatagtcgtgaacggatactggttacggccatagataatccgatccattgtcatacctacccacctatcggccgacgtttgttgttgtggccaccgcagtcagtaccgaacaccggccatgccatacaagcaaccgataaggaccagcactggacctaacctaaagctctcagcttgatcgacggtcacatagcgtgtgatgattatgagacacctaagatattttatcaatcggaaagtgctgtgaacagttgcacttgtccatttacctatttcgaatcatagtgcaactcaaattacttactcactccgtcctaaaatagagttcgttttgaactaatcacatatttattaagtaacatataaatatagtttttatgtatgtcaatattcattatcatttggataaattaagtaacatataaatatagtttccatgtatatatatattcattatcatttggatgaatctgaacagaaaagtgggataaaaaaattatattttaggaaagagaga

SEQ ID NO: 97967 - DNA, 406 bp, Zea Mays
gtggtgacaggtacagtctcagttgattcgtttgttgcccatgcactctttgactccggcgctagttattcgtttctttcggagaattttgtgtcgcgtgctggtctttcggtgcagaggatgggtcacccagttgtggttagttctgctaatggctccattagtagttgttcagtctgccagggttgttctgtcattcttgctgatgaggtcttttcagctaatctcgtggtgatttccctagggtcatttgatgttatcttgggtatggattggttaactctgtatcgcgcagttatatcctatttttggaagacagtgttattgcaggcgccgtcgggtagggaggtggtattcttgggaaggtctccaaagttcactctatccttgtagtcccaattacttc

SEQ ID NO: 97968 - DNA, 449 bp, Zea Mays
tgcatttcagttcttagatataatacttgcatcattgtctgaactggtagcatcgtagatatattttttatccaaataatggttgtgctcatgtaaaccacgccaaatattattctacaatgaatagctcatcgctgaaaaatgcagaaatcaagaagatattttaccattgcattgcaaaatccacatgttcgttgattcagtcttatgatttgtttagaattttgtttcacttattaacaacttattacatgtctgggttattggttatgaacctatctaaaagttgaattttaaattaattgtaccttttgtcatggttaaaatttggtgattcttaaaatgttaacctggtacctggcataataagatgctttgctggttttaaccaaagtggtcaagtttgttagtataagcaggccaggggcagccaaccatacttcatgtta

SEQ ID NO: 97969 - DNA, 460 bp, Zea Mays
ttgccccctggcgttgttatcatataggcccccttggtatgatagaaaggcaattggcatttgacactaaattttgcactaataaaactatgcgatgcactagagtcaaatagaattattcctggctgatttaaaactgaaaaggtatcggtcgtgatgggtgctccttctggaaggtcctctagagtagtgaagtacaaccttcccttcttaacttgcactttctgcttcctgctcttgtttgagttgcaatgggtcctggtcttggttggtttcgagggcaatccttggtataatggccaacattgccataggtgtagcacttgttccaatttccctgacgatactattgtggttgctgctttggctggttgttcctttgagcgggtgctggagggcggttggatgcttgtggctactgaggtggccttatcacccaacgtccgaatttctactgagg

SEQ ID NO: 97970 - DNA, 407 bp, Zea Mays
agtatccagttttgatgaggacgccggtaccttagctcctgctgctgaagaagtgcctgcaactggtcttactgacactgatcccaatgggtgtgcccaaactgttgctgatcccaatgggagtgctgcttgcgttgccgctgtggaggatgaagaggaagaagatgaagctcctttaactcagaaaaacagtcggcagttcatcgccagcggtggaagtagtggagttccttctcctgccttgtctgcccttattggtctgcaagaactgtccatggccaactttgatcaaactctagaggatatggtcccagaggatttgctttcagagcctgtggatgttgatgcaatagagacttgtgctgccgtgcccgatgctgggttgaggtcatcccgtgcctcgtcga

SEQ ID NO: 97971 - DNA, 322 bp, Zea Mays
ccgtcggcagcacgtaattattagtagcacaagagaagcaagggcatcactagtgatcagccaagaaactggattcccaagcgggtatgaacaccggacgctatctccaaccacccgatgacgcaccactagtgtgtagcaaacacagcattactcgcccgcattacctgctaaagtcggtatggacgcaacgcaagggtccccccaacaacctgtgaggagctgagcatttttggccaatctgacacggcgacaaacgcaacgcatgtcggcttttgccgcctttgtcaaccgcgccgcatgtctggctctggcgctttct

SEQ ID NO: 97972 - DNA, 762 bp, Zea Mays
aaaggatgacaacttgtgctgatgagttgctaattctctgtcccatgtacctcatgccaatagtccataccaacactaaaaatgaaaattaaaccttctgaacttgctaggcggtgcagacacagacagcaaaacaacatttcatatatgctaaacacataccttctatagcgaggagggtgggcttcttcagcgagcgatctgcttggagttggcaaacagcagcagaaaatagggcttcttcataggctccgttgctgcactaaaataaacaaacaacagtagaaagcaagagcaaggagttcgcaaaatgaagaaaatcatctgtctagtgctaggaggcagaaaattcacataacttccgacacagagcaggacgaccaatccgttctaggccctgtcatcgcctccgccacatcgtcgcgccagaaaaagtagcaaaactatgaactccaggaccacatactataattggctgattacctgaaaaccaaacaaaagtcacagattgtttacatcacaagtgtaatgccccaacattctcatatgaattaggcatgcataaacctgaaaagggcgtccataaaaacacagacattttttctctggtccgagcgatgttgttggaccaactaacataaatagcttctgaaatgtactccaccgagtatcttgcctcgtcgatgatctatcacacatcacagcaatatatctaattccaatcatgatgaaacgtgctaaaggtatataactaaatattag

SEQ ID NO: 97973 - DNA, 1520 bp, Zea Mays
gttcagtggtgtgtttccagtatacagagaagattagctgacttgaagaaaacttattctggaaattgaattgcatgaccttggattataagttgttgatatgttttgacataaggaggtggggaacgtagcaccaaataatgtcacttttgttgtaattttttcagcatctacttatgttagactaacttatttgggttgttggtattttagtatcatggtgtcttagtagttagtacagaattaagctgcatatattcaacattaggaatgcatggttcatgtactttctatgccacttcgattttaccaacacattgtgctttatgttctacaattttcatgtcatgcattagccaatcactgctatcattttgaaactatttaagttgctattgaaagttgtcagtatctacctatgatagactgtctaatctaggttgtcagttccaattacgatacactatctaatctgggttctttcatagcatcagactacacaccaacaaaagattgaaccaaaccaaactaaatcatagataaaaaatttcgcgaattctatcttatgatagacatgattttctgaaatttctataaggatgaggtatttgataacattgcaatcagtcagtaaaggaaacatatatgataaatatttttctcttttagtccctgctaattaacatatttatattacaacttcaaatccctctcatcaaccttcacgcgaccatatatccttgattcttatatatctttttaaaattgtaaaactacacaaaatcttaaataactttgtaatcacatctactactacatactaaatatattggtatttattatctagtatttatactctttttgagcaatgtgaaacctattaagccactatctatttcgtatttaccctcttgcttttacccttttagtgatttccccctatctttgttttttttagtttgatccctagactaccccaaattgcttgggacaaaaatctacgttggtgttatgttgctcgtatcaacaaaagaaaaagatagttgtcaaacaagtgtccagggccgagggtggtaaagtatttatatctaacacaaggattttaaccacctttggtaactatgtttatcaagatattgctaacaaatgcttggtttatagcttcacaacactgatacaacaaattaaacaacactgataaaaggccacaaaataacttctcaacttctgttttacattaaacacgctatttgatatttcttatccacttaatacaggttgtcgactaactttcagatcagcctaagaagtatgtattatctaaaaaaagagaagcaaaccaaacaacaaatacttttgatttttgtatctatgaatcataattcattctaacatcacaaaacaaatataagatcaagactagcgaactccacgaacaacagtaaggttctacagaccctaagacccataaccgttagatcatcgtcgttgccacgaaggtactacaccatctattctca

SEQ ID NO: 97974 - DNA, 755 bp, Zea Mays
cttttgttgttgcaggaagcgcatggtggtggtttgatgggtcatttcagtgccaagaagacggaggttgtgatgtccacacacttcttttggcctcgaatgcggcgtgatgttgagcgctttgtagcaagatgcacgacgtgtcaaaaagcgaagtcacgattgaacccacatggtttgtatatgcctcttcctattccttcagttccgtgggcggatatttctatggattttgtcttgggattacctaggacgaagagggggagcgatagtgtttttgttgtcgttgatcgtttttctaagatggcacattttataccttgtcacaaaatggatgatgccattcatattgctaacctctttttcaaagagattgttcgtttgcatggtatgccttctactattgtttcagatcgtgatgtaaaattcttgagtcatttttggcgtactctatggaacaaattggggacaaaattgctgttttctactacttgtcatccccaaactgatggacaaatagaagttgtgaatagaacattgtctgcaatgctgcgagcaatattgaagaaatacttgaaaatgtgggaagagtgtttgctgcatgtggagtttgcatataatcgggcggaacactccaccaccaaggtaagtccttttcaggtagtgtatggttttaaccctcgtgctcctattgatcttttgcctctacctactaccgagcaagtacatagtgatgctaaggagcgtgctgactt

SEQ ID NO: 97975 - DNA, 339 bp, Zea Mays
ctccgagtctagcgaaggtgacctggttcgattgaaatatacattcagatatggagataaatttgatgaaccaaatgacgactggcagaaatgtatcgaagctacaagtgatgaactgcttggatcatattccaaagcagaagataatgcattatccacatccttcggggtccagggaaaaaagagattgaacagagtttttgatgccattggttttgtttaccccgactactgctacccgctgcaaggatggggaaagaagaggaaaactgttgcttcagccaaaactgttgcttcggccactccagatgagcctgtgccgaagagcaaaaagttgaa

SEQ ID NO: 97976 - DNA, 538 bp, Zea Mays
tatactttgtgtattaatgcatattcatttatgcttccagaaattgaatatccgctgcattccctatgatgttattgtatcatcttggataatgagcgatcgccagcgcgatgctgtcgctaggttgggattttctagtatatttgatttgcgaactgatgccttagagagcagatcacttatcaggtggttgatggataaattggatccacatgacatgaccatacgcccaggggctggcaaggaactgaagataacaaaagatacggttcgtctgattttgggtttgccatgtgctggaggaggcagggagtttactgattggtacggtgaagtggatgctgctgcaaaactgagacgtgatctcaatgttggtaaagaagaatttaatgttgtcaagcttcaagacaagatagtgcttgacaatgatgatgagctatcaatcagatgcttttttctgattctattcaatcgacttctttttccttctgcttcttggggcattacaaacaatgaggtactaatgacttcaaacatg

SEQ ID NO: 97977 - DNA, 316 bp, Zea Mays
gaattctgcccgcttgtctctaggcacttgtggcactgaacttgcactggaggctgaggtgggggtggctgctgctgcacctgctgcattgctgctagggtctgaccaattgcttgaactgcctgagtttgcatcatgaacatctgctcaactgtcatcggtggtggtggtggcaaatgctgctgttgggctgcatcctcctagggtgcctgctgttctggctcagcatgccttgcacctctgcgcctgttctcagacatctgtagaaaccacacacacatcagatatgactctgcagtctttcaacataagaaaa

SEQ ID NO: 97978 - DNA, 276 bp, Zea Mays
catttgtccatagcatgaagttcctccaccatcatcatcaagccacttgatcaaaagcccagatcaacacatgtcttgataattctataatgatatgatccactccatgttatcacatggccttcttggttcatcaatctcaacatagcttgctcttcaccattgctttatgtccattggtgctaagtccttgctcttgcttcaccgccacgcggtccctcacacatgagcctttgacttgcccttcacactagccacgtggtccatcgaagccaa

SEQ ID NO: 97979 - DNA, 539 bp, Zea Mays
ctaatacagagaaggtcgaggtttattctgtaaaatcaaccagacacagacaacacatatgtggactgcgggttgttttgtataaaccgtggggtctcttttgcaaaatagtttcaacgaaggggtatggaaagagaccggtcgtttgattagattcggacagcccagattacatcgcgccaagggttagactggctcgggtctgtgccacacgatccgcaatgcacgacttggatttaaaacatcagaatcacttcgtggccacccatcatctgatcgacggctggggcataatctgcccaaacggcaagctagatctaatccgcaaggtccgtttccggatcaacggtcgtaggcctatcttccttctcgcactacagtagggcggtggcgtgcaggcccccacagctgagcacccgccggtgacagccatcttggcatgccaacgccccaatcccaaaacccgatctaattccgaagaggttgtttccgatccaccctaaccgttcgatccacgatcgatgaccactcgctttctt

SEQ ID NO: 97980 - DNA, 467 bp, Zea Mays
atgactcgaagggctctgggggaggagatagttcggctgcggcagaaaacgtaaataaattcgaagtcacaaaaataaaaataaagttaaaagctattaagcaatacctatccgcctttcgagttccgtagctttttcagctgccttcatcgcttcatttgcgtcgtgagtatctttttcgctctttttattatctcgtgagccatccctcggccgccattttcccagatgtcagtaaagaattttccaccaactaagctcgcttcggccgaggggtccttcgtgtcatcaatagataaagtagcttcggcgtgggccaaagctttcacatgatcgcaacctgacttctccaaaatagctgcaattcccctaggactgagaaggcacagacgtccccacgaccatttaaaatctcctcaaaggcttcggcctcgctgctgatccactcaatcggccctttgggatcg

SEQ ID NO: 97981 - DNA, 311 bp, Zea Mays
agtgttggcacacatgcatgcagatcacacacccacaacaggatttaattacatgctgatatgcataggaccgattcaaatccggcgctctttacactatataccaaagtgtcgatcgtcgtcaaagcccctttaccacagcgtgccgtgttgcctttttgaagaaacggagacctttcgctgcttctactcttctagtccgcattgcccctagttattacctaataataacgttaattttgaccgcactacactacactcgctcgcttggactcgattctactataccttttcgtgctagctaattgctg

SEQ ID NO: 97982 - DNA, 487 bp, Zea Mays
gagtataaaagaaaagtagacatgacgacgagatgactatagggtaacggtaagtgttatatattggaaggttgcggtagataataggttggtctatagttgatgtgaatgtcacgagaggattggaatcagcttaaaaaccaattcaagcgatttatatgcagcagtactcttgtgatcatgaatggtgaatcgcgccatgtgtttgggaaacctctaggcttccttcggttcttttggattgagtccagaaaatgattccaagttgaaatggtttactaatagtttactaatatgcataatcataatgaggtggaatagtttatggatcgaatcatgggtaaccgaacggaccgaacgaatagaaatagaatccgattttaattcgattcttaaattttatatatagtgtaaaatgtggaacccattaccatccctctacacccgaataagtcaagtggctacggcaacgagcccctcgccaaag

SEQ ID NO: 97983 - DNA, 515 bp, Zea Mays
cagattgtgggcaagttcgtttggctggcttcaagcctgaaccggatgctactgtttgatttctaaacaagatattgtggcttcaagctgccagttttgttttcgatttgaatgagtatcgtggtgatttctgatttgggcatggtctgtaggagaggccgagagggatgtccctgccattccccctgttgcatgttcttcgctgagctctggacgattgaagcctggatgattaatggggttgtgttctgttatgtttttatttgctctattgtgtttcccccttcacgtagtcatctttgtcatataaatggtggtgggctggtggccatgtgtttgaatccataagcagagaagtgcgcatcttgagccgtatgcgggggaagacgacagtgattctctctccatgactctgtcgtacattctgaaagggaattgttggagtatgaacttttttaaggagcaaagtattttaaggacgtcccaatacctgtttattgggagatatgttttta

SEQ ID NO: 97984 - DNA, 389 bp, Zea Mays
atgatgtaaagcagccaagctttagagtgatggcatggctgattgcatctttttctcctgtgttagcaataagaggaatgaataattgccagccggccgatgatgatgctgggggtgacttgtcctgtccatatcgatcccccggcccggcccttgccgacatctcatgtctatcccctcttttctttgtccaccagacgctgctgctaaacaaacaatgcagcacacccagatgccttgcttgcttccatatcatgttttgccagttaatatctaatccaacactgtaactgacatgcccagcaaattattagacaatctttaccaaaccggccactgccaacaatctgtactagctctatagatactagcagtgtactcatgcatcc

SEQ ID NO: 97985 - DNA, 483 bp, Zea Mays
ctgctggaggtgttgggaacgtctgtgtcctctaaatttaccggacaagatcacatacagactcttgttggagacagcctaaggggaacgaagacggagaggaaatctccacgttggcgcgggattcactggcaaccggtgtatagcggaggtctggagtccgccacaattaggggatggaccacaaatggtaaaatttagagtaccatttaccctacactgctggaggcgttgggaacgtctgtgtcatctaaatttaccggacaggatcacatacagactcttgttggagacaacctaaggggaacgagttgcagcaagcgttgaatatggtctaatatcaaacgaaccaacagatcaatgatcatacaagataggactgcaggttggttgttttcttcgaggtgctgagagattatttcatcttcaatttctcttgctagtgggaaagagcctgacaattcaaccatttcaggttctgta

SEQ ID NO: 97986 - DNA, 859 bp, Zea Mays
aaaactgttacctgcactttgcactgaaccagaggttttcctccacggtgaggttcccatggacgatgtcgtcttgcggcacgaagccaatgatcttcttgtaagagcggatgttgacgtcctttccattaacgaggacagagcccgtcatcttgtagccgttgagcttcccggtgacggcgttgaggaacgtggtcttgccggcgcctgacgggcccatgacagcagtcacacgccccggccggagctcgccgttgatggacctcagcagcttcttcttcttattattcccgagcatcaacgtcaggtccctgaactcgaccttgatcaacggcctcgttatctccctctgctgatccttggccatggcaaccaccccggtgaaggtcaggttcctgctctcctgctgctgctggaacttctccttctcgatctcgccgtacgcgtacttgaacacctgtgtatgggtggacctgtgctttcccttgggcgcaggcttgtcctccttcgtgtccaccacgacgacctctccgccgtcgctgacgtcgacaacaaccgacggcatcaccacctccgtgatctcgctcctgctctcggacgcaaacacggcagagtctgacatctcctgcgtcatcagcggcgcctcctgcaccctgcggctggagctgtgcgggtccaccggctgccgaaacgacacccgtctcgagaacgtgcgcgagagatggccctgcatgccgctcacatgcctcctcgcaaactgtttcgccgccctccacccctcctgcgccttcagctgctgccgggccagctggatggcgttctccctcgacctcgctttcctccgctcgcggatgctgag

SEQ ID NO: 97987 - DNA, 303 bp, Zea Mays
cgacaagaagtctgtcctcgccgccaacgacgtccacgacgccatgcttctccatgagagagacaaccgctgtcctgaacctacatgcctaggatgttgcagttcagaacattcgaagtctagtccctgtcgtcctcgacctagccgtcaacaattacacccgatggtacgagtagttcctgttcaccatcgggaagttcttcctttaggaccttgtcctcctcgtcgatatgacgaccgactacctcgactggacgcggatggactatgttgtccgatagtggatctatagcacaatattca

SEQ ID NO: 97988 - DNA, 443 bp, Zea Mays
gggagggtagggagggtagcccgaaaagaaggtatgcactagatcttcctcaaatgtcgagtcccgagggggctcgtcagatggaggaaaacctgacaaagatgaaggaccctagtatggaggaggaggagggtgactagaaccagaaggcctagggtcaccaggaataggttcaggggcgggagcaggagcagaatggaagaaggagtcatcaaactcctcggcttcatcctcaggagtaattaatggcacaccatactcctgttggtgtcattcattaagggtcttggggtaggcaggggtcggaggtggaagagggcgctgaagcatgggatggcccatgggggctgcgaagcctcgcatgtcatcatgcagcgccagagtctcgcgcttgtgcacaacctcctcaatagcacgactgcggcacattgcgaagacctcgg

SEQ ID NO: 97989 - DNA, 846 bp, Zea Mays
gcgtgcgcccgcgcccttggtactgactttgtgaataggcccccgtcgttttgaataacctgaagcagggtcgcagtactattcctcgagtcactgacagtttacaaaaacctcccccatgttctatttcttcacagcccgaagtccacgacggtgcacagcgcagggccgagctccggcgagcttgtaccggccgatttactcgatgaccggcgtcctactttggcagagaccgaattcaagtcctaaggagagtttcccctcaactaatttcactaatggcgctctaacgcgttctgtccacggtgacagcggacacgacgaacattcacacgcgttcccggcgatctaaggtagcttagctcaattgagttggtcgaggagtatcaggggcacacaagaacactaaaatgagagggcagagggtatgagcggacctgagacgagctgaccacggtgagatcacaccgctcggtgttcttaggtgatttgggggaaatcccaaattggggagttctagtggatgattcgaggcactagttgctctgctgggtacacaattacatagcagagcaggcggggtcggtaatttatagcaggcttgagcggtggccagtgaatttggattgggcacggtagcggtcggagaaggaatgagtcactggtgtggtgattcgtggccttcaccgtggcggcctcaccggcgacgaaccagtggcttacagtgactcactacgacgtggtaaaatgttgaggcacgtagccaggcaggataacggcgaatgtcggtgatgccaacgcgactgcccatgacgggacacgatggcagtgggaacagtggccgga

SEQ ID NO: 97990 - DNA, 766 bp, Zea Mays
tttttatacacaactaattacacatatatggactaaaggcgtgtttggaagtactccaatttttaagaacaatttttatcatcattgcagaaactgttttatgggaaaaaaggttgagtgtagatgtttggaacccagttcttaagaaactagttgtcagacacctagaagcgggcgaccaagtacctcaccgagcaagtctaagcgttgaaccaaagccacaaacatacattgaccacaacaatgtgtgacgccagaagcctaggtgataagatacaaacacaattctcatgtcagggacgaccttagcactggagcctctacaatatccagtatggcggaaacgacacgacgccatattgaatggacgaatccatagacgcggaatgacaacatggggcccacgatagcggaagggaatcgtgccctgttagtcgagctccgaggctgaaccatgggacccaccacacatcagcacagggacatcagccacgaacccatcacacggatggggcgacgccatatccaggagcactacttcgtacgatcaggagaaagaacccgccacaacgaatgaaggacccttaagatataaaaagggaaggaccctcttcctctcaacagatatgcacataagttgtaacacgctccattgcaatatcatgatcagtactacattggactagggctctgacccgaaccaatataacccatgtgtcccaagtgattcgtttgagtctcaacaattcaccgtccggagtaaatc

SEQ ID NO: 97991 - DNA, 861 bp, Zea Mays
aaaaaaaacaaataaaaagcacacgaaaatcacgttgttcaaagtctacagtagcactgaacatgtctagtgttgcactacatacaaatttggccctatgatgagcctaagatgcactagtgtgaaatgtgcaccagacgaaaggcaccgaacatggcacctagtaaggttgcaaaatatgctgaaacacatttgaactcatcatgtgtctaatgtggcaccggatgtcacactaaacagggcactcaaggagcttgtaaatgtgcacttccacatttatactcaccggtgttgattttacgcaacctctttagtgcatagagagatacttgtatgcatccaccacccatattaggcttgttttggtcaagtgacagtctagtgcttgttactcttagtgtttgacatcacctagatggcttagtggcgattggggtgtgtcaattagtcgaagagcttatgggtgacccgacttggctattgtacacaattgtgaacatttgcatggtgtcgcagtggtgaagaactaactcaatgagagcacttttcattgcacgaactaagtgaggcgatacccttacatgagtgctccaacaaggactagtggagagtgtcgactcttcgatacatcgggaaaaatagaggagtcatcttaactcttgctttaaattctacagttacttttgagaaatttactttgagtatttacttttcaagtattgccatgataacatatagtttggttttagtgcacttatctctttgtgaacatattaggcactagggtgaacttaggcttattcttagggtttaattgttgcaagaaattttagaaatcccaatttacccctcttaggtatc

SEQ ID NO: 97992 - DNA, 416 bp, Zea Mays
ctaggttgcttttaattaaataatgtctggagtaacaagtgaccttttaacaaaactagtttgttacttgtgtcactgttttcaagtcgtccggctaatcgcgattagtcgggcaggtcgcctggtagtggccaatcagccggacgactcgactagagtatcaagtcgtccgactagtcgtcgattaggggcgattagtcgtccgactagatggtaaatcgaccaggatttgtccaggcggctagggttttctagtgggctactgggcttctatttttttggcccatctacagtagtataaaggcaatgcgccaccaccccttgaaacttttcctctcctctgccgagtccagaacacaggctgcggctctagaacaccagcagcagctccaaaacaccggcagctgctccaaaac

SEQ ID NO: 97993 - DNA, 744 bp, Zea Mays
acagaaaaggaaaaaataagaatacttaccattcctaactatgtgggatgatgttggccgccgatgtcgctgaggcttgcatctttgtaatggataaggaggtcttggtgggaggggagggatggaagcagtcaccaatcgaagggaagggaggtgagttgttgttgttgagaggagaggaaagcaagtagttgcaagaggtagggaagatgagtgagttgtcgatggttggagagaatggtggggaggagagtgagttgctgaaagcaggaaaggaggaaggggaggagagtgagttgccagcggtgggagagaaggaaggggaggagagtgagttgccggcggcgagagagggggcaagcgactagtcatcgaaacaaattgtagatctggatggagatgagagagacgattagaggagggtgaggaatgggtgtccataacacaaaaggtgcaaatgaggacatctccttggggctttatgtaggacaagttataaacaaccattgtgggctctcaatcatttgtaggtggcccagttagcatagactaacgagatgctttatatggtgttaacttcatttttgtactcaccaaattacttaggatatatgcttgaattttactaaaccacaatagaatgaactaaaaagcttcataaactcaaccaaaccccaagagttgaactcatcactaccaagtaatagagcttcaatgatgtttttgtgagtctcaataaaaaac

SEQ ID NO: 97994 - DNA, 459 bp, Zea Mays
ttgaatggctatgtatcaactcatgctcatccagaggcattcatggtagaggggtgctgtaccaaagaggccattgagtccataggtctattttgcaatagtgtcctaaaagtcaaggttgcaatagctttgcctccgtcatgacatggggtagactatatggaagtgggaggatgggatggaaatttttcatcctgcgagattacaatatagtactagatgcacaatacaacatcctacattagctatctataatggagccattgatccaacaacacatcaatgcgattcgcgagaaaaatcctaggcatatggatgattgggtaatgaaggaacacatgcaacgggtcaacacatggctaatggtgaacctatgacattagtggattcacattttgtactaaatccaaggacaaaagagaatggcacaaaatagtggtgttcgatgcgaggccttag

SEQ ID NO: 97995 - DNA, 579 bp, Zea Mays
agtcagtctgtctttgaataacagaaataaggggttttcccttaatatatttttcagtaataattctctgccataaccccttagtattttccaaattccaaagccatttggatagcagcgcatcattcatatagcccagattcaacacacctaatccgcctaagtttttggaggagcaaactgtctgccaattaaccaaatgcatcttctttttctgggaacccccttgccaaagaagactttttctgaataaatccaactttctaataaccgatttaggagccggataaatcgataacatgtacagcggaacattagaaagagaactgttcaaaagggtcaatctgcctcccagactcaagaacctccccttccaaccagccaaccttttatccattttttccagcataggacaccaaagagatttactaatctttttattatcaattggcacaccaaggtatttcattggaaggctgccaatagggcaagtgaaaatgtcagcatacaactcagtatattctttagctttacccaagcagaaaatttcgcttttgtgaaaattgattttcagcccag

SEQ ID NO: 97996 - DNA, 389 bp, Zea Mays
atcttgtagttccatattagttctgttttcaggttgaagaattaggcatttcatcctttgtgtattgctggctcattagttgagcatatcttgaaagaactatattctcctttcccttttaaaaactcaacccgcgggggtaagaccgtcccacgacattacaattaagaagaccacatgcaagtcgagaaaatccccgaatgtctgctccacccatacacaacggtatcgtagctcatgtgagaacgaccgcggccggggtcccaggacattacaattaagaatacctcatgcaagtcgagaaaaccccccgaatctctgctccacccatacacaacggtatcgtagctcatgtgagaacgacatgtgagaatgaccgcgactggggc

SEQ ID NO: 97997 - DNA, 621 bp, Zea Mays
tgattccgaaggcaggtagtataccaagagccagaggtggagatgctaccccaactcctacatttgacaggaacttgtctcaaggaactgatggtttatctagaccaaaaggtgataatacttcacttcgtgtttcacaagaagctctgaaccatgatgtatccactgaaggggctcctaaagctgatcctgttacgaaggtctctgtatcacaacctgatgacaatacatgtgagcaaacaggaaccttttcctttggaacaagaagagaacaaggcatcagcgttgaaaaattggagacacctgagtttttaagttcccaaagaaaacggaacacggagtctgcagataaagccaaacccaatagtgagatgctcaggatgaagttgtgggagatccttggtggcacttcacaaaacaagcaggccgctgcttcaccaaaccctgatgacatggagacacctgatcagcctaaaggtcaaactgtcaaaggaccatcttcagggaacaaggaggttttcacttcaccttttcttgataacatcaagacaccagatccactgaagcgtcaaacggtgaacttcacaaagtgtaaactgtcccttgatccaattgaatcag

SEQ ID NO: 97998 - DNA, 331 bp, Zea Mays
ctgaaagttcatttactgttggtggtatgtgttgtcttcgcctctttggccaactgatgagagtgtgacttggatttgatgtcgtctttggagtgttgctgcagtggatccgtgttgctggaaaaagtgacaagtacgatggccagagaagcattgaggaagaaatcacatggggagttctacctgtagttcatgtggtagtacctagtgtcagtggattattaggcccttcttttgcagaggcaggtaacaagtgatttacaactgcacctaccactctgatagcaaacacaagcatctccttttatatataaaaaaagaaaggttacgc

SEQ ID NO: 97999 - DNA, 460 bp, Zea Mays
cagggtttaatctataagatttcctagactcagaatccacccgcgtggacggcgggttggtttcaaaggaactgagggacttatttgcaatatggcgcaaccgaagaggtatgatgacatgtggaccattagatcaatgatcgacgcccccgattagatccgtctttaagtgaaccgttacgcgacatggaccgcccgatctaaatccaagggtcggaacccgggatctagtcccaccccacaccatgatctcatctgattcatccgtgggtcgattgacggcacagattaatctcaggaaaggagtacgtgcacatcaaccgcgaccgtggatttcaagatcaacggccacaatacttcttctccacgcgaataccaagtgtggcagcgccgtttctccccctacggcggacgccatagccagaccacccattcaccgctcccgggcccgaaatttcta

SEQ ID NO: 98000 - DNA, 373 bp, Zea Mays
gattcttcatgaaatcatgcatgagactaaaaaaaggaaggagactggtattattttgaaactggattttgagaaagcttatgataaagtcaactgggattttttattccttacccttcaaaataggggttttggcaataaatggatgatgtggatgcatatggttgtcgagggtggcactgttagtgtgaaaataaataatcagattggtaaatatattaagagttacaaaggtgttcgacagggagatccactctcgcctatcctctttaattttgtggctgatagccttgctagaatgatggacaaagcatgtgctaatggggttttgaatggtttgggtaggcatttgatccccaatggggtgatcttg

SEQ ID NO: 98001 - DNA, 388 bp, Zea Mays
gccacaactggtatcggagcaaattccaccacagagaaggacaataaaccatggataccattttcaaaaattaaaacttgcctagaaactgctacggatcgtcaggactagaccgctagacctaggacgaaaggccttaggcatagagggagaaataggtggctaattaattaggccccgtgggccagtacttagactttttaaggatgccctaagagcaccctattgtttggagaggaaacgttactttcagcatgcatgcattataaacacaaagagaaattaaaacttgagctaacccacttcctttaaaatcattcgggccctctttctttttttccttccaccataatctttacctttgattcccttccgccgatgaattcac

SEQ ID NO: 98002 - DNA, 271 bp, Zea Mays
ctcgcgtaagtagtaactaatgtacgggtaaccactaaccaagattgaaccagtttctccgggatcggagtaagatactggacgccggagtcgtttgttctgagtgactgatgaaaacgatcaaactcagacttctataactgtaataacaagaccctaaaggctaaagcaccgtccagtgaggtaccaggtgaggacggttcaaaatactgtcgaggggtcctgggcatcaatctccaagtgttgtgttgtcctaaatgtaacaccataa

SEQ ID NO: 98003 - DNA, 284 bp, Zea Mays
ctttacctgttggtaacgcccttctggactctactctttttgcttgctagggcgccacgaagcgcgcttctttttccagtgttacttgattgtgacagtggagaatgtcttgttcccgtgcggcgagtggcgtcacccgaacttgtgcatttgatgttttctattagatgcttgaggccatcgtctttgtgtcattaattaatggccctctgctcctgagatgtttgtttgtctcttctatgtcatatatttgtttaatataggttgaatcattcatgtctgcc

SEQ ID NO: 98004 - DNA, 713 bp, Zea Mays
gcttcgtgtagcgtgtctccaattcgagattagctcacttggcgacgatcggggcgctggaggaaggtctccgccgtggggattttgcgctgctgcccgaggtttggtcggaggttgaaggcgcgccgtcgaccgtccgatttggtgggcggtcgggatttgataaagggctgggtctgtgcgcgccgttgattttggagtgagcggtagagattagaaattggcataccctttcggcgttttatcatccgaccgtcgaagttgaatcggatggttgcgcgaggttgtagacgtggccgaactctggccctggatctttgatccggtggcggctactgctcagggctccagctgctgctttgggcctaatctggaccgttgatgctcgatccaacggccgagggatcacggtaccctttcgtcgtgcccattttgcataagcgcccctctgttttagcgaagttaacccgcagtctgcagcagagtcagcctgagtcttaggacatctttcgtggaagcccctggtttttctgaaaattgatgcccagtccagaacctatttaaaatgaataaatgaattagtaaatgtatttttaatgcaaaaacaattgctagaacttggaaaattcacatctagttcattttaaatccaaattgagccattccaatttctaaaattttgtaataagattctctatcatttagtgtctctg

SEQ ID NO: 98005 - DNA, 568 bp, Zea Mays
ggttacaaagaactaaagcagtaatccaacatactgagagaaccatgtgtttggaaaccccgtctggagaaagaatagtagttgaagacaatcgacctccagctcagattggtacatctgacaaggaagaataatatatcatttagctagaaggagtatgtctcacgaagaaaaaaaatgttgcccctttaaggatttgtaatagtgctaagtaatatatgaataaatttggataatctttcgcacctattgtgttttgcctctttataaagagaataaagggtggtgtcatctgctatatgcaaacaatgtgatgctctattctagttgccctaaagttctgctcaagtctttctctcaaattgtgctcaaagaaatacttttggatcagaaagatgatttggatatcatgctctgaaatctataaagttcaaaagatccatgttaaagattataacacttgtacgctcttgtagtatgatgaagctaggcggaaatctgaaaccatccttgttccttaactaatcttatattagaaatcaaaatgtagctctttatcttaatgtca

SEQ ID NO: 98006 - DNA, 490 bp, Zea Mays
tgatttctgatattaatttctgattttcaaagttctctggattgggtctcaaattctagaaagcgcagggggttctgggtaaaactcctgcgactcagggaacagtgtaaaggatggcgggttgattccgcggaagtttggggtctctttagtaaatagtacccgcgaaggggtatggatcaatactggccgcccgatccgaaacggacgcgtgagattagatcaggcgcaaaacgaatcggtatgcgctattggccgttagatcgagatctgatggcaccgattttatgaaacccaaatcaaccacaaccgcccgatcgaacatcgacggctgcgattcaactgagcgaaggggtaactcctatctaatcagagccattcgacaatagatcaacggcccaggtgcgtcttcttccacctctgtccaagccgagcgacggcgccaggagctccccacgacggagctgtcgccggagatagtcatcccgcg

SEQ ID NO: 98007 - DNA, 834 bp, Zea Mays
ggtctatagggcagtagctgagagagcgatgtacgcgtgggacaggcccagagtgtcagtatggagggtgaagttgtgatagcatgatgcgctcacattaaatttttaatagagtagtatagataagacatcaataatatcgagtctagtgcttccagtaattaaagaaagccctaatcggtcagtgcaccaggtcaaaccttcccacgcgtttcattcccacctccgatccaacactgtcgacgactcgcgcagggcgcgagtaacttactagtatattacaatcaggaacagattccattcttctgaatggagtgccatgaaaaaccttgcactgtagaagaggtgtcagacaaggggtccctctttctccattattgtttgtgttagctattgatctgctccaaagcattattaacaaggcaaaagatatgagtttgtgggcaatattttcatatagttcaatatgcagatgacaccttattgattatggaggcatgtttaagaaagctatttttcctaaaagcattactgcatacttttgcagaattagctggtttaagagtcaattacaataagtcaaacatatatccaataaatgtcagtgagcaaaaaaatggagatccgaactttcaactgtcaaattggtacaatgcccttcacggcttcacctacctaggcttgccacggggagtttttaaaccccgagtggaggactttttacctctagttcacatgattgaaagaacactaacttgcacatccctgttcttgtctcaagtagaaaagttggaattagtaatttctatgttctctgctttgccaaccttctac

SEQ ID NO: 98008 - DNA, 296 bp, Zea Mays
attaaggattataacacttgtacactcttgtagtgtgatgaagctaggcggaatcggaaatcatccttaactaatcttatattggaaatcaaaatgttgtgttaagctctttatcttaatgtcatgcaagcctcttatgcagtctgtctcactaactcttttaccctctgactagatgatgaaccccaatggaaatgaagtaaatgatgccaacaacgatattcctaccttaacaactatgaacgaaaaaaatgagtcacagagatattttggaatgaagaacaacaaaaggaata

SEQ ID NO: 98009 - DNA, 476 bp, Zea Mays
gtgtacaacatgtccaaagatactttgaaatcaagtactgctttcgacatcagaggacacataggtaataactttttagagctaattattactgactcaaatgaatcaaggcaaaaacaaataaaaaacatatggatacacgacgtggatactatctcgtggaacacataaaggtgccaacagatttcccctggattgagcatgccttcagagtaagggcgatctacaatacgcaaaatacaaaatattccattttcaattgtgagtgcatgacattggaacatactggtacgtgagaaaaaatgaacatgtgatttgatatgcagtagttccttgtataattacttaagtcatataactgtatggaaaaaactgcccacatttagttcaagccatgaaacatttgtctatcgactgaataccatctaagtagatattgcgatgatacacaagaaatgcaattgtgtcgataggat

SEQ ID NO: 98010 - DNA, 575 bp, Zea Mays
gccgagcgaatgaagacatcatcggcgctttagagatagctgccgagtgactgaagacattgtcggcgctttagaggcaaatgccgagcgaatgaagacatcatcggcgctttagagatagccgccgagcaactgaagatattggtgataacgtcaacgtcttagaaatgatagccgagttaaaacgggccgcgtcggccacttttgaggataatagccgagtgatgatgtggtacatcggggttttagaggtaaccgccgagtgatgatgtggcacaccggtgttttagaagtaactgccgggtgctgactgggcgcttttggaaacgacatccagctcgggaatatcccgcctatacagcgctttcagccgcctctgctttccgtgccctagttcttgtttttctgcctccaaatcctccccgcaattcggctctcgctctattcgccaatagattcgagatggcgcccaagagaaaagcttcgagttcatctgctgcagtaattccccctatcgacccaacagccaattgcctttcgcgggtaatcacatgtctgttgtctccgagtctgat

SEQ ID NO: 98011 - DNA, 544 bp, Zea Mays
accgttgattgttttccccacttcgtcacttcgcgagtcttgccttaactctatccttggttatgctttccatgattaccatcttcacccttgtcacctctatatcttaacttgatgcttatgttatacatgtcctttaaaaccttctctcttccatctcaattttatagttgcattttagctacttttcccttggtcgtatcctcttctttgtcaccagcgagtttttaactctatcatttattgtgcttttgtttgttactttctttacccttctcatcactctatcctaccttgtgattatgttatgcctgttatctaaaatctccaatgtcctatcccaaattgagagcggtgttttacatatcttacccttggcaatatcctcttctttaccgcgtataagcttgggcgcaactccattctttgttgtactcataccactggctctttaatgacttcatcttttctctcatacccttgtctgtcatcgccattgacccttgagatattgatgtcttctacctaaatgcttaccttgaac

SEQ ID NO: 98012 - DNA, 711 bp, Zea Mays
gttgtcgcctagattcacgctcgggtgggtggataacatcgcgtgaggaaagatatttgtcgtcggtgggctggaggtcactccggtgactcaccgtcaccatctcccttctgttttgcggctgagcagataagctcgccggggaaccaccctcgcacggccttgcgccacgtatccgagtacctccaccgcatcgccatgattcgttttagctttccgtcgatcgccggagcaattgccacggcattggacacgaagcacttgcgccagtgaacgtttagtcctccgaccgccgcgcgtccttctccaaattcccggccaccgttgatgccctctataaattgagtgcgccacagtctccgtagggcagtaaactatccagccaccacgaatcagccgcatccatttgctagaatccgcgaattttgaattcgccccaaatcaatttccgtcgccgtgaagaacagctcgttgcggccagctcgattccggttagctcgcgtccctctgttccttgttctagcgtcctcatgtgcccttgatgctcaccaaaccgtccaattacactagaagcccacccatcgtcaggaacatccccctccatccgcaaccttcacggtcaccgtggccagcacaaccctgttgatcattagtgaaattaagttgggggaaaggtgtgggatgggtccaattccgtgtccgtcgctcggg

SEQ ID NO: 98013 - DNA, 585 bp, Zea Mays
cttttccgagttatgatctggcacttttgcgcctgacttatcgagccaactcatatttatgctgacatatccccttgagttccaaaccctaattctcgctttttcctccgccgcttcttgatttcctgagttcttgagcccgtccgcttcgcttgagagattgcaatggctcctaagaggaagagacagagtgatgatgttccaattatcccgccaatcgatcctaatagccaacttccatttgttggcaaccacatgtccattgtctctgagtctgacctcttacacctcgttgaaactagtgttcttccgccaaaggagatgtgttcatggcgaatctggcgtggggttacagttttgacagaggatacccacgaagctgtcgtcttcatgccctttctcatccgaggactagccctgccggcctctccctttttccgtggcctcctcgatttttatgctctgaatcttacacacttaaaccccaattctattcttctaattgtcgtgtttgttcacctctgtgaagcttttcttggaattcttcctcatttcgggctttggaaatacctctaccactgtcgg

SEQ ID NO: 98014 - DNA, 503 bp, Zea Mays
aaaatttctggcactttcattatttcttcaatttttggctcttcaatcttcctctcaactggctcgaccgtcagtaccttcggcactacagtaggctctttagagctctgtgcagtcgggacagtttctttcgcttcagcagacgaagaggtccctttgccaaattcaggtatcacagccggttcaatgtaacgcgaccggtgagtcagaaccttcatcttcttgccctgcggctcagctgtgatggccgaagcagcaatttttctttttaccccttgccctcgcagcaggtagccataataagggtatacgaagccaatagcatcgaataccctattcaatcttttcttactccgacccccaaaagctgcggacaaggcattgtcctcggtcttggagtatgccccaagtagctcgtcgctagtagcttcaatgcacttcagccagtcatcatttggctcatcaaacttatccccaaacctgaaggtatacttcagtcggac

SEQ ID NO: 98015 - DNA, 479 bp, Zea Mays
aacccttgagacttgtgatgtttgattgtatatggtttgatccacatgttggcacgcgagttgacgaattcgggatggtggaggtaaagcacgcatcaaggtataaaggcaatgagtacaacaatattatcctggcacatcaagcgcatcaggtgtactatttgagttatcctcataaaagttttaaaacctggtgggttgcatataaggttaatctagaggttcacccttaccgatatcaaaactacaatttaagcaccaacgatgatgatgttgtcttccaagaagtcggtgatcaagcagacgatagcgacaatgatagtattgtatccaaaggggcaggactaaatgagttagcttctcttaccgtagagttaatggaggaacccgtttcatcaaattcaaaacatcaaaggtttgaagaaacagttcttgaaacacaacaatgggttgaacaacttaatacacgtgtcgccgaa

SEQ ID NO: 98016 - DNA, 625 bp, Zea Mays
gggattttgatctgcacactctgctgctatgaattgatcggagagccgtcaaattcaaattattattatcccgacccgaccggtttgtcgccgattcgattccattgcccttgcccccgtcccccgtgcgtgtcaattatgcgatccgagatgtattgagcttagaaccagggggtctcaaattgagttgatcaggcttcttgctccgcatggtggacgctgctgtttctggcagcgaagatctggcggaatcgcccgagcttcagcttaacgcattgcgagtccttctcggtaggttctcttggttcgtgtgcacaagtttatgcgcatcgacatcacatttaatcggttggtacggtgttgttgtcattgtcacatagaaattatcacatgtatgtacttcctgtagcaacgcaaagtccattcggtcgggcggtacatagttttcaatgcctgaacggaacgggcttcgcgtgcaattagtcataccttgactgtacgtcatgctgatggtttgtgcagatcgtgctagcgtagagggctgtggtagaatactaggatgtctgtcaatgtcatgtgagctttacattccctaagatgtggtattgttttcactgaatagact

SEQ ID NO: 98017 - DNA, 404 bp, Zea Mays
ttactatcaagaataagtacccctgcccagaattgaagatttattcgatcagttgagaggagccagtgtgttctcaaagatagatctgaggtcaggctaccattagctcagaatccgacccttagacataccgaagatagccttcatcactaagtatggactatatgagttcacgatcatgtcattcggtttgacgaatgcgccagcttacttcatgtacctgatgaacagtgtgttcatggactacctcgacaagttcatagtagtgttcattgatgacattcttatatattcccagaatgagcaagagcatgaggagcatttgaggaaagtactccagaggctacgagattgtcagctgtatgccaagcttagcaagtgcgagttctggatccgtgaagtcc

SEQ ID NO: 98018 - DNA, 578 bp, Zea Mays
taccattactcattttccatcgcacgatgctgaaactcaagaaaacccacaagatccatcggctacaaacgggcatgcccaatcccagccattttatgggatgccgatgaactcttacattggacaaccacatcctccgtcacctatatgggaacaatctgtgcccttgcgcacggctggacagtttgggtctgaggccagatggtctagcccagtggcagtcggctctctcccctgtgatgagccaccgaaatatgcaccagggacaacaaagatgatcggaccatctggctatacgtgcggaccgtccgagcacgtcaccggaccgtctggctgttacaccgaacaagcttctataagttatgcagagtaaaatacgtatttttaccagcaatcctcctatcagccccaactaacgtctctctagcacccgcaacccctcagggtcgtggaatgagcccacccacacaatggtacgagcccttttcagcccacaaatggccgggaagatctagcatgcaatatggagtacctagggccaacattaatgacccgcataacccaaactcatgggcaag

SEQ ID NO: 98019 - DNA, 583 bp, Zea Mays
tggcagctggaccccacttgtaagatctctctctttctccaaatcaggaactgaaaaaaaagcacgcacgcctcccaccagctcacctgtgcatgtcgttgtcgcatgccacgatgctatgcgcccacctgcgcttggcctcttgctgcggtcaatgccgtgcacacccgccgtagcagctgagacctctcctcttcctcttctctataccgttcgacagtttcttctacctccattaatggttccaactcttcttcttccccactcggggactgccattaatggcgccggccagccctccctttccaccagaccacgtcgctgaccttgtgtttgcctgctaatctgtgggccacatccgcatgcctcgggccatgtccaccctgccgcagttttctcttcagttactgtgcacagcttcatggcgctattaatggagaattacaacgtcagtttcttgagccaccaacgtcgagctgcaaatagccttcaagccacgtaattccaacttgattcactctctccctcgcctataagagccacagccacgagttctcctccctctgctcagtctcgccacgcc

SEQ ID NO: 98020 - DNA, 329 bp, Zea Mays
caaaagcatgacttaaaatttgtttcaaaaaaccagcaaagtctcttcgcacaattggtccaacaaaccacccacggcccaatggccaaatcccgcaagctaggtactcttcaaccaagtccctgccactacaagtaaccacagcaaaattgaaggcctgatcatcgcgatccctctctgcaactacatagcaccaaaaagcctcaaactaaaatgaagacataatgcttggctgaggccatgacttgccctcctgatagcgcacataaaactagctctccgtccaccctcacttgttctttgtatagggggctaactcaaccaccttc

SEQ ID NO: 98021 - DNA, 730 bp, Zea Mays
gtcatgatatcttcagctgatacaaaggtacatgatgtgctagagaagactatgagtcctccttcaccctctgctgctgaagtttcggagattctgaaggtaatgactgaatccataccatttacactactaagtccaatgaggttagatctgactagcctcttacaatcaaaggaaatcgctccatctacgaaggagaaggccgagaagtagaagaaacgacagatgatgaatgtgatgcaagctattgaacaaatgtcgcccctagcttcggcggataaaacatctgtgcctattgttgccgaagataccgctagagccaaagctgatgaactcgcaaccacaatgtcagaaatcgacaaactcatatcgaatgtggttgcagaggaaatcgtagccgcggcgcctgacaaaggaaaaagaattgaagatgcctcttcggaagacaaggattttgacctttgacacttaggtggccaagaactttctgaagaagataaatcaaaattgagagaatttgctatatcctgcggttaccagaccggatccatactcttcggcggggtcgacgaagagattttgggatgcattcccgaccgcgccggggcaaaaatcataagcaccttatccaagagtgttggattttcgaagctggaaacgaacatcagctgctataggcggcaacacgttatcgatagcttgttctaatcaaactacaaagtaagacttt

SEQ ID NO: 98022 - DNA, 283 bp, Zea Mays
ttttataaaattctaaaaactctgcacaaattacagtggcttggaactggtgtatgtttctctgtctcaaaatttggggatcagaaagtgaatagttttctctggacaaaattattaaattctagggcagaaggggtgctttgaactacaactattatttaacagtgaataattctctaaaacttatttttgctggcctttaggtgttataacatgacttgataccaatttctagtcattaataccttttaattaattttccatggttttctcaagtttctag

SEQ ID NO: 98023 - DNA, 646 bp, Zea Mays
atcgccgtgaataaatttctgttccgaatagtatgctcccacccttgcgaagctatttttcagcttcttcgcgcattccaaggatgtttcgtagcatctcaccttggaatcccgaagatcttcaacatccttttgcacccttgatctttccatttcacttatctcctgctttgcctttgcaacttctaaattttcattcatttctgcaagctttttcttcaaacctttggcttcagctttgcgggctttggtttgagcactagtgctagctttcagcctatccactaagaaaaacaatattttatctttctcaagagcatcgttccttagtgtgatgacctctgaccgaaggtttccaagagctatctgacagctctcgtcgtctgcttccttttgagcccttaaagctttacttagaattaagtcctaataacaaaaaatgtatgtgagaacataatgatagaaaggaaacctacaaacgtaatttattgtacaacaaaagtatatataccttcaagctattataagcaagactatctgcaagatcatcctttgacatcgcagataggccgagctcgagcttcgggaatcccatgttcctcatcatttcccggcaaacaaatatctctttattgttcggtaggca

SEQ ID NO: 98024 - DNA, 607 bp, Zea Mays
gtggattgtattatttgcataatgaagttttaaatagagagtgagatatgaaggaagataaggagtctgctgaagatagcctaagaccatcttcaacggttcccatctcgtcccccctcctctcagatagtggagacagtagccctctaaaagctacaacgatgccctctactcttgcctctacgcaagggaaatcgtctctccccctagttccagggacatgctatacactcgtgtcggtgtttggaccgcgagtccttaaccaataagtaatgtgccgcgtggccggctctagattgtgcgcgagatgacacaagcgtttatcctattttgggcttctcgaggccctacttccagcagaggggatgaggcttatactactcgcaccgtggtacctgtagtggggggtttacaagcacagtgggagaggggcagtccccaagtccctagagtgattgaggaaagtgccgatatctaagatagagtgagaaggcaagaactcgtctacgtgtgtcctcctgtcccgtggagggaccactgccctatttatacaccaagggaagcgtccgcagtgaagctgggtcctgtattcgaggagggatgtcct

SEQ ID NO: 98025 - DNA, 307 bp, Zea Mays
tggttggcattcaggccgtcgtcggctggctatcgggagagacgaaagcatgagcaccgttggatttgtagccaacaatggttaggggtgaaaacgggacggatacggacggatactaggtcatctcatatcctaccctagtataattttctcggatacaagatcggatacggatagttaaaatccgggacggatacaggacgagatcggataataattgggacgggtaagaaacggatatcggatattaaccggatagataacggatattagtcggatagtccgtcctgatgatattaggttccca

SEQ ID NO: 98026 - DNA, 300 bp, Zea Mays
aataataggagagattggttaagattagtttccttttcatatgccttaatcataggaaaggttggttgatccagaggctatatatatgtcgtgtaatagactgggaaagaatcaagcaagatcaattatccaaaactgctcttctcccttgcctctctcaagccaccggtgaggaacccctcacggtgaaggtctggagcgcgactacgaactgcgtagccacgatccagcgaagttgggcgtcgaggcgcttgacaacctggtatcagcgtcacgttgatcctcaaccacccgctcttg

SEQ ID NO: 98027 - DNA, 410 bp, Zea Mays
cggtctctccatcagcctctccatcgtagtcctccccatagtcatcatcatcacgcatcagtgaaccttggcatgccagctcgtcctcctgcctaggtgcattgtggtctgccgcctcgcgcgcttgctcaaatgcattgtggtcctgctctagcataggtccacttgagcctatcgcctcacgctccgtctcaagtgcattgtggcctgccacctcgcgctattgcccaggtgcactttggcctgccacctcgcgctcttgcctaggtgcactatggcatgccacctcgcgctcttgccagatgcactatggcttgccacttcgcgcccctgctcctccatgcaaccaaggagctgctctagtcgttgccttgacgctgtagagccctacaaacataatcaacaatgat

SEQ ID NO: 98028 - DNA, 366 bp, Zea Mays
ctgtcatgttatttttcagaagctattaccattgcagttcgcaacgtttatctagaaattgttgctcttccattgatttagcttagtaggtacttcaatgcaatatgttcaaaggagttgagtgctgaagatttaaagcagttgagcacctcgattcctgaaatcctttatcgtcttgagatgattttcccactagccttttttgatataatgattcatttgctgattcatctagctgaagaggctaaacttggatagaacaaagcgcaccctggaagctcgatagctgagggatatatccaattgagagatatctacgtactcttaaaggctatgtatagaacaaagcgcaccctagaagctcga

SEQ ID NO: 98029 - DNA, 386 bp, Zea Mays
aaaataccttgcccgaaggggtatggctgttttaatctcgaccatccatctcgatccaacggcgagggcttgttcttcttcccttattcctctgaatcaacagccgacgatgcattttcccccaccacgctccccagccgtggcggcgcgttcacttcacacggcagagctcgcctgagaagcgctacccggcggtccagtgctcgattccccacatcaactgcatctacaagatactgcgttcaaagctaatccacgggaagggtccttacccgatcttatcgcatggagaccaccgcccatggcggagtgcggcccgatggtggtgcccaagaaccgatgaacaattcgcctccccgatactcgatcctttccaccgagcccac

SEQ ID NO: 98030 - DNA, 643 bp, Zea Mays
ggcgaactgcgggtttctttggccgtacgtctcgggtggatcctggcgccggcagatccgaatggtacgtgctgatccctcctctccttggctgctctgttcttggtttccgttctctggctgcgagatgtagaatttgctttgcttcgctccgctgaagctgaacggggtcgctcggtcatctaatcgcatttgtatcgaattggattgaattgaattgaatcacacggattaaactccgttaatctcaattagccatgtctccagtagccagcacagcagtatgaacctacctacagtacctacctatccatccattccattggcgtagcggacaaagaaaggaacaaacaaatcagcgaaagatgcacgtgtggcccacgttggtagggcaagattggagtgccaagtgtgctttccaccgtggacctgattttggagtaggccgtgtctcatccttcaagacttcgcataataaatcttgtctgctctataacatgagccgattaattagctgcagcactgaaaagaaaccatcttgtttgaatccagtaaacaacacagtcatctgatcgtcataaaatgatataatctgtctataccgcacccaagtgtttcagtctttcagagttccaaaacgttc

SEQ ID NO: 98031 - DNA, 422 bp, Zea Mays
aacacatctgggaactcagacactaccttgatactctcaattgggtctgcttcactgttttcgacagccacctgataacaacttcctttctttggctcaggcgggactaactcggtcaccacttcctctcctagtggggacaccaacttgattgacctcttatcacaaccgataacttcttgatacttatctagccaattcatccctaggatgatatctattccctgagtacccattactatgaggttagcgggaaacactatcccccttatttccacacttacattcaaacaaatgctatcggctcgaattctaccaccggctgagtcaatttgaatggggttgacaaggtagtaattggaagattatgtgcttttacccatgatgcagtaatgaaagaatgcgttgctccagtgtcaaat

SEQ ID NO: 98032 - DNA, 280 bp, Zea Mays
ggagaatagtgcaagcattagcaccatagagtttgtctacaaagacattacatgatagccttaacacatagattagaatagatgtttgggacacattgcgtgtaatgccctatgtcctttggataatcattggttggtgaatatagatgatgaagtgattacatgctccaacacctatctttgatagctcaagggagtgatagagcctacatgtatgttctacaagcggatcttacttatcattggggcaactacccccatcccatcatagccttataca

SEQ ID NO: 98033 - DNA, 505 bp, Zea Mays
gggggatttagtggatgtttgagcaaggtctttgtaacaaagttgtagttggtacattggacaacaactttaatacaggcaggtgagtgagttgccacacaaaaactggagaagcgcttcaattcgctctgtcagaacaactgatgaagaatgtgatggtacagtatatgcaaaagatcacagatgtagtgaacgttgtcgccaatgaactctgcgccgcgatcctcgtcggcattgtgattcgtgcactctggcgtgcggataacggtcgacgatgaaaagatcttgcacgaggatgaccttggggcactgttttgccctatcgacgtacccacttgcaccggcgatgtggctgcacgaccatcaccgtcgtgccgccgtctagctcggttgtgacacgccttaagtcatctcaccactcgtcgcaagccatgaagactcggcagtgaccgccgtagaccgtaaaccagtgagggccacgttagcaactccggtgactcttccc

SEQ ID NO: 98034 - DNA, 419 bp, Zea Mays
cagctttccacccagggagctggtcagctatcttgtcgattatgctttgagtttgatttctggatagcttgctcaaagacagaggcagaccaaggtatttacaggggaaagaagagatctcacatgggagtagctcttgaagggttaccacttcttccccacatctaattggatactcagtgtttttgtgaatgctagttttcagccctgaagcttctccaaaaatctctaatatttttagtacaatttgaatatcagattcttttggatgcaagaacatgatcacatcatcagcatacaaggacactctgtgttgcaaaggtctagaggacaagggttgtagcagattttccagctcagcttttgagattaaccaacctagcacatccatgactagtatgaacaacataggtgagagg

SEQ ID NO: 98035 - DNA, 532 bp, Zea Mays
gtgcccttcatctctaccctgaatatggcacatctcccctcgtctgttatatcatatgatagctttttcgatgtagacttaaataatgagtcaatatgtgtgcttttgctctctagcttccatggctttgtgcacattttttacgaggtggtggcgcaagtgaatgactccttttctttggttcagaagaaggtgaagggctccttcaactaggaggtggaggaggtgaagggctcctacattgtggaaagtcttattgttaggaagccccattagcattttctatcctatgctagttgtgcatcgagtattttaatgtaccatttctgccataagacatatctgtgcagtgcctgtgcaagtacaatttcatcatcacccctcggatgtctagcttcaaatctttgtatccatcacagatctggtcaatgcttaccaccaagtacccgactagaattttagcctcgtggtaacttgtccttgtgtgtggcggaggcaccataccataagccaccttagttgtcaagtttct

SEQ ID NO: 98036 - DNA, 365 bp, Zea Mays
tggtaacacggatactcatgtgttatgacatcacacaatcatgtccttgtctctcctagctctttctgtccctgcccatcgttgacctagacgtgcaagaacatgaaactactcaaataacttgtgtgtcgtcgcaatggacgattattgtatgttttggggtcatgctcgttgtgaccttgcctctttgttagaaagaacctcgtgtcatcctttcagcgtgcgtaagtgtacaaccggtatagtgtattgcttcgtcctggccagtatgtgtgtcactatagagactctgatgcttaggtgcttcatgattgggttggttggtcccacaaggcggagatgggaagcgctaaagagcgtatgtg

SEQ ID NO: 98037 - DNA, 301 bp, Zea Mays
gggttcaatccctatggaatgaccgctgccccatacacatgttggcccgtgttcattatccccatcagtcccccggtgtatgctttcaaacacataacatatccatgtcgttgataattcctggacacccgaggaataaaatgggcgtgtacatggagtctttgattgatgaattagtctgtgcttgggaggaagtggtatggacatatgaccaagctatgaagacaaacttcaaaatgcatgcttggtaccagtactccatgcatgacttaccagcatatgggctattctgcgcctggtg

SEQ ID NO: 98038 - DNA, 536 bp, Zea Mays
caaagctcactgcataaaacctctctctgtaatgtgcgtaagatttcccaaataaatcaccacaatagcatacattgcccacaactggatgattgtggttggggattttatctgtatgtttttaaaacatctcggcattagggggaggaatgcccatatagtgtaatgcctcaatattctataaaacgcacaaaagctaaactgaacctgtcgttcggtgtgtactcctgtgtatatggagtttgccagaaatcgttgaggagtaaccatattggtctgaatgcttctacatgatgtagatgtggatatacccgggattaatatcatatccacatttgacttatcgatatttgatctattctcggggacgcctgcgaatatgatccattggccttagtcaaagcatatgttctgattgcagattcacgtggtctgtgataactctcctctgattaattcaccctgatggtgatttgcctcacgaagaggttcatcttgatgatgaagttcctagcaatgcgcgcaatatcattgtg

SEQ ID NO: 98039 - DNA, 467 bp, Zea Mays
gtctgatgatttttagccaaaaatcttgatactagcttgttcactgtagagggcccggtgcacacaagaccaagtcctgtagagggtccggtgcacccatactaaagggtataagtcctttctccttggttcttcttccaatcaacttgaactttcttgggcaccttcatatgacttagataaacataattagagtgtaatctagttgactaagtcccagaaacttacctctttctcaacctctcaacttctctgtttctcctcaaatagggcccaaacgacactttctctacaaaccaagttagagagcaaaccaaaatgccaaatgcatagtaaaaggtgtatgtaacatattcaaacactcaaaccttacatacttgacatttttcatcgtttttctctttttggcctttttgagctcaaggttggactccaaatcctcaagttgacataacttgaacttaatg

SEQ ID NO: 98040 - DNA, 351 bp, Zea Mays
gaatggtttggcataaaacagttacgctataaatgttgcatatatagtatatacagaatggcgtaaaacgttgagtcattgtgcgtaagaagttataatgtttttttgaattgaagttacactcctacaatatcgatatggttacggaaattatggaaataccctggaaacgtgggtgcggttacttgtttagagtatcatccgtgatttccttgcattcgaaaaaaatatccgactactggagaactagttggcgatggagatggccggctgtggacaatcgccggcgatggtaggagatggcgatcatcttggtccaaacagtgagggagtagttgatggtaacttaat

SEQ ID NO: 98041 - DNA, 866 bp, Zea Mays
gccagtactgcaagaggtcatagcagtcttatctcaggtagcgcaacttcgttaccactatcaaatcatgttgactggcaagttcaggaaggcagtgataaacatgattgtcatttctcgcttagagagcttaaaaggaggctaagaattgccattagcaataatgagaaggatcaccagttaaactccacgagtagtgattttcatgaagctgaggctgattctggcaaactccacgagtagcaaagtagcattactaaactaaaaggttaggagacataaaacttgcctgggatcggacagcagtaccgtagccgtgccggcacttctcctcctgactcgttccagtgctgtgagccttgctccagtagcagtggggcgccggcggcttagaaaaaaaatagcttcgctcaagacgagagaactgtcaggagatttcccatggcccactgcttagaaaaaaaacagcttagcaataatatatatatatagatgtacaatataaaaatgtattagaaaatttaagccagaatttgaatcctaataagtcgtcagccatctctggtgcagtcccctagtggtgctggtacgcagcagcaccgacgttccgtaaccgtgtctccctggcaagaaaggatttcccatcgtgttcgtggtcacaagaccaaaaatgccagaacggagagaaagcgcaggctgctctcccctgcactagctgtggacctaatccaatgaagaagcgccatgaatgctgcgatggcgatggcgctgtcgtctcggcgtcggagaacccccaatccgcccatggcccgccgccctcggcgttggtcctcgtcatggtctcgctagaagaacaccaatcaagg

SEQ ID NO: 98042 - DNA, 1128 bp, Zea Mays
agaaaggaaaatgagaaaacctccttcctacttggaactcaaccctttgttctcttctgctcgattttggcccaagttatttcctcaaccggcccatttactccatgcacccgcatggcccagccccacgcacgctcggtgtcgcgttatccctctcttgtgttggtccttcctgttagtcgcttaactgtgcactcacgtgaacacaatcactgtcttgtgggatcgcctcatcaactccatcttctcgctgtaacaaactccacacgtttgtaacaaccataacagccctgaaattccttgccagctagacctggtcgggggatcccttgacaggtgtataaatgcggatccttctaagaccttgtctccataaaatgagtagtcgaggcatgtgaatacttatttatcgagagcaccacgccggagcaacgatggagaaagagagagtgcacacgtcgtggtagtcgccttatgtctacatcgtcgttctggttctggctattggtcgtggagattcaccaagggtttgtgtagcatgcgtgctatgatgctaggcgaaagggcttgttggaaccgtagagtttcttattgggatcgagtggcgccgtgtagctacatatggcgtggatagcgccaccgacgcctcaaccaccggtaagtcagtccctatagaggtattccatttccccgcattcgtttacactgtgtataggtcggagtgggtcactagagcattggggagcatacaccgacaaggggcgtcaccgtggtggatgggtgtcgttgcctgatgcatcgggctagtggatggtgataattaattgaagaataccattcaggtagatgcgatctagactcttgatcgtcgagcggacgattaggattataaggggcataccattttgtcgattacgcgtgagtcatggatctttgatcggatggcttgggtcgagtgggagtaataacagttttgtaacatttgcttaagagacctgaaaatgacacgcaatccaccacgcttgttccaacaacctgattgtttctagattttgaaccttaacaaaacaaaatagtaattactattagcaccaattggtattcatggtcttattatttccactgcga

SEQ ID NO: 98043 - DNA, 304 bp, Zea Mays
gattagtccttttagtctggccatcagtctgaggatgatagaccgaactgaaactcaacttcgtattcatattctcattaaagctttccaaaacctagaggtaaactgtgagcctcgatcagacacgatcttctttggtactccgtgtaaacacacaatccgagccatatataactctgctagctgagagcctttataagtagtcttgactggaatgaaacgggccactttggtcagtctatccacaatcacccatatggaatcatacccttttgaggtgcgaggcaacccagtaatgaaatcc

SEQ ID NO: 98044 - DNA, 647 bp, Zea Mays
atttgatatgattatcgccccttttggtggaacttgacatgtcttgtgtccctgaattccataaaactctcggctggttcttggcaattgacgagtgtcaaggatttagtgggaacattcgacccaactttataaattagaacatgtgtcatttcactactcactagagagggatttggtttcatgttctgttccacccattagctatttcttaggagacaggccaatcacatggtttctatttgcccgacattggatttttaatgccttaatttttagtaaatccaggctacgttatagtagtattacacgaaaaggctctgttgcactatgaatccaagatcaatgcataaaaaagatgcactgtatataaataaaaaataccaacatagcaatgtcatattgcataaacacatatccaaatggtattttgctcggttcagatacagtcagtggcgtagttcaatgtttgatttcccatgttttcttctttgccagcccataataaaaattacaacaactgttctccaaactaaactttatgattgaaaatctaagcattcagctagtaatcatgttatggcgcttggtcttttggttgtacttcttagcatgaagttgaaagttgtgcataaattttggtcgca

SEQ ID NO: 98045 - DNA, 716 bp, Zea Mays
gacagattcaagagcccagtttttcagggagggggcatcagtcatctcgtcagttggataagctaagcacacaggcttttggcgttttgctccacccccctacatacgtgctgtactgttcgtgcttctcggcagcttctgttctgtttgtttgtaattaaaagagcagcaggtatcagtaaaaattgctcgtcgcggctcttggtatactattactcagattccaacagcagttgtaccttggctagctacaaacaaagttactgtatagtccaagttgagaaatccttgggtcctctttttttttttttttttttttttgatgtgcaaaggcttcgttctttaccagcgcccagcggatcaagaaatcaggactcaagggtgactttacttccaattgataatcctttttatcatttacactagtacaaacatgtcgcctttgagcgattctggcatagtgcctcttatatcgattacagtcatcaactgggggctgatttttgttagcttccgtccgtggctccaaccagaactagaggctccttgtatgacagttggccgttcgaccgaagatcaattgtggctctaaatcttgccatgactaaagggaaaatgaaaatgtatttattggttgtgcagaataagagtgacgtattagtactttgacgagagctggaagctttttggcgtcgtaagctgtaaccctttttagg

SEQ ID NO: 98046 - DNA, 402 bp, Zea Mays
gacgacttcctctagtacttgatcaaagtcggatattgaaagtccctaaagactgacaagagccgacagagctggagtagggatgtcgctgctcccctcacttcctctataatgccgactgttcttacggatcagcaggacttcttcctcttcatcatcatcaagcatacatccaacaatctgtgcacccttggcgtcagcttctggaacggcctctgttgggacatcatcaggaactggcacagaagggccagcatcctgacccaagcacaatagtcgccggagccgccttttcttcttcttctcctcgataggtgcaattgagcatctcgctcggcgcgcacgctttgggtgagcaccctcaggtttccaattttccacctcttcaccaaactcctcccc

SEQ ID NO: 98047 - DNA, 544 bp, Zea Mays
gtcgaggagcattttcttgacggctgtgaaaattttgccattggcgcgttccacgactccgttggactgggggtggtacactgaggcgaaggcaagcttggtgccgatggagaagcagaaatccttgaagtcttggttgtcgaactgcttgccattgtcgactgtgagttcggacgggactccaaagcggcaaacaatattttgccagaagaatttctgggctgtcttcgatgttatagtggatactgccctcgcctcaatccatttggtgaagtattcaacggcgacgaaggtgaacttgaggttcccctgagccgtgggcaggggcccgacaatgtccaggccccagcgctgaagaggccacgtgtgggcgattagcttcatgaattgcgaagggcgtcccgatcgtggagaaaatttctgacaggcttcgcaggacctcgcgacccgatttgcggcgcaaatcatggcgggccagtagaaaccttgacgattcacctttgccgctagggccctaggccctgcgtgggagccgcaagtcccg

SEQ ID NO: 98048 - DNA, 1766 bp, Zea Mays
tacagccagatcaggaaaaaccaaattacctggaggttggagaagaacgaaggaactcccaagtcgtgggaaatcagttgatggctcgatgaaggatcaacacccggagcaacccacaatgcatcagtggggaccaagtcagtatcaacagcagaaatcaaaactctgtcatcaggaacgctggcctctaaggtgacttcatgacctgaagcttgagctgctgccatgcaaccagaatgcggaggagaagaccctacgtgaacatccatggaagtgtgagagggagaaccaactcggacaccctcgggggctgcgtcatagctcgcgctacccatccgagccggattatccccggcgacaccctcgggggctgggtaagcgctagcgccatccttgagggccgagctctctgtaacagccacctctaaggctgaaggaccttcacccacttccatgggagcagaacaatccagaccagcctcctgacccttaagaccgtgctccaaggtcgatgaggcacgagatgccgctcgggataactccagcccggcatcgggcacatcagcacaaatatccatcatcccaccatctgtcagctccgacaacagatcctctgggaccatatcttcgagagtctgatcaaaatttgccagagacaattcttgtagaccaacgagagcagacaaagctggagaagaaacaccactactttccccgctggctatgtagcgccggttgttcttccgaattagagggacttcattctcctcttcctcatcttcatcaataatgcggacggtacacccattgggatcagctgtggtcagattacacccactgggttcagcatcatcaaggtcacacccattgggatcagcatcagtcgggtcacacccattgggattagcttcagcaaaaactggcactggcacttcctcagcagcaggagcagaaggaccggcatcctgatccaagcatgacactcggcgaagacgtctctttttctttttcttccccccagcaggagaagttggttgattggctcggcgaggacgcttcgggcgaacactatcagacctctgaatatccaaagctttgccggcctctgggatgggtgctacagccagtgtttcagcaggggctgcatcagaggaatcttcagccaacatatccagcatggcacttatctctgcatcacttggattcaaaggtacctcgaaatgaacctgcctctcgttgttagggatttcaccaagtgaggcaaccaaagcactaacctcttcgggagagggtcgcactctaaggcccaaaccgctatcaccagaacgaggatttgacacaaaactggtaaaggccttggaaggaggcagattccaggccgagtatgcaacaagagtgccgatgttcgacaccttgcctctgagtatcatctcgagccggctcaccaaatccacagcaggaatccttctgttggtaacccgggttgaatcagcgaggccttgatacagataagctgggtatcctttgtcttttagtggctgaatgttcttgaaaatgaaatcggtgaccacagcttctgcagtgagacccctctctttcaacaacccaacctcagcaagcagagcccctgcctcagccacctctaggtctatgggggattcggtccaactcggagtgcgaacatctgactgtctccctgatcgtggggggagggaattctcgtgattctccatgataaaccattccaggcgccatcctttgatgtt

SEQ ID NO: 98049 - DNA, 584 bp, Zea Mays
tgggtagcgatatggtctcacagtgaaagggttggcgcccagaatgagcggaatggcatgatcacatggccgacttggtggtaaacccactagctcggcaaacacttcagagaattgatctaacactgattgcaccctagggtccaagatgtggttgtcggaatttcctgctgtagcagatgtgtgctcttctaatagcatacgcaattccaccaatgcccctcacagaaatgaacaagccgctcccgacaaacatactgaatcaccattatatgggatacataaccacttattgcaccaatccatgtgcattggactatacttttgtaaccagtccatgcccagcaccaaatcaacggacggcaacggtaagaatatcatgtctgtttgaaacttgtatccagacaacaaccattcagcttgacgcagtcgttgggaacaagagataattgcccattagcaacacgtacctgataacatcgatccaatggttgaattcccttgagtagtggcaccaatcgatccgtaatgaaagtatgggatgatctgaaatccaccaagaccattagatgttgctgttgaat

SEQ ID NO: 98050 - DNA, 396 bp, Zea Mays
ataggggcggtgcctgggataagctctatggcaaattcaactttcctttcaggtggcatgcctggtaactcctcagggaatacatcggggaattctaacacaatcctaattgcttcaatcggattggactccttgtcatctactgattaatggtgacaggctccttcttctagttcaggtaagtacaacttggttactacttcctttccggatggggacaccaacttaactgttctcttgtcacaactgacagtggcttgatttctgtgtagccaattcatccctaggatgacatctaacccttgagttcccattactactaggctagcagggaaatctaccccccttatttcaatccttagatccagacaaatcctatcggactgaacttttccc

SEQ ID NO: 98051 - DNA, 590 bp, Zea Mays
ctcatcaatttctttgtccactacaaatatgacctcacttgtgtgaaacatctgacatctccttagatttcacaaaacttgcctcatcagaagtatgtgtgcacacattcgtgatgctctttctcttcatgtatgtccaagcatcagttatcactaaacagccacttttgttgatctcttcacggtcctgcagcaaggtcttcattcttgcatgttcctctttcagcaacttctctcgaagatcatgttaggtagggggtttaaaactaggatccaaacagccaatgacctctaccatttcaatgaactgatcattgccaactgcatttaatgatataccatgagtgtatacccatctagcaacatattgttccacttgatgtgtcctctctttccaaaatgcttcatttaaactctgttgcctctttgcttctagtttgctttccaaaatgttgggtcagagattacacgcttgattaagcggcctgagcgcttaattcaatgcttagggcttaagcgatgcacaaaccccacatttagcgcctaattgagtgctcacagcctcacgcttatttgaacactgcagtttg

SEQ ID NO: 98052 - DNA, 546 bp, Zea Mays
ctcaggcgatgctggccacggaagagctctccacagcggcgatggcgaccgatttggggaaaaaaattcaggcactatggtggctaattggagacgagggttggtgcccttgcttcataggaacctagcggagctagctgtgcactcaaattatagtatccgtgagtggtggctccgaatttggaagagggaagctggcagccgaagagagggggtgagtcaccgacgcgaactaccatggcgttcaccggggcagtgtctcaggcgatggatagtctacctacggtggtctactatgacatggtaactcttcttagtatgtgggacggctacgaagggcggcgaactccggtgaggacacctcggtcaatcgcgcggcaagtggcacgatgaacagtccggtgataaggctccaactcttccttgcgttgagatctttcaccgtcagccgttatccacacaccagggcgcacgaatcgcgaggaccggcgtacatcatggcataagttcacaggtggcgagatacactgaacctaaagatctttt

SEQ ID NO: 98053 - DNA, 421 bp, Zea Mays
atcagagttatctctagggtcggccatagggcgcagatctgatagatccaatcttagtatccctagagaagtcaccaaaaagtgtgttggtgcggatctaggcgccaatcgctaggagttgttcgactccgcaggcactttatggcggcgtggatggtccacggcctagggtcagacggttcacgaccagtcaacataagcatggttcactgcgccgagctagacggtcaacgcgtgcacatggctgatggcgttcactaacaacacctagatcttgcctctcgagagggaccccattagggaggagaggttctagggtttgtcttgggattggcaggccacccaagatggctccagacaatgtagggtagaagaggtgtgaagattgagaccaatgaaggctatgttactggctactcct

SEQ ID NO: 98054 - DNA, 381 bp, Zea Mays
ccggcataagctttgtaaatgaaaaggaaaacgaatacaatttgtaaagaaatgactacatgaaggaataatcatgatttcagaagcaagtttggaacacatacctatcttgcggtgacgtcctttttagagtaaataggatggcaagtggagtcataaaatatttaggtgctagagaggaaaggggaaaatcattagctttcaattcaaactaaagaatcataggagtaattcaagtaactgtatgatttcaaaacagatctaatttgtatgcgtcctacaaaaaatgaacagagttacacaaatcacatttacaccgtaagtgtaagcaccatgcccacatgctcaacttttctccaatctacacagcaaacacaaaac

SEQ ID NO: 98055 - DNA, 723 bp, Zea Mays
ggcggatcacatggacagcgtgggcctgagtgtcatcatttgaactacaccgacccttagcctttgtaacctgacgctaggcgcggctcatcgtgttacgtcctactagcggtctgtgcactcaagcctagtccaatagatcatgagtgtgccgtagatcgagggggcatacaggtcgtaaatgcgctgcagcccgaggggtccataggccatgagtacgttacagctcgaggggctcgtaggttatgagtgggaggcggaccgacgcccctgctatggctcatcgctagacgcaattaatgcggtcggttatttatgacgggttggtcttgggccggacgagggatctactcgagtggaatcccttcggctcacccgatcccgcccctatctggttctgccacacccgacccgggactcagtgctacgaggcttgtccggggacaggtgcttatagggtagacattatctttcttctccagctgaccaatggacctcagatgccagaggcttttccctgacatgctcactgatcgatgggggccgggggtcatatcctctacaaaactctattttttctatcaatatgttttcatagaaatcatgctaacatttatcttcttgaaatggagatggacatgaataatgaattagcccttggcaggaaatatgaagatactttcaactaccaactagctcttagtaaaatattttttatttcct

SEQ ID NO: 98056 - DNA, 336 bp, Zea Mays
cccagtgcaatctggcatggactatctggatccatgacgcatcggggcctagtttctccgaaggttaaacttaaagggctctgaaccagcttttccttcttctcatccactttgacataaaaccattcactcttctagccagctggccattttgtacgatagctgataactggatacttggcatctttccgatatgcaaaattgtaacagccgaaattatcatgcagcccatcttctctagcttttgtctggtaatgaagctcgtgtgcccggcaaaaaccttcggcaagtggctctgcctcctggcttcggagtgcccatatataaacactaagc

SEQ ID NO: 98057 - DNA, 631 bp, Zea Mays
aacatcacagcaacaatatatggatgctcactcattgttctagtaagtaatttttttgtttactgtgcatatatatgatatgcaaatatttgttatgtactaattttatatacttgtgcattccttttttcagatttactatcttgatcacctacatcaccctgcatctcctgacaacaaatatggtactccacgcattaagttttttgataatgagaccataagagagttggctcggggtgacagacgcatccccccgtaaaactggtgaaccattcggatatgcagaggttagacataaacaatttttgtcctgttctgcagatgttaaaatattattactgctaactgttctatctgactttatacagtttcgtagccgttcagaaacgtgttacgtcattgctccagaatggcctgtttctgccgttttcaacatatatgtgccacatatcaagaatttgattggcaacaagttgcattgtttgccctcccagcagcggccaatgtttcaagcaatgtttgatgctcatgacaaagaggtggataaataatgtgattcccttcagctgagtcatcagatgattgtttcgaagcagattgaactctctgaaacatttggtgaaatgat

SEQ ID NO: 98058 - DNA, 320 bp, Zea Mays
tccgagacggatcatctccggcaacaccctcgggggctgggtcgcagcatgcgctacccatctgagccgaatcatcaccggcaacaccctcgggggctgggtaagcgccagcaccatccttgagggccgagttctctgcagcagccacctctaaggctaaaggtccctcagtcacttccatgggagcagtgcaatccagaccagcttcctgaccctcaagaccgctctccaaggtcgatgaggcgcgggacgctgcccgggatgaccccaacccggcatcgagcacatcagcacaaacatccatcgcgccaccatctgcc

SEQ ID NO: 98059 - DNA, 495 bp, Zea Mays
gacaaattaaacatatgatatgcgcctcctcataattcagggaactgctgatcgagactggtgctcttaaattttggaaaaggccataccagtttttgcctagctagatatcttgtggtgcacaggtagtatatatactactagctggttaataaggagcctcccacgcatgttgcaaaagcatgcattgaataggtctagctagtaggatagctagctgtactggtccctcgtcgtcactaacttcgtgctaattttccttcagtcccgttcggattatgatgcatggtctcatcttaattaggttgcaaggcatagtaatgatatttttgcatgcccgccagttctacctaaacccctctagatctgcggtgatggttgatgtacatgccagtaaatggattaatgacgacgtttcctctccctaataattgatgagagatcctgagattagtcataaatatacttaaaggacagatgtgtagtggctcgatc

SEQ ID NO: 98060 - DNA, 327 bp, Zea Mays
catagtggtcaccctgagttaagtaagtatgcaagtcaatcgtaaataagctgagtatctttgtaatctctctttattgatgacacatttccactttacagaatacattgtcgtcctagcagttttgaaatgcagcctagggataaaactttctgaggtgctctatgttccaggagttcccaacttctgtgccatccatctgagtgaggcgatatgatctgggccgagtgacttctgtcactatgaaaggtccttcccataagggtgataacttgtgtcgtccctctcccgttagaattcggcggaggacgaggtctcctatcgaaa

SEQ ID NO: 98061 - DNA, 624 bp, Zea Mays
atactaaggaccctcggggatattttaggtcctttgtgtaatgttgcactttggcaatttgctcttctgataatcgtttccctgaagcatggagaacaatatattccaaatcatctcgagaaggcgcttcggctataggtgatgttagcttttccggaagactttccttttcctgctccactggcttagatcctgaatgtccagcttcagcgcaagtaggagaagcgcctgcaacagctaccactaattttcaatattgtcttcggaagctttagtagaaataggagttggcacctttgaagatttcagaacagcatccaaaacactgaccattctcttccctttcctaggagttattgctcagtagttgttaacttcagcaaccccgtcgtggttgggggactctacagtttcagatgctatgtttcttttaccggagcgacaatggccatgacagtcacaacaggtattatctcggaaaccaagagggtagctttggcacattcaacaacctccatcttctctatagttggcactgtagcagtcttctctaaagagtgtagcttcggcctacgagtcaaaaccttagctctttttggcttcgacgtggtggaagaagtcgta

SEQ ID NO: 98062 - DNA, 623 bp, Zea Mays
caaaaagatttgggcatgaaggaggtgatggatccaagaaacagtcaaggttgctgatccgtccctttaacccaaatcgctcttttccttgtccacctgtttatcctttcaagcaactagttttcatcatcccactcctgcccttactcaaaacaatcagccgagtgtccctggtactcgtttcccggccttacccagttcatctaatagatgcttcaattgtgggaagtctggacatttcatcaaggattgtccctatccaaagcaaaataaatcaaactttcaaaaggcttctagaagcacatctcaaggcaagggaaatgtggaaagtactcaggcagtcaaagatcaaaggaaaactggacgagtctactatactcaagtggctaccaccctggaaggagagcctgtgatgatgggtacgttttccgttgccaatcatcctgccgtcattctttttgattctggtgcatcacatactaccacgagcaaggattttgttgagaagcattgcatacctagtgttgaatcaaagaagggtcttgttattcaatcacctggggtcaattttttactaagtaagtagtcttccacgtactcgtgaaattagctggatataattt

SEQ ID NO: 98063 - DNA, 372 bp, Zea Mays
acaagcatattacaacaccctgcatgaaaaggtgcatgtattgtatgaccggctgcatccgaacgtgccaccagaagttgcaacaatgtgagctggaccatctggaacagctaatggaggatctgatggggggttggacctttttggagcccctccttccatgaacctcgcagatgaacggtctcctaaagtgggcagtggagcagctaaggatgaagagaattagagtagtatagtttaaataatgtccttatgtaaaataaataaggaagtcgagttgtattactgagtatgtataattattacagttcagcaatgtaataaagatggtgtgtgtttggcatgtaataattcatgatgttttttcctcag

SEQ ID NO: 98064 - DNA, 296 bp, Zea Mays
ttttatatagacttagatatataataaaataaataaacttttatatagtaggttggactaaatttaatgaaaactagattttgatctaactttttctcggtgcttcactactcagcccactccccacccgagtcgtggtgctcgtcgccacgtcgggatcttgcacgcagtacatctactttgccttctaatccgcaccggtggatgggtaggctattagtaggattctaccttggcatcacagcaacacccgccctggctatctcacaagggtcccgttgcgccgtcgcaacgcg

SEQ ID NO: 98065 - DNA, 543 bp, Zea Mays
tgtgcatcgactacaccagcctaaacaaggcatgtcctaaggacccgtatccacttccacgcatagaccaaatcgtggactctacctccgggtgcgacctcttgtccttcttagatgcctactcgggtttccaccagatccagatggctagggaggataggaagcataccacttttgtaacagtggatgggctctactgctatgttgtaatgccctacggtctgaagaacgccttgccaacatttgtacgggcgatgagtaagaccttcggggacctgatcagggacaaagtagagatatatgtcgatgacatcatggtcaagactatgaaggggtcgactctggtggaagacctgaccctggtctttgataggctgcgggcgacgcgcacaaagctgaacccggacaaatgtgtctttggtgtctccgccgagaagctgctgggattcctggttttgcaccgggggattgaagcaaacccagagaagattagggcaatcaaggcgatgaggcctccgacccgcatcaaggacgtccaaaagc

SEQ ID NO: 98066 - DNA, 622 bp, Zea Mays
ctgaagctgaatttgtgggctttatgggaataaagtgcacagacttagtcaagcgatccactaccacccatatagcatccctgcctcgaggagaacgaggtaagcccaccacaaaatccatggtgatatgctcccacttctactctggaatttccaatggcttcaataaacctacaggcctcttatgctcggtcttcacgcgctgacatacttcacaggcggccacatacttagaaacatcaaccttcatcctcttccaccaaaagtttttcttcaaatctctgtacattttggtttcgccagggtgaacggtgtaaggcgttttatgagcttctctaaagatattcatcttcacctttgatttctgaggcacacaaagatggcccctgaaacgaaccaaatcattctcatcaatggtgaactcacggggtttaccatcgccgaccctctttcgagcttccttgtaacacccagtttgtaatatataataaaagaggagaaaagtcatttcctatattttatgtgtgtgttgaatctacttgtcatcacatgtgaataccatattcaaacaacaaataaataataaaaagatataccactaaattatgcatcatgctggatt

SEQ ID NO: 98067 - DNA, 369 bp, Zea Mays
taacgaagcaatcatcttaagtcggcgacgacttaagacggtgcgacatgctcacgctaactcggcttagggtgaccactataccctactaacggagcaaccggcttaagtcggtgacgacttaagacggtgcaacatgctcacacttactcgacttaggctgaccactataacctactaacggtgcaatcatcttaagtcggcaatgacttaagtcggtgccacatgctcacgctaacttggcttagggtgaccactgtaccctactaacggaacaatcgacttaagtcggtgcgatatgttcacatccacttatcttagggcgaccattatgctctaccagccaggcgatcggtttaaatcggaaaa

SEQ ID NO: 98068 - DNA, 430 bp, Zea Mays
ttggaaagaatgggtgtatatatgtatgtgcacttgattatgtaggatagagtatgcctttaaagcatagataggtttgggcaagaaagggtagggtaagaaaatgcttcatccaagtttgtggatcttgattcctttgaagatctggcttgaatcttatccttccttgatttgatgaggtcgatcatcttcgatcttcgttcttgaagttgttatccgaatttgggacatgtagttaaggcagattcttaggtaaacaaaataggttaataggtggttatgagttaaataagtctaagtagagtttgtcttgttgttttgcttctagattggttggataagttatgtaacatgttatatcggtcaagttggtgttatcatcaaggataatgggtattggtgttaacataactagggacatagttgagat

SEQ ID NO: 98069 - DNA, 525 bp, Zea Mays
ttaacatgacaagactaggatgatggagaaaaacacataccttcaatcagtcttgagttaggtgtctaacagtgatccctagttgggcatgatggtaagtcagttcaagaggggaattggtggaccagggttaggctttgctgctagggctgggagtgacgctcagtttggtaaggctggtgggtccagtggcttgagtcaaacagagaaacatccaaccacctccaagcttgtcaaaatcactccacccaaatttgccacctctactatgagagatggagtgtttgtggagcctatgagagccccacctcagaaataagtgtggtgtcgaaaacctaaccatctcaggaacacacttggcaccctgccagatatctctagtgaccccttcctaaagcccttcagccaccccaaaaaggtccacacccacaaacatattccgcctaagagaaaggtgaggtaccattgtgagtattgtgtcagggatggacatttggctgccttttgctttaggaggaaagaaga

SEQ ID NO: 98070 - DNA, 405 bp, Zea Mays
cgactacacgccggaggactacggaggccgagaccaaggagctcgccaccacgacgcctaaggcttagctaggttgagagcaccagatttgtagtccttaggcatacgagacttgggagcatcctccctctctcgcccgcttgtaacccctactacgagcgttgagcaacaaagatgtcggtagcacgagccgccaaatactggatgtagcgacattttgctcgaaactagtataaatctcgcacccgaccacaccatctgggctccgaaacacgtacaaacaaatttacttgtcggagctggttcgaaacaccgaaagttggcgcggctttgaacttatctctttttgtaatacaataatatatgtgctacatatctttgaacttaaatctttttatatattgc

SEQ ID NO: 98071 - DNA, 482 bp, Zea Mays
cttaggctgagagatatgaagctgagaaggaaaagttcatcaaaacaactgttgcatttaggaagcagtaataatttagttgctagtaaactccagtcattgacattgatagcaaactccaaaaatctataacgctcattatgcataatctcactgcatagagatagaatgcacgattactaccaagtgcacaagtaaagtaacatatgtggtaaaattttagatggatttaacttgtctaatgaatcggacatgaatggatcaaacaaaaaagacagaaccattggacaggaaagcgaaacataaacctttgtgtttggagactgacgcaaagcatcagcgatgctaatcatggattcctccagcgaccccaatcagacacaaacacaagtagccacgttcctaccctaaacacccagtttcatgcctttagccgctagctcgaaggatgaacagaaggccacgtcgctgcatccaaaggg

SEQ ID NO: 98072 - DNA, 379 bp, Zea Mays
gatgtctaaatcagtataaatcttgcgcccaccgcgcacaccgttcaaagttcggaatgtgcacagagaaatttacttgttagaacgaggtttaaaacaccaacagttgacgcactaggtaggggtgttgtacgttcccgacgaagttctttaagcttcggatggccagcaacgacaatgatgcgggttggactcccggaatgaccattccttttgggtgtctcgacttcatcatcaatggcgagggaactatggatagtgccctggaagcctcagttcccccaacgagcgactcgctcgacattactaaaggccttggcagcctttggcttggtcccccaagaggaggcaatgggtggcggcgtgtgccgcgactcgc

SEQ ID NO: 98073 - DNA, 667 bp, Zea Mays
ataatattttatacccgactttcaaagaggcatgtaaaactcatagactacttgaggatgatcaggaatggtacaatgcctttgatgaggccgcatcctgggcaacatccagtcagcttcgcaatctttttgtcacaatgctccttttctgtgaggtaggcgatgaattctcgttctttgaaaaagtttggagattacttgctgatgatattcagtataacgcaagacaactacttaaccatccatcctaccaaatgagtgatgaggcgcttaaaaatcaattgatagaagagctcacaactttattcaatcgaagaggaagtcgtatacaagattttaacttaccaatcagatctgattcatataatcagttgagttcaaatcgttttatcgatgatgaattatcatatgatattgacactatgcatactgaatctgaaatcttagtttcaagattaaacagtgaacaattacatgctttcacaactattacagaaactgttttatcaaacaagccaagattttttttcgtctcagggtacggtggcacaggtaaaacatatttatggaactgtatcataacatttttacggagtcgcaaacaaattgttttatctgtagcttcctctggtgtggcctcattacttctaccaggagggcgaacatc

SEQ ID NO: 98074 - DNA, 438 bp, Zea Mays
ctagcttttagtatttcaatggtgttattggccatgaaagacataaataactctttaatgtggtctgagatggtgaatgttggcttgcgagcactgtttgtttgatgtgagttgcgatgtgagatggttaatgttggtgttggggcgaaggcggactgcccccttgctcgggtcatttataacaagagagataaatcatgatggacaagcgaaggtccttagacagagaagcgaatgccctaaggtggagggaagtgtttaacgcaggtgaaggctctgccagttccaagaacggccaggaatggcgaaggcctcaggtgacttttgaagactcggtgtacggaacatgggggccactgtcgctactcacacattgtcaaaccgccctaggccgcctggtcccacttgtaagctacaatgtaggtaggtagagtcaca

SEQ ID NO: 98075 - DNA, 755 bp, Zea Mays
aaaagagatgtggctgcacacgtggctaagtgtgatgtgtgtcaaagagtcaaggccgaacatcaaagaccagctggactattgcacccgcttaagatacctgagtggaactgggaagaaattggcatggatttcattgttggactaccccgcactcctgcagggtatgactctatttgggtgattgtggacagactgacgaaagtggctcacttcatacccgtgaggactaattacactggagccaagctagcagaattgtatatgactcggatagtttgtctacacggggtgcctaagaagattgtgtcagaccgaggatcacagtttacttctcggttttggaagaagttgcacgagtgcttggacacctcaaactgatgggcagaccgagagaaccaaccaagtgcaggaggatatgttaagagcttgtgctcttaaacatggtggtagttgggataagagcttactgtatacggagttctcttataataatagctaccaggccagtttgaagatgtcaccgtttgaggctctatatggtagaaaatgcaggactccactatattgggatgaaacgggtgaacgacagttctttgggcctgaaattatacaagaggcagaagaacaagtacgaatgataagggagaatttgagaactgcacaatcaaggcagaagagctatgctgataccctgagaagattgctagaatttaaggagggtgatcacgtgtatttgaaggtgtcactgatcc

SEQ ID NO: 98076 - DNA, 329 bp, Zea Mays
ccgactgagccaatgtggtcaacgttcgagacccactcgtacgaacagaaccaacccacgcgtcgtggccccaccaaaaccctaataaaatatgtgccttgccgtcgccgccacccgctcctacgatcgccaacgccgagggccccaccgccccactcgccctaatcgccatccttgatcgtttgccctccaccgttctccgccctggttcgtctcccctctcattgttcgttccatttccctacattctctcgcataatccaacaattgtttacaatatgaatcagtgttttcactatcccggcaccccaactcctgcatagtaccgt

SEQ ID NO: 98077 - DNA, 490 bp, Zea Mays
tggggaagccgagagcaagcttgtccgctttgctggggaggaggtggttccacagccaagagaggacgaagttgttgtttttaagagctgggcagggcttcggttccctctacatgacatgataggagaagttttaaagaattttgagatataccttcatcagttaacacccaatacaattgttagacttagtgtttacatatgggctttccgaagccagggtatgagtgctaatggagaagctttctgccgagtgcatgagctgcactaccagacgaaggctagagcggatggtcttcataagaactttggctgctacaactttgcgtatcggaaagatacgaaggccccggtaattggttatcgcactaagtggccaaccggttggacaagcgaatggttttacataaaggtggacgagaagaaaagggagaaattgatgactatggtcatgagtccaatgaaattaagcttcgggatgacaaggcca

SEQ ID NO: 98078 - DNA, 372 bp, Zea Mays
tttgaaggtaatagccgagtgatgatgtggcacaccggtgcttttagaagtaaccgccgggtgatgacatggcacgccggtgttttagaagtaaccgccgcgtgatgactgggcgctttttggaaacggtatccgatccgggaagatcccatatgtactgcgctttcagccgcctctgctttctgtgccctagttcttgcttccctgcctccagatcctctttgtccttttgcaattcggctcccgctctgttcgccggtgaggttgagatggcgcccaagcgaaaggcctcgagttcatccgctgcggtgattccccctatcgaccccaacagccagttgcctttcgcaggtaatcatatgtccgttgttt

SEQ ID NO: 98079 - DNA, 500 bp, Zea Mays
ttaatcgattcaagtccaaaaatacgataatcaagttgagacaacaaggcataacgtctagataaagcatcagcaatcacattatcactcccctttttgtgtttaatgatgtagggaaatgtctcaagaaactccacccacgtagcatgtctacgattcagatttgtttggctacgaagatgcttattgattcctgaatgaataacaaattccttagaccataaataatgtttccacatatgtaaagaacgaatgagagcatacaattatttgtcatatgtagaataattaagaacaggtccatgcagtttctcactaatgtaagcaacaggtttacctccttgcaacaaaacaacaccaataccaactccacttgcatcacattcaagctcaaaagtcttaccaaaatcaggaaattggagtagcggtgtgtgagtaagcttctctttcaaaagtgcaaaggaatcctcttgtggctgcccccaatggaacgaaatgcc

SEQ ID NO: 98080 - DNA, 484 bp, Zea Mays
ctcaacatcgggcgaggcggagatttgcacccgagggtcgatctgcttcacccgtcgtattagatgtcccattgggggatggcaggtggcatgtacatactgtagagggggtgtaatcatgctattgcgcccggatatgactgttgtcttgttagccactgtgctcctactgccacggcgtgggctaggtatgcacattaaatgcgattgttccccacctgttcttgggcgagacggatggagcggtggtgaagtcggacgaggcggagttctgcctgaggtgggagactctcggagagaggcctcgggttaggaggtatctcaattgcttccccttgggggttatgccttcacttctcctgagtgtgttttttggagggataatctgggtacccctaattatcacctccgacagtagcccccgagccttccaaggaagtactttggtacttgtttagaggctatgctgcttgctcatgggcgc

SEQ ID NO: 98081 - DNA, 614 bp, Zea Mays
aaaatccctctcgtatgaaggagtgtaatcaatttcctttccttcatctggcactgcggccatgttttcttctgcagctacatttgtctcctctgcaaccacatctacaaccatatctaacacaagcctgtcaacttctgacattgtggctgctagttcctcagcttcggcttcgccagcatcttcggcatttgcaggaattgccgctttcgtcgccgaagctgaaggcggagtttgttgaattacttgcattatattcataattcatcatttcttttgtccttcaatcttctcttttgtggccgagggcgtttccttcctctgtaaaagttttgtcagttccaattccagaggacttagcagcttgaatggcgtagaatcaatcattaccttcaaaatttcaaccacttcggcagcagttagcgacggaggggatttctctagtgcttcatcgaccttcggttcagtagagggtgtttggtcaagcttccacttcttaattgttgcctttggctctggcgctgtttttgttttcttcaaggccttctcatcttcttttactgagcgggcagcttgcctacataggatactaacaaccctttttcttttcacac

SEQ ID NO: 98082 - DNA, 369 bp, Zea Mays
caggaacgccggccgggggcctcccacagccgggcaagaaggcttccttctaattcttgcttaccttgaaccgatacaatagtgtcccgcttatagagatgactgacttatctctttcctaacaaaccaactaaccaaatattatctaacccttatctcttccctaactaatctgatctaatccttatctctcgcctaccaaaccataaccacgcgaacagtaccgatgccctcattagagcctccctgacattaacactgtggtcctcttcttgttctctcacacttttacatgcactgggaatttgagaatgactgagactcagagagaatacttcattaacgtttataccgctttctttaaaatag

SEQ ID NO: 98083 - DNA, 340 bp, Zea Mays
ggaatttcattccagtctcaacatctgttgtcgctagagttttaactgcgaggggatgttagagtatgttttcctttgttgggcctagaccttgtatacaacccatcagaggtgctactatatgtatcccttatctggttaatggaactatcttcctccaataattactttatgagaagttatcagttaggctagctgtatactccctctgttccaaatgtaggttgtttgagttgattttaaacaaatatgatttcaaagcttgcacgccaatagatgttctgcatttagacagaaccacttgcagtctttgattacttttgcagtccggtatatattg

SEQ ID NO: 98084 - DNA, 596 bp, Zea Mays
ccttcgtttgatagtgcaactcatgcactcagtaaaatgcttcagcatttgggtccatcccttggcttcgaagggcccagatgaagatgctgagccaaacgatagcattaggggtcagctaatgaagatagattacataattaaccaaaacttctccaatcatctcgttcagtggaaaccgtaatcctgctctgaaaaaacttttgaaaactactacttcatcatctttcagcgtcggagtggtttcttccccgtcaacacgaataagcttgttttcagcttctccgaagtagcccagtttcatcatcatgggcacgtcggcttcagacacagaagatttcgcaaaatccaggtcgctgggttttgatgggatcaaaatgttataatcttcttcttcattatcagcattttcttcttcaatatcagcctgctcagctttggcaccagaattaccttcgtcaacggttccctctgtcacaactaagcccgattgtctcatgactttggaaatcggagctgtctcggtggcctcagtctcctctccttcgcgagtcaccctcgcagtcgagcgtactctggccatctgatgaatcttt

SEQ ID NO: 98085 - DNA, 758 bp, Zea Mays
gcgtacccgggatcagcttaatctcaaaagctgcatcgtgctccggaggaatgcctggaagctccgccggaaacacgtcggcaaagtcacacaccacccggatgtcctgcacccgcaaggcagcctcaccctccaccaccatggagaaaaagatccccgacttccttgaccggcgatcaagaagcaattgcgccaacaaggataatgtgaacttcggggaacttcccaagaataccacctccttacccgacggcgcctgcaataacactgtcttccagaagcaggatataaccgcgcgatactgggataactaatccatacccaagataacatcgaatgcccccaaggaaatcaccaccagattggccgaaaaaacctcatcagcaagaatgacagaacacccctgacaaactaaacagctactaatggagccattagcagatctaaccaaaattgggtgacccaacctctgcaccgaaagaccagcccgcgacgcaaaatcctccgaaacaaacgaatagctagcgccagagtcaaaaagagcatgggctgcaaacgaatcaactgaaatcgtacctgtcaccacgtctccttgctccctgccatccgtagcgggtagcacataagctccagaaatacccgcagaagaggaagcccccggagtgaaattaacagaagaaccccactgagccactggatgaggcaggcgcggagctccaaactgagacggcataggagtaaacggtgcaggagtaggc

SEQ ID NO: 98086 - DNA, 515 bp, Zea Mays
gcttgttttatatgtagtagcgttgttaattggtctctattgaacatatgaagatcaaaaaaaacttaggtccatatgttttggtggttccatatgaacctatttatttatttgcttgtgttccttaaagaagtaaagagtgataattcattttataagtatagtttcagaggttcaaaatccctctaatatttgtgagttataattcatcagtgtgttatttgtaaactctacatgataacaatgagaaatgcttaaattgtcatgccagttctgaaggatagcctcttccacagtgcttgttcacatggcataaagaaaacaacaattatctatgcgcatgttcataatcattatgtgtagcttgagatgttttatcattttttggagaaaacgacaaaaaaaatttatgcatacactcataacagttatgttcaccgtgagttgttgatgagctattgtacatggtttttaaattatcgacaaataaataatgaaaatatgtgtatttcaca

SEQ ID NO: 98087 - DNA, 743 bp, Zea Mays
gacttaaaaacatagaggaagcgatgactacttcggcatgtcaccacctcactacacaagccaaaattattattatttaaccacacgcctagataagcatgatttcaattcaacttgcccatattttaaatctcggcataagcttggctattggctaacgaagtgaccattttctaattaccaacatacaccaccttcaccatttgtggatacttgcacgacacacggctattgtaatacatcacaagtacatacagccccatcagtaaagcaccagcacatttccaaaaattccccgagactacgacgacaaggcatcgatccgccatacaacaaaaatcatgacgaagacgataggtgctatcaactaatcgtttaaaaatattagacttacttctcgctttgccactacaacaccctttagtcatatgaacatcggaagcatccttcacacggttatacgacagcaatctaacgttgtgttacaccagacatacatcttccttcgttgcgagtataaccatattacggcatatacccgcacacttcaaacaaatatcttacgccaccatcactatgatacaccacggcacacacgcacatatgtgtccccacgttacgcacaaggcctcaacagcatagtgactctaacaggattaatcatactcctcattcgcgtcgactatcccaatcatcgatcacatgcataaaacaatacacttttcacgtagacacccatcgat

SEQ ID NO: 98088 - DNA, 322 bp, Zea Mays
gctttcaccaagacagcaaggggatactgtggtttgaagacagattggtggttcctaaaaatagagacttcaagaagaaaatcttggatgaggcaaatttctccaaattctccatgcactcgggaagcaccaagatgtaccatgatctgaacccctgtattggtggaccaggatgaaaagggagatagcccaatatgtatcggaatgtgacacatgtcagaggataaaggcaagccacttaaaatcagctggtgccttgcaacccctatcgataccttcatggaaatgggatgacattagcatggatttcattgtggatctg

SEQ ID NO: 98089 - DNA, 475 bp, Zea Mays
ggacacctgctgttaatgctaaaggttgcttgcaaaaaggatggttcagaattagtggcattcctatggaacaaaggtctctggtgacaatcgctaaagttggtgggctcgtgggtaaggtgattgaaattgatgaaaggactagacttagaaatgaatatgtgagagctagaattgcttacagggatgtcacgactgttcctggtgttgtggaaggctcccttggattgtttttgtatgattttttctttgaaagggaaatacactcggaagaggatgaacaatttcttgatactgggattagagttgatgactctaaccagaaagctgcaaaaagatccaagtatgaaggtaaaatgaagaaagataagaaagtggattatgggaatctggaggatggaaatattaaacagcatgatgagtgtagcagaaaatctcaaagttatacttatcaaatgcaagggcttgacaagaa

SEQ ID NO: 98090 - DNA, 457 bp, Zea Mays
gtctggctccctccactaagacgcagaggaagatgcctgtacttcgtgtcatgcagctgctgccgataggtgtggctgacagaccacagagtccgcctagcagcatcgctgatcgaagcagcataggtggatagcggtgttagggactcatgagctgatagagtcctgaaccccctatcccctacatccatcaccctgacatgaatgcgagtgatgtagtagcaagctcgaggagggtggcacagtcgccttgtctcgtacaagggtcgagcgtaggttcccaacgcatgcagaaaatcctgcagcaggttggggaagtgcccagtctcgaacattgatgtataatgttcggtgataggccctaaccccatgaagtagtcctgctgaacaccgttggcttcttcgttgacgttctccttgtcatcttcttcatcctcgtcatcttcatcatcatccc

SEQ ID NO: 98091 - DNA, 967 bp, Zea Mays
aaacaaccctaaactttcatatgactactatatagcatgtgttacacacgatccgaggagatgatcgatgatggcggtggcacaagtgaggagagggggaactgaagggaagggatgagggatgattcaaataaagtagttcatggggaagggagttcagttatccaactatctggaccattgattttgatagtgtgttaagtttgagtacaatatgtttggtgaatttagtgggataatgagtatggggtgatttggttgtgtgacttttgcaaagtttgaactgatggattatatagtggtaagagcataactcttttctactatataaatatatgtaactttctatctttaacgtatacaactttatatctaactttctatctttaacgtacataccattctatatttaaagcatgtttttattattattattttctcggccggtcccccctcccctcatcacctatgcttccgcgaaacaacgctccgaattcaacagtgcctaaattaagtgacacaaccctaaactttcatatgtctactatatagcatgtgttacacacgatctcgaggagatgatcgatgatggcggtggcgcaagtgaggagagggggaagggaagggaagggatgagggatgattcaaataaagtagttcatggggaagggagttcagttatccaattatctggaccattgattttgatagtgtgttaagtttgagtacaatatgtttggtgaatttagtgggataatgagtatggggtgatttggttgtgtgacttttgcaaagtttaaactgatggattatatagtggtaagagcataactcttttctattatataaatatatgtaactttctatctttaacatatactactttatatctaactttcaatctttaacatacataccattctatatttaacacaagttttttattattattttcccggccggtccc

SEQ ID NO: 98092 - DNA, 609 bp, Zea Mays
gcgtgatggagatgagaccgaagccgctgaaactattccgatctccgaagcaatgaggcgttctgggctggtttcatcagaggacacacctgctgccgaagcaacacaagctgatgttgaagaagttggttccaaagatgagtacagctgcgggatgccaagtaaacctagtcacttggagtttggaaagtccaccatctttgaagctgatcttcccaaaatggtgaagctgggctacttcagtgaagcaaaaaaggagctgattcgttttggcgaagaggaaattactccgaagccggaaaagaatgaggttgtagtgttcaaaagcttctttaaagcaggattaagatttcctttgaatgagatgattgctgatgttttgaagaagtttggggtttaccttcatcagctgacccctaatgctatcgttagattaagtgtttatatttgggcccttcgtagccagggagtggaaccgttcggtgagggtttctgccgagttcatgaattacactaccagactaaagccagaggagatggtctgcatgagaattttggctgttacaactttgcttatcgcaagactacgaagtttccagtgataagcta

SEQ ID NO: 98093 - DNA, 814 bp, Zea Mays
cgaatagaccgaaccgaaattgtgagtctattcgggttcggttcctaaaattattttgaaaattttggttctcgtttttcagaaaccgaaattttacaaacccgaatagaccgaaccgaattaccctaatagaccgaatgcccagccctacacacaatcacgcaagaacacgcgaggatctagagtggtttgggccaccggagcataataccctacatccacttgtgaaagtgttgtattgcctaagcaagagtgcataacctgtgtcttggaactgagcctagtatcgagtatgccctcccttttatagtccaagggggacacgtacaaggctattgagccccgataggtgggcccaagaatataggataatcgtggagtaagagctttaatctcctctgtcctgtcttatcctctgctcggtcttggtgtgtgggcaaaggctacgacgtaggcgagcgggtggtgtcattttgtctccttcgcctgttcccttcgtctcggtaacacgtggggagcagtattagtcataatgaggcgtgcccatacggtgcattgggtcaatggtgttgcctcggtaacatgtggcccacagtgtagcccgtgtgttgtggactgggcgcgccgcctaccactagagtggacaaacgcatgtcttatctttatttaatgcaagacgctccacgcttgaggcttgcgtcaggctcccacctgttggctcacgtcacacaccatagtcacggtggcagcaccgggacttcgcttgagcggggggcaagggacgatagtgtatgtggacatgatagcaccgaac

SEQ ID NO: 98094 - DNA, 590 bp, Zea Mays
cgatccactaatctttggatggttttttctcccttgtcgataggcaacaccttgctgcagtgaaggtgctagaacagtcgtcgatgacttgacctagatatgcgtgtatccagcagatcctgcatgtgtgcgcgtgtatcttcggccagcagctcctacgtgcgtgctgtagaaatggatggcacatgtatccggcagcagctcctacctgcgtgtgaaatatgtggacggctggacttgaagtttccagggagcatgacaatataacctagacattgtatacatggatgtaggcctcgatgtacatgaatgttatttttgggctatttcattttgggctatttcatggatgtaggcccatatatgtacgtctagactatttcattttaggctgaatcaaaaccgaatacacttgatagatacatatgcaccaaaaatgaattagtcttgatagatacatattactagtgatgtgaagtggacgtgtccagcctccagcatggcagattagcagtggctcgttttctctccctcgtcccagcgtgcatagcagattagcagtggctcgttttctctcccccatggaccac

SEQ ID NO: 98095 - DNA, 479 bp, Zea Mays
ctgaacgaccaccaagcagccatagaagacagtgtatgtgtggtaggccccttttttggaattctacggtgtaaatcactgcataggacagactataggtgagagtgtgcaaagcaatactaaggaaccactcaatgtgtcaagctaaaatgaagctcaccagcgcggatgggaccaaaaattttattttctctaatgtcagctatgaattcatcgactttcatatggaagacccttacaacgatatcggaacgatcgcatggctgctgaccaggctcgaagcgaagggcatcgactatctccttccatttagggttgcatgtgaaggtgacgaagagatccggtgggccgtatactctgcagatggccatcgcgtcctggtagttcatcacatggtaccttcgaccgcccgtaaaagatgcaggtacaataactcttccaccaaccgagtccgcactggtgagacccttgccaatggc

SEQ ID NO: 98096 - DNA, 430 bp, Zea Mays
gggaaggggttcatggtaggggtgtgcgattgtatagaaaggagagggtatgtataaaaaggagagggcgcgagaggtggttgtcaatttcacggcggctcttgtcctggccgagtgagagagacagctgcgcggtgagttgcatgagacaaggttagacagagttagatgggtggtagacagggttagataaaattagacgaagacggtcagagctggcccgtgggcccaagatgacgaggtcgacgccgaagggaaagacgaggatagacgaggatcgccgacgcgagcagcatgtcgttcgcgggaagacgcggttcagtaatctcgcgaaaaggggcacgagatctggaatatgttcgacgagaggaagaaatatatatattatcgagttccaaaaattttatagttttcacaactaccatatttt

SEQ ID NO: 98097 - DNA, 443 bp, Zea Mays
aatcggtgctttcaccggacatgtctggtgcctagggtttcatgaacaacttgtattgttcacatatccaatgcggtgtctagtgattgcccacgcatgtcagatgcttagataaattgtgttttgtcctatattgtgtggttttggtttgtcatgctttctattcaatctcccacttgctcaaccatatgccaccatttctctctgatgtgctcaccctcactccatcattcctatatctcatctctggccaccatgcactagtccccaagtttgtgcgctcgctttttgctgcttgtccacacccttttgtagcacctctatgccactgccagtgcctaagctcatagtgcctactcactattacatccacacttatgctctaccattcatcattggccacttgaccacccgtttatgcatctatgccacaccgtgcacca

SEQ ID NO: 98098 - DNA, 407 bp, Zea Mays
gctacgggcgtatgggttttgttcaccaggtaaagatctcctcgcggatatgtatgagctaccgtagactcgtcacttcctgtcctttttcaccggcgacgtggcctcctggccgtcaccggtgttgccgtgtgttactgtggctgcgccacgctccaagctctccaccacgtcatatctagccgcaccagctcaccggtaaccgtcatagcttcttaaccggtgatcaccggaggaagcgccacggtgaaagccacctgtttcacacaccgagcgctttgtttcctctggccgccagcgctgctcgatcggattgatcaccacctctcaagtattctataaattgaggcctcagcttgttccgctaggtaatcgtgcgtccagtgaaaccactcgtagctccgatc

SEQ ID NO: 98099 - DNA, 596 bp, Zea Mays
cgaattttgagcctattgatgtcagctagctgtggctgctgtgctatagatacaatgcaattgtaacaccacattaggattggtaggttctaaacttcacagtataattggggttaccgaataacacttgtaaaaactgaaaaaatgatgcttttgatttgtttttgtgcttcgaatgcattaatcatcaaaggctgtttatttataggaacagttttcatttgtatatatgtgtttaatctaccgtgactgcagtttagaggctgtttctagacaggggcgaagccacatagggcccaagccgagtgcacgtgcaccagggaaaaacagtttctagtgattaaaaaactaaattctaccacttgtgcacaccctaatttttatttagagaagatttttaatacatgtgtatattgaaatgtcaagtgtgcactaggattctccggcctctagcttcgcccctgtttctagatgtgggctcttgatgctggaaatgtagattttgttgtactgggagatggtttcttggatggacatcatggttgatatggagcaactatgggagttgttcaggaatttgtgtcttccctactaat

SEQ ID NO: 98100 - DNA, 548 bp, Zea Mays
ctttttgtaataaggtacaaaggattttcaagtgttcctacagatgactataaaagcagatcctaaggtcttctttgacatttcagaattagcttcgacttatcgaccttcggtgccatcattctgcagagtagcaaagtacaaggtaattagaaatttgacgagagaagatcaaggtaaaaaacaaaggtaaaattccataccttgttaagcagctttcgggctttgtctccagccaattcacacccatccttagcccaaatttgagtaataaatctattccctatgcttcaaacttcagttcgaatgtcaaccagatccgatgatgaaagattgaaattcggcctgttgacaactcttgtgtgattacatccggcttttatgaaggcgacagttgtaccacgagaagctatcagcgcacagaagtctccatggccggttatgacttcgtcaaggaaatcaacctccttttcaatacattcgagtgccccaagtatatcttcggcagagaggctggtttcttcagatgcagctccaactgaattgaa

SEQ ID NO: 98101 - DNA, 281 bp, Zea Mays
ccaaccctcataatagacatatcatgaaagtatcttcccttcatggcgtcaatgtgactttgtttaatagtcgactttccgaagatggtatggcttggctgccagggccggtcttcagaatcttcatccccactttccacatcataatcatcgctatcatcagaatcttcagacaaatccgccattatttcctttgtgatcttctctgtatttgtttttgccatagattcgtaaaacccagcaagaaaagggtccacaactttcttctcctcagacatctt

SEQ ID NO: 98102 - DNA, 441 bp, Zea Mays
gtcaagtatctgtactattttgttttaggaaatttggaggggtaacaaggaggtaaaatgttgtggagaaacaaaactacacctgaaatggagggcatggtgttgatctaccaagctatgcacgaaaagatgtagaagggaaagcgtccaagaaaaagaaacagaacggtaaatcaaactgcaacattgttctgtgtgcgaaacaaccagccatgtttttttccaatccaaactagcaatttttgattagatgtgcttcaaagaagcctcatgctcaatataggattcatgtaacatgcaggacccatgggacacagggagaggcggagagcagtggcagatccagaagcaaatcaaaagatcctaaataatagaaaactagatatcataccgatggtacattaataatacatataaaaaatgcaaatgcagaaatcaatt

SEQ ID NO: 98103 - DNA, 518 bp, Zea Mays
aacaaaaaacaccgaagatttttacctccatgccaccaagccgtcggatataattatataacttaattccgacgactcactggtagctatcggaagttatgtaactatatctgaccccctacccgaggtcgtcagaaataagttcgtgcggtccagatgacacagtcatggctgtctgacgggtttccctattttcgaccaattagaaccgacagacacttttgtcgttggaaataaaccctaagatattgaaaaataagtaatttccaactattcagggtttatttatggtggctttggccatcgaaaattgtacctctactgacatgtatgagtactttgtaaaaagatacttatcagacttaaaattgtttgaatttttgtggaccaaagtgtgcacttgttttgaaaagggtagagtaataatactactagattggtaatcaaatatatatttaaattttacagtacatccgtacgccggttagaacgaaggtctagtttagaagccacaaaac

SEQ ID NO: 98104 - DNA, 310 bp, Zea Mays
actactgtcataattttaaagatatgaaattgtcaagcagcgccgctgcagttttggtgggtgatggggagagaggtcgctcgcgacgggtttggaattgtgcgtaggtgcggcgttgtttatgagcgttggttatgtggatttgtgcactaagttgtgtgtcaaaaataagtggtgtactttcggatcgtacttagggccttgtccaaattccccggtgaaggcacgtaaaatagtgatggtttataccgtgggttgaattatgtgtcttatgcttgattatatccatgtcaaatatgttcatcctcgt

SEQ ID NO: 98105 - DNA, 505 bp, Zea Mays
ttgacaccgaatgccattgttaggctcaatgtctacatatgggctctctgtagccaaggtaaaagtgcgaataccgaaggattctaccgggtgcatgagctgcactatcagacgaaggctagagccgatggtctacacaaaaatttttggtgttataactttgcataccggaaggacaccaagcccccgatgatcacctaccgcattaaatggccgactaggtggactagcgaatggttctatgtgaaggctaatgagtagaagagagaaaatctcatgactatggtaatgagtcctctgagattaagcttcggcatgacgaggccactgtgcaacatgcaactcggctcccgatgccagctggctgaagtggaatttagggtggtagctggtcatattagcactagggactgagtgcaagaatatgttgcaaacaaaacttttccaacctctagaggttgggggatgccgaagaaggaagcagggaaaaatatgaacttgttcg

SEQ ID NO: 98106 - DNA, 425 bp, Zea Mays
ataaaaatggtttggtagtgatatcctcgcctacatgtgtgcttggatggtttggtttcaagcttacacacatgcaaagatatgaaaattgaggggacattatcactaccacatgatgctaaagtatacaaaatagaaatgtacctttgtagcgtgtttactacttttcatttcatccttagcatcatcttgctagaaacaagtgaaactagataccacatgagatcataataaataggattctagttactcctttcacactaagactagtcttataaacatcactaaatcaatcatcatccaagtcttagttctagcaaacacttacacacaagtatgtaggaatataagacaaatgtgatgcaagcaagaaatgtagtgcacaaacaaatgcatcaaacatatattcacgagcttgctccccc

SEQ ID NO: 98107 - DNA, 642 bp, Zea Mays
aggggtcagctgatgaagatatacttcataattatccaaaacttccccaatcatctcgttcaagggaaaccgcaatcccgctctaaaaaagctcttgaaaaccaccacttcatcttttttgggctctggagtgatttcttctccggcaaagcgaataagcttcttctcagtctccccgaagtaacccagcttcaccatcatgggtacatcagccttagacacagtatattttccaaagtccaagtggctgggttttgctaggatgagagtgttatagtcttcctcttcttcatcaacatcttcttctttgatgtcagcctgtttagcttcggcagtaggtgcacctttgtcagtagctccatccgtcacaaccaatctcgattgtctcatcacttcggagatcggggcagtatctgtggcttcgacctcctccccgtcacgggtcaccctcgcagttgaacgtactctggccatctgatgctgaatttcttgtagttcttacaaagttgatgatttttacagttttgacgaagcttcctcttatgccgaagctaaatcaaaatgatgctttgctcgagaatgcgatgaaaaagcttcggctatggttaaatttttcagcagcacaacagtgcaatggcaatg

SEQ ID NO: 98108 - DNA, 664 bp, Zea Mays
aaaaactatgcaagttagaatatcacatttgttattttagaatatttcaccttaatcgtttttccattagctagccttctaacaacaaaccttcaagggcattcaatactagacttgcataaccctctaaatctttcctttgatgacttatctatgcctagatcaaactcctcattatagaaaattgactcacggccaacctaaattcatccattgatgggtacattgtgccaatatccattttggtgatccttatcatatgtagtcactatctcatttggtattgaatcactaatagtaatggcaacatcatcaatactatcatcttgctgctcacgcattgtacgaccatttgtttgagctcactttctcctttcatcctcatccctcaagcccaagattacaaatagctaatcctcacccaatggttgaattcttccttcctcatcatgcatctctattatttttaagttatcctaatcgacttgtgggataggtgaagaagtctcgaccaacaacaatggagcattggtattgctccccatggccacctctgaatcatccttgttcgaaacaattagtaaatgagggacctataattgattgattcataagtgttaataattggttgttccaatcacaactaatacaagtcttgactaaa

SEQ ID NO: 98109 - DNA, 1608 bp, Zea Mays
cctcaccggtgaagaagaacaaggcgacatcgtctccctctatgcggtggagaaggtgaatgcgacgacgttcgggcgacggggggagaatctctagggttcggcaaccgcagtggagaagaagcagatggcggcgataaagctagggttcggccgccgcgagcgttacgggtgaggagagctggaaaaactgcgtgcttggttgctggattcgtgggcccgatacacgtaatctgctgggcgaaatcaacgcgaaggcccatggaccgacacgtggattactgtttcgtaaacggaaacataagacatcgtaagatcgtctaaggaaagggtttgacgatgatctaagcattagatccttcttcctgatactgtgcaataggttgttgttccctactgccagctggggaataactaaccatgaggttcttttaactgaggaaatgtatcgtttccacgagatagactggtaccaactaatattcaatgatttatgccaaactgccaagaagtgacatactaggagcgttacaaatgtttctacaacaatttacggatgttccatcatcattcttgtaagcatatcacttttttgtcttttatatgtagccatattttttatgcaaaattcatatacatttagattatgttttgttatgtctcacaacgattcatgttatgcttttgcaactgtattatttgaatcatcttcatgattcagctgcacctcagaataaacgtggaacaccacgcatcaaatattttgataagaatattattcaagcattgacaagagctgacaagggcaagatacgcaaagaataagaacaatttggacattgttcagtattttttatgcgtttatcatattttttatcaatttaatttgccttatatatggtacatagatagaagcactgtcgtttatatttacaaatgaaactccactttatatgatgtgcagtgtcgtttaaattttatgctgtcaacaacctcgtgttatgcttattttctctcaagtttatgatataattatcaccgctatacagtcataagcttcactgtgtgaccagtttatgcagtaaacaacatcgtgttatgcattgttgcccatacatttatgatacaattatcaccgttttatgcccatacattatgcttttttgtctcaagtttatgatacaattatcaccgttctatactggaaatatctctttgtacagtcatgcttcacagtctcaccagtttatgcaataaacaacgccatgttatgcatagttgcacatacatgtatgctacattcgacaacgttctatgctttataagtttcacaatctaaacagtttatggccagtgttatgtattttcgaacttacatttatgctacatacgacaaagttatatgctataaaacaagtcgatgtacattcagattgctacataactgttatgatgtattttcgatagaagcagtgtcgtttatatttacaaatgaaactccactttatatgtgtgtataagttttactccatctttcacatattttttagttccgaagcaccacagagacctgctacacagctgtaccacctgttgaagcacaattta

SEQ ID NO: 98110 - DNA, 1569 bp, Zea Mays
gtttggttaggagtctacgtatttggttcatatcaggccagacattacgcctgtggtgagttttgtgagtagtttcatggagaccacaacaagagcacttagccaccatcaagcacatcctgcgctacattgtcggcacaatcaactatggccttgtctaccccaagtgttgcaacatcggcagcaggttgacgagctacacgctaatcgagtacactgaccgtgacttgggagagataccgatgagatgaatcggcagcatcatcttctttgtaggagacatgtcttcaaggttattaaagcgataaaacgttgaggcgctcatgggaactttttaaatttaaaacgtttaagcgagctttaaaacgtctttttaaacatggacaagatatgaatataacataatttcacgtaacaatataacatgtccacaaccacactaccacaaatccataataacacaagttcaagtgttcaactaatagcaactagcaagtcaaaaaccacaaacaaagtggaatgaaatgtgcagtagtccacaatcacaaacatagcacaaaagtaactgaagtggaaagcaatgtccacaaccacagatgcattagcatcattactggttgccattttcagtctgcaaataaccaaaatcagaggagaatgtgagcagggaagggaaggaggatgacagcggggacaagggcagctaacagaggaagagcagggaggcgactaagcgaggaccgacgagctgaccgagcgagagcagggagtgcaagcagggagcgcagcacagggtggcagcggcctcgttgagcatgagcagagaccaagtgcggacgcagcgcagggaggcagcggcgagctgggagcacgagcagggagcgccatggttttcaaatcgtctgatttatcacgattaatcatcctggtcgaccacatgcagtagataaggacctccgacccgattaggtgggctggtcagacgacctgtcgtcctagttatcgtcgtgtaatcgtgcttaatcgtccgtttgttaaatgttgcgaccttaaactagaatttggaaaggtagtgtctgggtcccgtttttgggcgcctcttttccattttgacgacatattcattgtggttaattattgattgacgcctcttttccaaatcccaatttgctttcctgttttcatctctgtctcttctccttcctggccggccggctgctgctccctgctcctctctcattctctcattcctggccggctggctgctgctccctgctcctctctaattccctccagctgctccacctctctgaagaactcctgatcaagaaccatcaggtgtcagctcctccagtccttcttgatcaactcaggaagatgagtacctcatttgaaggtaccgtgatcatactgatcaagcaagtttagaattattagatcaagaattggtttcagtttggtactttggtttcagtttagagtacctcatctgaagctactgctatttgagaattgagactgagtctgataattcacactttgattacctactgtgtagttgtagttcta

SEQ ID NO: 98111 - DNA, 1103 bp, Zea Mays
gaagaggaggtagagggcacatgcggaggttgcgaggcggcgagcgtgaaggcgagagcgcaagcggagattacggcggtgggtgcgaggcatcatcaagcaatctgactttgcagtgccaactaatgagaatgttgtatgtcacaatgtcaggatgcacattttcgttgggtagcttctctagaagatttaaagcagcatgtgtccatcccactttgcataacccatttatgagtgtattgtaagtcacaatgtcaggtgtcagtccttgattcagcatctcctttgagagctctagtgcatcacatacatttcccgccttgcagagttcattgatcagcatgttatacgagaaattatttggcttaattccctttgtcaccatttcctcaagcaacgccatactccaatcaacattcccctctttgcagagggctttaatcaggccattgtagctaataacatctagctggcaaccatgaagtagctaataatatgttctgcctcctccatctagtcattgttgcacagatgataaatcattgtattgtacgtgcaaatatccggcttgcacccctgactcttcatctcttggacaagccttgtcgcttgatcaagcttgccatccttgcataaggcatatatgataccattgtatccttgggagttcatactaaagcccttggctaacatctgatccagcatagctcttgcgtcatcccacatgccattcctacaaaatgaatgcaacaaggtagagtaggtcatgatatttggtgcacaactgttctcctccatcttatcaagcatccgcactcctgaaccaaatctcccaagcttgcaaaggccatgcatcaaaatactgtatgtgtgcacatcagacgggcatccttttgaacccatcatctcatacaactttgtcaccctggccagcttcccctccatcagacatccacagatcaccgtgttaagcatcaccacattcacctctggcaacctcccgagcaacgtgcacgcctcatcggcctgccttgttcggcacagcccctgcaggaggaacccatatgtcatcgcacttggcatgcatccttgcgtcatcatcc

SEQ ID NO: 98112 - DNA, 415 bp, Zea Mays
ccaaacaccaaaactcacaagagagctttcagtcacaagaccaaagttaagtcttttaatgtcaagcaccccatcataaaaatccttgaataaattccacaagtcaatgtgaatgaggtcccaaaaatcttgaaaaaattcagcaggaaaaccatcagggccaggagcactgttgtgttttaaactgaacacaaccttcttaatttcctcaatagaaaacggaacagtgagcaaagcacgatcttcatcacttagtctattcatatgtaaattcgacatattgatgctggacagaacagaatgaccgaataaatctttatagaaagcagtaggcactttattaatatcattatcctcaacaacagtattttcctcatgaactaaggagagaattttaacttttcttcttttacct

SEQ ID NO: 98113 - DNA, 281 bp, Zea Mays
tggttaggacaacgactagcagggatccatggcaatgatgctaccacaatgttcgatttagtagtattcacatgacaaggcacacatgcaatgcccttgcttgctatatctatagtgccagctccatgtccatcccctccttcaactcttcgtccttgttgctgtcagagcaataggatggtggcccaatgttgataggtccccaaggtagggtgtttgccctcttctgcatggcatgaggttcgcagcatggtggctgagggtgttttgtcgtacttttg

SEQ ID NO: 98114 - DNA, 412 bp, Zea Mays
ccacaatccacgcgagaacaagctctagcgtctggtgtcaacgtgtgtgcggccatcagggctacaacaacgcagcaagccttcgtaacaagcgcaatagacacaattatggctcggtaatcagggtacacgataagtccacgcaacgtgcacaacagacgcaattgtggctcgatgatcacgacacacagacagtgcctacagggcatgcaaaaaatgcgcgactcgacgatgacagtccgactctacgggagcggtctgattaagcgagagtgcgacataccaatcacatgacgcagccaagttcgtatgacacaaatactgcattgtgttgcgagggcgcagccaatgccataactcagtcgattaacaacgcggcctgattgacacgtgtgagtacccaatatatcat

SEQ ID NO: 98115 - DNA, 280 bp, Zea Mays
atctctacccagtcagagctgaacatgaggcagagaagatggcttgagctgattaaagattatgatttagaaatccattatcacctaggaaaagcgaatgtggtggtagatgcactgagtcgcaaagcttcctgtcattgtcttatagtaaggacctctaacaccacaatatgtcaagaaatggaaaagttgcacctggaaatgatacaacatggaactttgacacaattaaagcttgagtcagttcttctacagagaattattgatgcccaaagaaccg

SEQ ID NO: 98116 - DNA, 662 bp, Zea Mays
tttttcttataaggggacactacttttggtatagaaactttagatggtcgtggagatggctgtggagaaggtggatccctgaagggcgatgtatgtggcggagacggtgggccaccatgaggatgaggagaaggagggtcagaaagaggatgaggagcagcatgtgaagtttgaggaggtgatgatggatgtgcaataggaacagaaatttgagaaggcggagacggttgggcctgcgacgaattcgaccaatcaagcaattcgacatcccttcgaggccaaaggataaaattcttgatagcttgtccaagtgtctcgataccttcgggcccagggatgtctagcatgccgtcctcgtatccttggatgactgtcgtcacttctaccctgcaatattcttctggaatgtcgtttccatggaacttgcgtcctgggatcgcaaggcctgtggctactttccttgtacgctgattgttaataccatatcttataactagtgtgcatgccacaggccttgtgatgtcatcaactggatagcggaccttatttcccgttgacgcgacagagcttgggatggtcgtaccctcggtggcagccggcgtttgagctgctggaattatttgcatctgtggagtggtcatttgttgaacagacatcgcact

SEQ ID NO: 98117 - DNA, 930 bp, Zea Mays
aatttcattcgtcgtgatcttgagggtgtgatcaaattgattgagagcgaagttgaagcatttgacgaagttctaactggtaggggagatttttgtgcatgcatagggtctcggtgggctgtatcactgcttgaaaaagctggatgtgaacatgctaagactcattctcggctaagcaaaatttcattcgtcgtgatcttgagggtgtgatcaaattgattgagagcgaagttgaagcatttgacgaagttctaactggtaggggagatttttgtgcatgcgtagggtctcggtgggctgtatcactgcttgaaaaagctggatgtgaacatgctaagactgtaatttagccagacttctcagtttcagcgaatgacattaaagagccttcagccgaagctacaacctttggtggaaaattttattctgaagtatggatgaatagaggccgagagatagcaaacgaagctatcaggcaatgtgaagaagagtctcgtcttgccttaaaagaagcatgaaaagctgaagaggctgctgagcgttgaagacgtataggtacgcttgtcatattttagcttcgtatctgacaaaaacttatattttggtgcagctgaactctctcctcctctagagccatacaactctgacaccgatctagccctgaaggttactctcgatgaaatcagaatagcgaatacaacaattgatgaagctgtagaaagacttctaaacgaagctgctgagagagtcctgaaggaggacgattgaacaatgtgtaaaaaaacattcacagaatttgtatgctgcttttatgtaaaaaaacaactgcaaactatgtgattcattatgtaatatatttctttgtgtagcgtgaaagtgtcatacgtaccgttgagccgaaggagaaaaaacaccttcccttcttttcac

SEQ ID NO: 98118 - DNA, 362 bp, Zea Mays
gttgactcaaggtgttgcactcttctgtccgatctgagagaatactcgggtgtgatacttcttggacgaagatcctggatgggacctgggcctgactggatcccagcttcaacaacgcgtccgctaccgcgttgcgatctctttccacgtgatggaattccaagccttcaaatttgtcctctaattttcggacggctgcacagtacttgcccatagaatcagtcgagcaatcccagtccttatttatctggcttatgaccactagtgaatctccatataccatcagcttcttaatgctcaatgacacagcaatgttcaacccatggatcagtgcttcatattctaccgcattatttgatgct

SEQ ID NO: 98119 - DNA, 351 bp, Zea Mays
acaatgtaccagcaattgatgactcctgtcatacacgatatctgattccagtaaaatcaagttaggccattactcaaaactttcttgctaccattcatgacctgaatagaagtaatatcacagaattaccaaccatataactactcggctcatggtctagctgcctagggaactttgtatgtacacagtcgctgtcacatgagactttgcatcggttattatggttcaggttaacatgatttaggttaataacagtaggaggaatggcaatccagccgtaggcacaaccgggaaataaaagtgaagcaaaaggaaaacggggggttttttactgtggcggacgtgcgctcg

SEQ ID NO: 98120 - DNA, 489 bp, Zea Mays
gggagattttatgccaatttcgcttctaaataatagtatgaaaatcatcactaagttgttggccaatcgattacagacagtgatgacctccctggttcataaaaatcaatatggcttcatcaaaggaagaaccattcaggactgcctggcctgggcttatgaatatattcatttatgtcatgtttccaaaaaagaaatcattgtgctcaagttggattttgaaaaggccttcgatactgttgaacataatctgatcctgcaggtgctgtccttcagaggatttgggcccaaatggcagggctggattagggatatcctccaatctggcacgtcttcggtcctccttaatggtgttccaggcaaaactttccattgcaagcgtggggtaagacaaggagaccccctttcgcctcttttattcgttctagcggcagatctgcttcaaagtataatcaacaaagcgagacagcaaggccttctccagctgcc

SEQ ID NO: 98121 - DNA, 1162 bp, Zea Mays
attttgtatctctattgcagccaaggtgcctcaggaagctttggttcaaactctcataggtaaaataattcaatttgaacagtaacatgatatttttgactattcagtactctttttctcagatacacttctgatatgtaggtatggacatggctcaaatcaacctgaccaacttgccattgagtatcccttgttgtccttagctgaatccacaccaccacctacaacctccaaaccaacagcaaagaaggtgaaaacaaaagagaaggcacaagagaaggagaaggcgaaggcaaaaggaaataaaaagagacaaattccactactacctgatagtccagcaatgtctactagaagcaagacacctcaaaggcaaagccctgcctcatacaccagggcaaaaagaaaactcccggacttgaatctgtagtggatgcattttgttaagtctgcacttttgtgttgtattgttttgtgtggcctacaactgaatgcacttttgtgtggcctacaactagatgcacttttgtgtgttttgctaagtctgcacttagacaggctgcagttatgtgttggtgttatggacacgagtctctatggacaatatgggttgctgttagagatctcttgttgttatgtgttgtatgaactgcactagtttggtatgtgaatctaaaccagttctgttctcagatttgtctatttgaactcagtggcatataggggatgaaactgtattatctgtataactgtgttagatgtcagctaacggtgatggcacatagataataaaaaatctaaactgatggtagttagcggatggctattttcctgatggcacacaggtaacggctatagatttgagtggcttggaagtaattttctccacatttatacccctgagataccaaaaaccccatttgaaccctggaaaccctaaatccaaaccctaggggcctatgtgcaaaaacagtgcacatttggactaaagtgtcaaaagtactatgtttaagcatataaagtcacatggttcacatttgggaagatttacaagccaaaccctaagttttgggtttatttgcaaaaaccacctcttaagtcctaaataacctaagtctgaatttcagatttgtgagctcaactttggagctttgtatctttt

SEQ ID NO: 98122 - DNA, 288 bp, Zea Mays
taggcatgagtcttaggacaaaagaattagttgaatttttgctctcaagtttttggtgtcttttgctcaatttgattcacatgaaataatggttcttgagttagcactgagaagaactctgggaattactggggtgttacacaccgcgttagtagtcgagcgggtggaggaaggacaagcatacccggtgcagcatccagtttacttcatcagcgaagtcctcgggccctcaaagataaggtatcctcaggtccagaagttgctgtacgtggtacttctaaccgctcg

SEQ ID NO: 98123 - DNA, 361 bp, Zea Mays
ctccgtccaggttttctcctcgaagcttaggggatttttaccgtttccctagcttcgagccctgagctgccgcgtcgtgtttatacccttttagggttttctgggttgcgtgttcggctgattttagggcttcgtgttttgcttagaacagctcctcagggtgagaactattgtggataattttgtttttgacttgagagcttgtcttgcactttcggtaggtcgcagttgtctatgaggtatcacggagttgaatttctcgaaacgaaggggaaatgggtgaaggaaacttactgcactagttagtgtggaaaccgtaccacaagtgattgatggtgttgttggctaacgactgattaat

SEQ ID NO: 98124 - DNA, 2126 bp, Zea Mays
gtagacgcaatttctcattggaggaattcccgccgccgtgtggatacaccctgtcacgacccggcgacgaacaccggctcggacgagaaggaagaggagaatagaaggaatcagaagataagagttcgaggaagagcaggtatgtattctattattccataattccttctggaatacacaggctggctttatatatcagctgccgaccaacacagtacaggcccaaaagaattcaacaacctggcccactggcccagacttcactgcacaccacaacaacaattatcgctccgtctctacagggcctccggtgatacctgtcaacctccggcgatctgggttgtgacaataccaccctctgaagtaccatctggcccctagatggttgtgctgggaaaacgagcacgaactacagtataatcttcccatgaagacatctctgttggcaccccttgccacttgatcaacacttgggtgacagcagcggccccttttctgaccaacctgcggtctaaaatgctttctggtactggtgatacttcttcagaggatgatggaggtggaatgtcagcaaataccggcacattatttggaacatggggtttaagctgcgagacatggaacactgggtgaatcactgccgacggaggaagttgcagtcggtaagcagctgtgccaatcttctccagaatctgaaaagggccaaaatacttgaaagagagcttagcacaaggcctgtgatggacagacgactgtgcaaacggttggagttttagaaatgccatgtcacccacttggaattgtcttggtgttctattggtgtcagcataatgtttcatcctgttctgagctgaggctaggttagccttgatcacttctaaaaaatcatggcgttgttgcaatgtcagttgaacctcagaaacagtggccattttagaatcaggtagcactccccagttaggctcaaccccatacaaagctttgaatggagagcattttagtgacgaattgtaacatgaattgtaccacaattcagcagagtctagccacttagaccactaagaaggtgtctgatgcactgcacaccttaaaaacatttccaagcattggttaattctctcagtttgtccatctgattgtggatgataagctgagctcaagtgaagcttagttccagcaagtctaaacaactcttgccacaaagtgctagtgaaaattttgtccctgtctgaaacaattgacctaggcagcccatgcagttttacaatatgggtgaaaaacaattgggcaatctgtgatgctgtgaaaggatgcttgacagggatgaagtgggcatatttagtgagcctgtctaccaccaccaaaatggcagtatacccacctgatttcggtaatccctccacaaaatccatagatagatcttgccacgagtgttgaggaatgggcagaggctgtaatagccctgggtacttacaatgttcatgttttgcctattggcaaatttgacattgtttgacaaacagctccacatcagtctttgtcctggccagtagaacaatttcttaagcctttgataagttgcaaacacagcagagtgacctcccatcgctgaagaatggaaagctgctatgagcttagtgtgaaggcctacattttgtccaacaacaagctgttgttgtctatatatcagtccattgttcaaagagaagccctgagcattaggactttggacagcaagttccttcagcaaatcttgtgcatgaggatccatctcataagacttcagaacttcttgaatccaaactggtgtggacacagatatagcagtcaactgaatttctgatgccactctagataaagcatcaacagccttattgtccacccctcttttatattggactgaaaactgtaatccagccaacttagacattgctttcttctgtaaatcagtggccagggactgatcctacagatggctaagacttttgtggtcagttttaataacaaataccccttttgtaagtaacatctccatttatccacagccatcaaaatagccaagaactccttttcgtaggttgacagcttactattctttacccccaaggccttgctgtaaaaagcaa

SEQ ID NO: 98125 - DNA, 297 bp, Zea Mays
gtgagttttgtccaaagcttggatgctcagtggaagtttctatttctcgatcgtgtctatctccttttatcaagttagtcatgaaagtttcaccaaatttggaattattcgatctcaagaacagccaaatttggagcctgttaaaacttttgtttcttgaacgagtgcaaatatggaagtcaatctcgtttcgcaaatctcgccaaaaattcctcttattcgaagtctcgacagtggctatctgatctgtgcctgaatccgcttcctcaatttttggtctacctccaaaaattttat

SEQ ID NO: 98126 - DNA, 432 bp, Zea Mays
cgaactagaacacaatctaatttgttgttacagccttacatttcagtaagtgcagctgctgcgcaactgctgctgcccaatatccatcaaagcgagttactccatccaagcacaaaaacttgttgtttaggacaaggtctgttcgaacttaaaaactataaacatcaataattgttagattatttagtttgacagtgtgtaggttatatgtgtaaatttgtactcaaaagtcaaagcatttgcaaggtctctgttagactatgtcttttctgtctaaatgttatgggcctagagcccagcccatgtaaactgatatatatgttatattcagctcactcaagggttagggtatttactccttccaacatggtatcaagttaggcttctctccctcgtcccctagccgccgcctgcccctgctggccgtcgtcg

SEQ ID NO: 98127 - DNA, 433 bp, Zea Mays
cgtggatgcatcagaatgaatctaagtctttatgaaacgtaacaagcgtgaagtcgttggatcaacagtgaacgacccgaatttaatgagtcaaagatccactctgcgccactggatcacgatctaacgttccaggacagtttccccaatcggtacgccagctcctaatctcagccgttgaaccagatatcagcggcatatgcttctcccccaagctacagtcgaccggtacctagtcgtctactaccttccgtcagcgcactgagtggcgcacatgtcaccgcaacggagtaagccccgtcggcgttggctacgacgtcctatgcgccacatggttctaacgaacacgaccgaggaccgaacgccatgacgccgctagccaacccgtatggatctgcccgctcaaacccccctgcgcccgaacaaggtgaca

SEQ ID NO: 98128 - DNA, 736 bp, Zea Mays
accatagtcgaatagtacgaccgccttgcatgttgacctatgaaaattctctaaaagaggttaggttcttcgggatgtctttccaccaaaaggatccagtcctattttcagagggggtctttcctgctctatattgattattccatacaagatttacccaagatatgtccaaccgattaaaaaagttgtgtaaattattcatcagtaaacttttgttgtgtatggatgggttgaggatgccaagcccccttgaacttttgggcgacatgccaaaaaaccatgaggcctgtggaaactttcttgtgttgatgtatgccccctccataagcaatgttttatgtatttgtcaatttgcttgatgaaataatttaagattctaagtgtacacatgaagtatgttggcaatgaagggaagaccgcattgaccatctgcagtattcctgcttgtgatagaaataaagatgtgactgacaatctcttttcaattttatggacgaggggtagaaaattctccagagatggtctaatatgtcccatgggcaaccctagatatgtgaaaggaagaaccccaacttgacatgaaaggtattggcaagaatctgcatttttcagtcgatacattgatagggtaactatttaacttgctgtaattaacacacaacccagtggattctacatatttgctcaggattgctttcaaaaagaagagttgtttctggcacgcctcgaaaaccac

SEQ ID NO: 98129 - DNA, 421 bp, Zea Mays
gtcccttgtcaaggctgagcagtgaggcagtggagcgcctagcctagtccacgtcacaatgtgtccattacactaaattgtcatggctcgagcatcaaaattccatagtatgagaccaagagagtggagccactaaactcctagcactatgtcaaagccggcaattggtaaaacatagcagatgtggtagaataccttggtgtacacatggaaacgaagcttggggcaggcaccgggactggcaaccccgtcgccatttgccaccttcactgagaggcctgagtgtggtgtgatttggaggctgagatctcatgtgatgtcctcctggagaaaggaatgcatggactcggaatccacaagtgccaccagagatgcagagctgatgcacaccttcagccacatcgtgacaccaacatcaatt

SEQ ID NO: 98130 - DNA, 461 bp, Zea Mays
gtaatgaatgccgtcttcggaatgtctgaaggtcgaatcctgagctgatgataacctgacctcagatctatctttgaaaacacgctggctcctctcaactggtcgaacagatcttctattctgggcaatgggtacttgttcttgattgtgacctcaatcagagttcgataatcgatacacatccttctggtgccatctttcttctccacgaacaggacaggggcggcccaaggcaaggtgcttggccggatgtaacctttctctgacagttcatcaatctgcttcttaagttcaactaactctggcctagacactctgtaggctcttttagaaatgggggcggtgccaggaagaagctctatagcaaactcaactttccgctcaggtggcatgcctggtaaatctttcggaaacacatctggaaattctgacaaaaccttgataatctcgagtggatctgg

SEQ ID NO: 98131 - DNA, 664 bp, Zea Mays
cttggctccaggtgttcccggagccacaagcatgctgtcccccgacacagagaagaagaggaagggcatgtggatccagatcgatggcgtgcacgaggtcaatcggttgttgcaccttggagaacggcgagctcgtcggcgtgcataaggtcaatccattgccatgccttgttgtctgaccagcggcagtgggcatagggcacgccgtaggcatagatccccttcaacaaccggtcacctcggcagcaaacttcggcggccacatcggtatgtctctgctcaaccttctgtaagttcgttaggctacctatgcgcaagtggttcattcccttagtcactatacgaggattgtgaaatggcttttgtcacacttacgaatgaaagggaggctcaacagacatttacgggaggagtctgatgtgagctaggtagcagagtgctcctagtctgttgacccacacttacgaaatactgagaacattgtagttgcatgattaaattttttttgctctgctttgcagtttgcaagcacaactcgatcgccccccttcgcttctccgagttcttaataatggtgcgcggagtgcagtaccaccagacggccgtggtgccccgggagtccatccttaagaccgaggcggagtggctcaactctatcaaggcc

SEQ ID NO: 98132 - DNA, 310 bp, Zea Mays
ggtggtggcctcctccatcgcgctgctccatggcgagatgagcacaggcctgcctaacgacgagcgcgcgctaactctgtctcttttcttgccagcgattgattcccagttcttgcctatatagccatggctatggaccggataatgatggggttggtggcagatccgactcacgcggcgtggaaatcggatttagttaggattcctcttgaggtgcgctcgatggggaagaagatatatctgccgaggggggcctaccagtcagcaacagagggagagaaacacgggtgagcgcggcagtgtccgtgcg

SEQ ID NO: 98133 - DNA, 488 bp, Zea Mays
ttcgcggcatgggcgttcatcaagatgagcgggtttggcaggcatccttgcacttggaaggcgtcgcagcagagtggttttatgccctggagcgtgacattggtggtgtactcacttggtcaaggtttatagaattcctccagatgcattttgggccaccactccgtttcaacggcatggctgacttgaaagcattgcagtgcaccggcaacgtcgaagactacactcggcagttcttgacaatcctgtgccgctgtgacgacatgactcatcggcagcagaccaacatgtacacagcaggattgggggagcccctacgcactgatgtggagatggaaatgccagagacacttcaacgggcaatgcatctggcccgagtgtatgagcggcgtctgctgctatctaccaaccccagcaccacctcatatcaggcaccagcagcaccatccaaatcctcaacacctgcaccagcacggtcgacatcatct

SEQ ID NO: 98134 - DNA, 357 bp, Zea Mays
ccaaggaccatgtgacagaggttttggttcatacttccctagcgaaccacaatttccttcttgtggtgatcgcttcccttcaggaccggggatgtttggtgttttccctaacattttcaggggaaaatgctgcaacactagtattcttcacagtttacttaccccagtgttgtgccatttgctcaccccgtgtcttactattgatgcaggacggaggcctggagaacacgtggctcatggattccggttgttcgcgccacatgaccggaagctcaaaatggttctccggcctcgacctcgtgattggtatggaatacatcacattcggggataagtcaagaggtaaggttgtttctc

SEQ ID NO: 98135 - DNA, 1133 bp, Zea Mays
ctggacgctacaagttgggctgtcatgggctctgaattgcatttctgatggtacagtatctcgatcggatcgccagctcagtccctcgccgccaacgatccgcgcgcggattcgtgctatcgccatcgttattcgcacttagaacaactagatagcgccggggtcagtaaatatcacaccgtggatatggtccggccactaaattactccgaccaccgtacccgagctagttacgattgcttcggatgggttcaccggagattgccacctcgcggtcttgcaccacgtgcccaggcatcttaccacgtcacggttagtcgtgttaggcatatccggtgatctccgggaggaccgccacggtgaaagccactaagcgcttgcgccagtgcccctcttcctctccggcctccgcgcgtcttcgtccaattcaccggccacctctcacggactctataaattgagcacactgtgagctccgtaggataattacgcatccatagcacccacgcttgcctccaatcgttcaccagagaccgtgaattgctcgttgcccccaatatccgtttccgccgccgtagaaacaccccaccgaggccagcttgctccaggtccgttcatgctccctgttctctcgttttagcgtgcttgtgtgtccctgttgctcctcgacccctccaattgagctagagtccctaggatcaccgggaacgggctcggttaaccgtggtgtccgctgtcaccgtgggcagggcgtgttagtgcgccgatggtgaaattagtttgggggaaacgctccttaggactagaattaggtgtagaccgaagaagagcatcggtcattgagtaattcgactggtgtgcgctcgctagagctcggctcctcgccattccccgtcatggacctcggcctgcgaagaaacagaacttgggggaggtttctgtaaactgtcagtgactccaggaatagtgctgcgaccccgcttctggttattcaagacaacgagggcctattcgcaaagtctgtacgcgggcgtgctttcctccagtattgggccgacttgggccggtttcggtccaatactgttcatgtcttttctttttccttttctgccagagctaaagaaattctagaa

SEQ ID NO: 98136 - DNA, 544 bp, Zea Mays
gcgcaattaatatgtgagcttgagcattgatgcgtcgagatgtgctactccgatgaggcttccgccgttgaggggttcgtgccaccgctctgttggtcggggaaggggaaagttggggagaacgactagtaccattagattagacgtcgatgatggatattagaagatggcaccttttcagctcaatttgatcgaggtcgtagactttgggatggacggttgagttcataagccgcatactggatcagtttggatgaatcgggccattggatcccgatctagcggaccatatgtgacactggttcattaaaacctagatccaatctagactctcaaaattagatcgaacgaccaaggatcacagataccccttcgcgttataaaatctgagcccttgatctcaaatccagcggccacgatcacgtaccccttcatgatctaatatcgaccgttgattaatgatttgacgcccctgcgcgtatgcgcctgtgtctgcgtggcagattttctaaaagaaccctgagaaataggagaaacaacccgc

SEQ ID NO: 98137 - DNA, 713 bp, Zea Mays
gtctggttcttgtatttgtatatttgactacgcggagagccaaggctagggcctagggctcggtcacgtacccgagccggtctgatggggaagttgtccaagtcgtagtggttggagcagtggtgggtatggtaaaaagctcttggtaatacgtcagctctgctacttctggtgacgtcggacgccctttcattggtaatatcgaggccgaagccatgctcgggtgaggtggaaatcttcttgaagtcgtggtcgagcctgctctagggctcgcaaccgtgtaggatacagtgggaggagtggccttctgtggaattcacggggagcaggtaaccgaggctaggctcgggcaggcagagattgttccgaggctaaggccggcttcaggcgagacagagtttctccctgagggttagcccatgctttgccgtacgcgcgtcccatctggagctggcagacggcgtgggggaatagctaccataattcctgggcacgtgtcatcatagttggtgaaagtggacaccgcggtcctatcacttatgttcgcctgcgacgtttcgtggggtaggtacatgcattgaatgctcatgtcccctatggcctttggccgagacgggctcgagctcggggttgtcttccttgcccgagacgggcgaggtgtaaatggtgttctgtggagaagggacctcggacgggacgaggatttccccgag

SEQ ID NO: 98138 - DNA, 446 bp, Zea Mays
acccatgtctaccagcggtgtctctggctagacccctcggtctcctccactgcaccgccccttgcctctaccccctctcacgaggagtcactggtgtaccatccggttgctctccaccgggaactcggacatgtccacctgatggttacccgtcgggtctttggtgttctatggcctttcgaccgcctggccctctcggagtaatcttctccagtgatctcgcctgagtcgtcctctgtccgtagtgtgctcaccgaccccagctagcggtgtgctatggaagaggagtacaaggtcttacatgcgaaccacacatgggacctagtgccatgcctctcctgcgccaatgtggtaaccaagaaatggatcttcaagcacaagctgaaggtggatggctccttggattggtacaaggctccttgggtcatgcgaggcttcacctagcg

SEQ ID NO: 98139 - DNA, 748 bp, Zea Mays
agaaccgctagtgagatcaaggtagcctttagacgaacaatatatagagacttgagatccttccttctcttggtcgtttctaacgcctaatactatcgatcaggtgtcggtagcgcaagcaatcgaagacaagaagtatggacattctacccaaaacagtataactctttcacccaccgagcacatcatctggatctaaaacgcgcacgcacaagtttactcgcgagtgttagttcgaaacaccataaaattttcaatgctcatgctaaattataaaatcgtaaatcgtacgtgtgttggggtagcacaaaaactggatgggttagtttaaaattgagatctagttcttgtcttatcttatcgttcgacgagataagctgggagacatttcggaacatgaagatttcttgtgcgtgtgagtctctctctctctctctaacttgtggacaagagacgacgcatgcaattggcgcctgcatatccactgatgatctctctccggcaatatgtcatgtataatatgtgtcatagtagcttgtcttctttgctaatcggccgacatatattatatatataagcacgtacatgtatcgcgcaatgcatgatactacatgataattacaagaagggatctggacgtcatgccagacgcaactgttccgtgccacatgcatccatccttaagcaaaatacatttacaccactatagtaaacacaaatctacgtcgacataatttttttacatcag

SEQ ID NO: 98140 - DNA, 550 bp, Zea Mays
aaagcctaatgcaaagcttgggtctctggcttcctataatttctaagaatttcatcacattttgcttcaattgaatataaccacttgtcacaaggctccccaaattcatcttcaaatttatacttatagcgaagtctaactagtccaagatctacatccgaagcatctttttcagacatcttaggcatctcccacctagtccttagaggccatgttttaaacgccaaatactcttgaacaagatcccttgttccaacatccgtgcatacaacgttaaaagcaaatatagcgggttgagcatcaaaatcaatatagcaaattggtctcttgtacccaaagcaaatatggatgaaagtttgaataacccctttaatatcttccctctctttcaaatcattcttcatataaaaccacttctttgcccattcgtttgaccatttgctttggtatgcgagtgcagggaatatggctcccctttgataagcaaaattgtaacagccgaaattattgtgaaggtttctagttgccttcgtctgaaaaagatgttcat

SEQ ID NO: 98141 - DNA, 529 bp, Zea Mays
agaagatctgctcctatatatctcctgcatgactcacgtgataagcatcgcgttagtagtcaagcaggcggaggaaggacatgcatacccggtgcagcatctagtttacttcatcagcgaagtcctcgggccctcaaaaataaggtatcctcaagtacagaagctgttgtatgtggtacttctaaccgctcgcaagcttctgcactattttgatgaccacaaagtcatagtagtcacatgattttcgataggtgacattctccataataaagaagctattggaaggatagccaagtgggcatgtgaactcggggctcatgacatagagttccggccccgcacggtgataaaaactcaggcactggtcgacttcatattagaatggactgagcaccaggacccagatagcccagaagatgctgaagtgtggagaatgtactttgatggctcgctgaagctgcaaggagcaggtgcagggattctttttattgctcccggaggtgaacaacttaagtacgcactctagttg

SEQ ID NO: 98142 - DNA, 487 bp, Zea Mays
cacaaggcattgaggaccctgtgtcagatctatgaagaagaagtggccgacaccccgctcagattctttccacccttttagagagaccgtctagtttgtatggccaggatgcgtgcattggaagggaagcaattgcttgaggatgacccctcagtcgtgtacctcactgcatacctgctcaccctggatgcgcaatatgacttcttggctcggcaccaccgtcagatgattgcccgagcagaagatgcagagaagcacaaccgtaagctccatgtggatctcaccatagctcaagcccgtgtagctgccttggaaagtcgtgatgtcattgttgttgaagccctgaagcaagccaaggatgagcacgtccagaaattgatggaggcctacttggtaacccataaccaacgtagagccctgcggatccaagaacccgcttcatccaacccagttcaacccaggagagttgaagatcaccagattcttg

SEQ ID NO: 98143 - DNA, 611 bp, Zea Mays
aaactttcccaagactcagaaaacagccgcataggacggtgggtttatttcaaataagcacaggagctcttatgcaagtttgcagagacgaaggggtatcctcaatttcctggccacccgatccaaatccgagggccacagtttaacttatcccaagcgcacagcccaccgttagatcataggtagatggttcagatattatgaagcccagatacaatctcgacccttggtctcgctctcaacggcccgatttgcatacgtcgaagaggtatgatacgatttaatctcaatcgtccgctagctgatcaacggttcataaccaatctggacgaaccggcatccatatctaatcgtggccacacgcttgggatccaacgcccagggattcatcttccccgaccgcgcacccacaacggcggcgcgccatatgccgccgcgacgccatcgccggtgcacagcgatccggcgacccagcgcaccatactccaaaccgaatcgcctagcctggctgtaccttgctagaccaacaacagagcgcgcttcttctcccctctgataccggcgcacacggtggcacaccagccccacggcaaatctctcactagcgtttg

SEQ ID NO: 98144 - DNA, 799 bp, Zea Mays
attttgatttatatagcggatgtcgagttgctagctagtggggtgcctcctttaattaaaaaaagtttgctgtttttctcattttctcggtggttttcgatttttattttgttgagtgtttttttttgccgagtgcccgataaacaatacctagcaacaaatctttgccgacactaggtttgccatataccttttgctgagtgtggcactcggcaaagcacctgtgtccgggagtgcatgtggctgatccatgaggacgtcagtcttctataaaagttgattgtaagacttaatataattgatagaatacttatattaataggattaattgtatacatgtcatttaacttttacaaaattagacaactagatcatgttgatgccatggagtggcacgaaaatggtctagttttcaatcttccaaaagtttgagtggcatgttttcaattgacctaattgaggtgtaccttctccttcaaaaatctaactcaaagagtctccgagaagcaactaaaagtaactatctggtgcgtgttacgctctcttgtcgacgaatgtgcgcacactgccttgtgaactggttaactggcaatgaattagtcaccaactgcagttgttcgcccgttctccatcttaaactacagtctacaagctggtagtctgatacatgatgtttaggtattgtcgtactgtattactagcgttttggtggtaggtgggtatatgtacctagcggtggagaagctatgtacagtttatgtggtgcatatgtatcttaaaaaaatactcactccgtttc

SEQ ID NO: 98145 - DNA, 313 bp, Zea Mays
gccactacattgtccttgcctgggtgatagtgaatttccaattcataatctttaatcagctcgagccatctcctctccctcatattaagttatgactgggtaaagatgtacttcaagcttttatgatctgtatagatatgacaaatattccccagcagataatgacaccatatttttagggcatgaaccacatcagctaattccaggtcatgagttggataaagttcctcatgccggcgcaactgtcttgaggcgtatgctataactcggccttcttgcatcaagacacaacctaagccactgcctgatgcgt

SEQ ID NO: 98146 - DNA, 404 bp, Zea Mays
ccgggaaggggtgaaaagatccggggagaggataacccagtcactggccggtctggccatcgtgtcctgccgcggttagtcgtgttggcatcaccggagctcaccgtttccccggccgtgacacgtagcgatctatcctccgcgtcataaagatcgtggcaagcaaccggttatcacccctgaaccatttccctctcgcgcgccatggtgagcaggccactgtaaaaatatcctggccgctgtgacctcgatcccaatccaaaattcgtgataagcttagccagagcctataaattggaggcaccccctattccacctacttgttacgcgcccagctcaccacttctcgcccaaatttgggttttcccccaaatcagttctccgcgccgccgcgaacaacccct

SEQ ID NO: 98147 - DNA, 430 bp, Zea Mays
agagcatttcaataattaccccaaaaacaactaactccattactcaacttgtattacgatcctacttgaccacccgatgtgactactagaattcgcgagcacgaccatatactatatgcaaagcataatttacgaacacatactgcgcatcgactcgactcgacttataaacatagaggaaatgatgactaccttggcatgtcaccacccctctatttaagccgagacaaattctaccatcgattaagagttctaagtattaaacacattattattttcacacacaaataaatctcaacttaacaccatttttggttaacttgatcgacacactacgcatgttctttgcccttcaaaatttatcgcaccacaggaatcatcccacttgctaatgacaccaacaagacctacttatctattattcaccaca

SEQ ID NO: 98148 - DNA, 689 bp, Zea Mays
gcagtgctaaatggacctcggcatggggtcgaggagggtctcctatgctcgtggatcgcgtgcaagctagtatgtgggcgcaatgttcctcggagtattcagaattgctaaccgaagcaaggccgccgccatggtgccgctgctcaacggaggcaggtagcgaccactaccacataaacccccggtatgtaaccttcatatgctttgctacagtcacagctacgtacatataattgatcgaggtaggttttggtgaagctaagcgctggggcaagtgtctccggtgagctgtgccaccacgaggcttctgctctgccgcctggcgacgccggagaaaggtgacgggcttggaccggttgatcccaaagagatggataggattagaatgcaaggtagcagttcggtgatggaatcaggagcgttggatcaaaatgtcgtggccctaattaaatttggcataccccttcacggagtttgatttgggccataggatcggtgatggagggcgtaggttagtgcaagatgtggctgcctctcgaccgttgatctgagatttggcggttgaagttacgtaccagttcataaaaagcactaatctaatctaggccatctatcaaagactaaactattgtgatcgactgataccccttcgccgggagcattttgcataggatacttacaaaatcaac

SEQ ID NO: 98149 - DNA, 319 bp, Zea Mays
gaactcgccgccatcagcgtctgtgtggatgaattaccgctgcgcatgtccaggttgccaccaccgtcgacccgcgtcatcgtcaccgttgtggcttcggacctgggcgctgtgcgcaggcacactgatggtgcacatggaattttcgggcgtgattaggggcaaacggtgccgcaattcctcgccgtgtgtacgacgccgccgcgattccgccctcctccgtgggcagcagccaccacacatccaacaccggtgagacaccctatctctgttcacttgagcgtccgcgtcccgcatgtatctcttaggtatgctctgg

SEQ ID NO: 98150 - DNA, 415 bp, Zea Mays
atgtggtagttggcagcttcggcaatattgctactttcatcttcggctgctctggtactctttctgttactggctttggctccctggccaggtttgcaataattccagtaggcacaacaggaaaagcctctatggtcggggggttgtttccaccctttcacttagcttcggcatgttggtcgtctcaatgcgcctgggtcggtgcgtcaaaactttgatcttcttcgaccttgacacatcagcagatgccgaggtagcggctttccttttcttcccttgcttccgcgtgggatgacagtagtacgggtatacgaacccgataacatcaaacaccctattcaatctcttcttgccgcgagcaccgaaggcagttgtcatagcttcgtcttctgccttcgaatacgctccaaatatc

SEQ ID NO: 98151 - DNA, 620 bp, Zea Mays
ggccggcgggcagcaccagctcgtgggtggtgcgagtctggagatgcgtcgtgggagaaagacagcatacctcaacatcccactcaaggacagcatcaaaggatggcgcctggaatggtttattgttgagaatcatggaaagtccctccccctcggtcagggagacagtcggacgttcgtgcttcaagttggactgaatcccccaccgacttggagatagccaaggacagagttctgcttgccgaagttggtttgttggaggagagaggtctgactgctgaagttgtagtcgcagattttgtttttaagaacatttagccactgaaggacagagcgtacccagcttatctgtatcatggtgtcactgactcaacccaggttaccaacaggaggattcctgttgtagatctggtgagccggcttgagatgattcttagaggcacagtgtcgaatattggggctcctgttgcgtattctgcctggaatctgcctccttccaagacatttgtcaaccttgtgtccaatcctcccgctggtgacagtggtttgggtcttagagtgcgaccctctcccgaagaggttgaggctttggttgcttcgcttggtgatatccccaatga

SEQ ID NO: 98152 - DNA, 428 bp, Zea Mays
cgaatatagtcattaactgattcttcaggcccttgtcagactgaagctaaatcagctaattctaactcatgttctcctgagaagaagtgttcatgaaatttctgttctaattcctcccaataattcatagagttaggtggtagggttgcgtaccacacgaatgcggtaccagtcagagataagcgagaataaacgaacacggtaggcttccctatcagccaattctcctaggtgtgctaagtactgtcttatgtgctcatgcgtgctcttctcaccttcaccagaaaatttggagaagtctagtatcctaaccccttgcggatatggcacggtgactataaggtttgcgatacgactgtcctatgcctgacacactaacactgtgtttatctctaaacaacccggctacctcgtccctaattctttcc

SEQ ID NO: 98153 - DNA, 598 bp, Zea Mays
gctgaaattgtcatttgatgctactggaatgataattatttcaaaatgtgataaaattgttgtttggtgttgaatgctaaaattgtagtgggcgggcgggtaacaggtatccactggatagcggatacccacgaacgtttatgggtacatgtatggattaagttttgtctcgcgggtatggattaatgaactatatatctgtgtactactcgaccgattgccatccctacgtgccaccagtcgcaggaggttcaaccacttctactggatgttggcccgatggtgaggcgatacccaatgtcgagtttagcggcgtcacgtcctcacggcgccgagctagcgacaaagtgatctccgtttttattttcctactgtcccttcgtgcgtctagaaagatccagagtagcgtcgacgacgaaacgatctccatttttattttcctactaccccctttgtacgtctggaaagatccggagtagcggatatgcgtccgtattcattcctttgccgagatgcattcgtgaccactaattcaggatcgtggggctgagatgaaaaacactgacgtggcgcaatgggagagctgaattgctctcgg

SEQ ID NO: 98154 - DNA, 726 bp, Zea Mays
tctgttcttggcggatcttctatggggtcactattccgacagaagacacccacgaatccgtcatttatgttctttttctcatccgcggccttgctcttcccatttctcctttcttccgcggtctccttgatttctatcgcttgaatctgacccatctgaatcccaattccattctgcaagtttccattttttgttcatttatgcgaagccttccttggtattctgccacacttcggcctatggaagtacctgtaccactgtcggcctgggatggccggagggcagcaccagcttgtgggggggcgcgagtttggagatgcaccgtgggaggaagatcgattacctcaacatcccactcaaggacagcatcaaaggatggcgcctagaatggtttatcgtggagaatcacgggaattccctccccccacggtcagggagacagccagatgttcgtactccgagttggaccgaatcccccacagacctggaggtagctaaggcaggagctctgcttgctgaagttgggttgttgaaagagaggggtctgactgcagaagctgtggttgtcgatttcattttcaagaacattcagccactaaaagacagagcatacccggcttatctgtatcgaggcctcgctgattcaacctgggttaccaacagaaggattcctgctgtggatttggtgagccggctcgagatgatactcagaggcaaggtgtcgaa

SEQ ID NO: 98155 - DNA, 354 bp, Zea Mays
tgtttttgcagtttgtgttgtttggatgtttgcaactgctgctaacgtacgttgcagttgaggcttttgcatgttagcaattgtacttctctagtttgtatgtagctatattgcacccatgtttacaacaatcgtgtgcgataggatgggtcgacacgtgggaggcgggagatgggaatgcatatgaatgcaagatcggcattgttaagagatattgcatatgataaggagttgtaatcgggtgttatagatattttagatgttccgattagatagactagaatgtagtttaaagttgtattgtatttatttagaactctcataactggctcacatatatgtacaacaccatga

SEQ ID NO: 98156 - DNA, 296 bp, Zea Mays
ggccaacccagaaggtggttttgtgggatatggtgagcaacatatgtggacacataagtcgggcttgactcagctcccctattatgatgacctgctccttccacacaacattgacgtgatgcacactgaaaagaatgtcgccgaggcactttgggcaacaattatggagattcctgataagtcaaaggataacgtaaaggcaagagtggatctggcagagttatgtgatagaccaaaccaagagatgaagccgcctagtggtggtaagacatggagtggcctaaggccgatttcgt

SEQ ID NO: 98157 - DNA, 385 bp, Zea Mays
caaaaatagagaagcacaggggttatcatgcaatataacctagactcagagtacaatcaccctagactgcgggttgattctataatattccaggggctcttacgcaaaactatcgaccgaaagggtatcggccaatacgagtcgtccgatcaaacatcgatgctacagattagatcggcaccccgccgaaccagtattcaacgtgatccgaccgatcagagatcaatgcccctcaacaggtcataacccgcaagaccacgctacccctcggatctagcatctacgatttagatcaatcccacgaaatggtatatcttgtattgaatcatggtcggtcatcgcgagatccacggccccggacctttcttcttccagcaggctgtgc

SEQ ID NO: 98158 - DNA, 533 bp, Zea Mays
cctattcgccagtggcccaccaagcagttagctagctaggagttaagcctgcgcttgatagcctcgtaatcatgatccccaaaggcgatgagcggccatgcttacttcgtatatacgtatgcagttgggtccaagcagtcgagccatgcatggtctgtctgacaacaagatctgaatgatggataacttaaaaaaccgctaatgcatctgcctctgcagatttgagaacacacgacgatccacgtgtccgtggtgatggccgttgagaaggagagtttacctcgattcaccttcttttccccagtttcaattcggagccgttaaaacaggcgatgagtcggcggtggatcatcttttctgccatcatttccaccctttttaccgaacataatgtgcctgggaaaggcgtggtttagacgaccgtaatgagaaaggtgggaaagcacggggcacggcaatcatacatcgcaggagagagagagagagagagagagaggatgcatgcgctttgccatgaatgatcctccccttgc

SEQ ID NO: 98159 - DNA, 707 bp, Zea Mays
cagggagaagttctccattgaggccgatgcaattctcttggatacaatggagatcattctagggacaacattcctgagaacaatggggccagtattatgggatctccaggacctttgcatggccttttggcatgaagggtggcgcatactttgaaagggtttggggtccgttcgcatagacaccactgcaccaaccacatgtagcatcagcactgaacccaagcacatgatggatcacttgttgcagtcctttgatgatgtctttgaggaaccatagtcagtaccaccagccagacaatgtgaccataggatccacctaaaactaggcactgcactagtagttgtttgtccatattgttaccccgaattgcaaaaggatgaattagaagctcaatgtgcggatatgctttgccgtggtataatctgacacaatacatccacattctcagccccagtcctcctagtgaagaagccagacaatacatggcatttttgcattgattacagagccctcaatgaacataatatcaaggataaatatcctataccagtggttgatgagttgctagatgaactccatgggtctcgattctacactaagttggacctctgttcagggtaccatcagatccgtatgcacaaggatgacattgagaagacaacctttcatacacaccatggacaatatgattttttggtgatgccat

SEQ ID NO: 98160 - DNA, 1411 bp, Zea Mays
ttgtcgagtaccataaggtcagaagttgcattatcttcttttgcttccactataatgttctcattctggtggctgctatctgatgcattagtgttgcttgaatttttttttctggagcaggcatggaatcgttggagttttcagatttgtctaccacggtttcagaagttgcattttcggtgtttgctcccactacaatgctctcatcattgtgggtgctctctgatattgtagtattgtcggaattatcttctactgtagcaggaatgggatcactggaatttttggatttgtcaagatcaggctcagcttctttctgctgcaggagttcctttatagttgtcgtctaatctgggtttgaagcaattgcgttctctttcatttggttgatatggctctctttctccacaagagctgcttccaattctttctgcgtgttggtaagatatgtcgtggtagtttctgaatccatgagcttgtttttcaattctgccctctcaatacttaggacaaatgtttttcaattctgccctctcaattctgcttccaattatatttgtttgttacaaaatactttaaattgtcatttcatttaaactttttattgtaaactagaaagtatacatacatatacacggatttgtacatgtaatcatgtacaaaattcgccacacctcaaattttgtgcgtcctccgccactgctcgcccccacacctcgccctccatccacctccccaaatgatgtgccttcctggaattaaaaaggccgaagggaggccacacacgagaccaccaatcggacacacgcgagtacatccgacgcccaccatcagccaggtgatggtcgattacgagttcatcctgcgcaattctttcttagtgttgagtatgttgttcttttttctagacataggttacaggtttatttcagaaataagtttatgcaatgtgtttctgcaatgtgttgggttcagtcatacattggacagtcacaggtaggttacaggtttatttctgaaataagtatatttctgagacataggttacaagtttaccgatcctctccatgcaactggtctgttatgtttcattcgattttcagttaagtcatagtactaaactgcacagtctcattcgattttcagttaaatcaatctgttaattttgtaccataattttaaatatgttcatcttctctttgtgcatttaaatatgttagttttgtacaattcaagtatgtcaaaccaattttgctagactatttagtagtacggatatctttaactttgttgcctgctctttgctcatgctccaactaatttcagtgcctaatgctactcatagtactaaactggacagagtagaccttacaactggacgtaccttcctgttcatacaattagttagttc

SEQ ID NO: 98161 - DNA, 394 bp, Zea Mays
cctcaatcgctctgcccacggtgacagtgcgatcaacggataacaagaagtgttcccggcgatcttatgggtcctagcttaattggatgggtcagggagtatcaagagcacctaaggatactgaaacgaggaaccagaggacatgaacggacctgtagcacgttggccacagcgaggtcacttcacgcagtgctctggaccgatttgggggaagtttccaattggcgagctctggtggatgatttaggcacgagttggtgtattggttacttgactaccttgcggaaccgatggcatgctcaatttataggatcccagagcggtggcccgtgaatttgagatgacgcggtggcggtgggagagagaggagagcactgtcgcaagagattggtgg

SEQ ID NO: 98162 - DNA, 535 bp, Zea Mays
gtgttctgaataacatagtcatggtacagtaactaacacagatcctaggtgcagctcccctcgccgctggtgaacagtgcgcccggatttgcgctagccgtcacgactcgtgcctcggatgtatggattacgctcgacggaaaaaagatctcgtcgcggatgagctcgggacattgtggacgctctgtcactcgtccacttgcaccaacgacgtggccaagcaaccatcgtcgaggtatgcgtcacccgccgtgatcgtgacacgttatgaccctttaaccacgtagcagtgcattgcctgagcatgtctattcgtcgccggtggtcttgccacggtaaagtccacgaatcacttgcgccagtagcttcttccctctccgaccgccagcgcaatatcttcaaattgaacgccaccaccctcgaatcctataaattgagcgtgtcattggatccgctatgtagtcaagcacccaacgcacccacccgtgcctccgattatccaccagatagccccaatttaagacttcccccaaat

SEQ ID NO: 98163 - DNA, 590 bp, Zea Mays
ttcatcttcaacaaatatacggacgacagccagtgcacggtcacacccattgggatcaacttcagcatgacagtcacacccattgggattaacttcagcaggatggtcacacccattgggttcaacttcagtatgggaacaaccattgggatcgacctcatgaaggacctctgctggcacttcatcacagaccggcccgaaggacccgcgccatgatccaagctcgacagtcaccgaagccgcctcttcttccttttctcttcaacgggtgcagtaggccggctcaatcggcgtggacgctttggatggacctcttcgggtttccggatcctctccattccaacaagttcttgcccgtccgtgatagccattggctcggcatgtgtcgactcagatgactccccagccaacaagttgagcacaacatccatctcctcgtcgtccgtgctagctgacatctcgaaatgagtttgtctctcaccctctaggagactccggagtggggcaattaaagcttcaatgtctttaggggagggtcgcactctaagacccataccaccatcacgggtaggaggattagacacgaactc

SEQ ID NO: 98164 - DNA, 979 bp, Zea Mays
gctcagtggatcgggctttggctcaagccttatgtggacattagcaaggaggagaatcaaatgctctctttgattccgcacactatctcgctgcacataagaagaaaactaaatgttagatacaaatgcaaccaggtttgactaggaatatgaccaaaatgatacatatctatctacagtagcaccagaccaaaattcccattaatgataaaaaaacaagaaaattgaaatagaaccagaagacctgaaagccaaacatagctctcaaccaatccaacaaatcaaggtcaccacccttctgcctctgcggctcaaatgttgaaggccaattcaagcctcgaatgtttcggagggctgcaactgctgctttgatctgctaatattacactatttcattaaatcagtacaatagcgttattcttttagaggaaacatgttccacagttatggattgtacatacctcctccagctgcatgatggactgggatgcactggcagcatcaaggggcaggatattgaatggtgtgtagatgtctttcttctcttgcacatccttgtgcaagcgaataatctgtgcaggggaatattagagaaactcattagatagtagacacattgcaatagaactaattaggatagatggcaaacacaaacctcaggattgagctcctcgactttctcatttttattgacggcgcagagtacctcaaagaggactccggcagtctggtaggccttcccaagttgagccctgcacgtgagacattgacatgggacatggtgcgcataagtaggattagatttatatatacattggggagctctggttggaaacgtgggaattacctgtcagcttgttcccctttgtcaagtgcacgaacatagttctcgtagtactgttggtaaaaactctcgatttcgcgagcatcgcttttcttcacgcgcttagcaagactagggctattatcctgttttatt

SEQ ID NO: 98165 - DNA, 345 bp, Zea Mays
tttttttttgccacttgtggatttatggtgcttggcagtttctcccctttatcactagtaactgtacacgaggttggttgggtgtgagtgagtggaatcccacagacatgtttgatttgctaaagtcgcagtacacacacagacatatctacaaaacaaacatacatgttaactcccacgcatgatttgctaaaatcacaacactttacacgtgataattgatatgtaattccatattatttcaaataagacaggcaaaacatgttcattacttttgatgttgacaccatatatggttatgaattgtcttatcgatgtttgcttggccatgggatttaacaggcc

SEQ ID NO: 98166 - DNA, 461 bp, Zea Mays
cttgagtatagtagacccgtccagtattcctttcacctttgcctgcctgagtgtttgccacatttcccttgccttgagatgtgcttccagaagccttttggaagtttgatttattttgcttcagatagggacaaaccttgattaaatgcctagacttcccaatgttgaagcagttattagatgaactcggtaaggcggggaaacgagtaccaggggcactcggctgattattttgagtaggggcaatagtaggacggatgaagactggttgcttgaaaggataggagggtggatgaggaaaagagcgatttgggttaaagggacggatcatcaaccttgaccacttcccggatccttgagaggatccctcacccccttcacacctaaatctttttatcttttcctgacctgaatcgtttgcctccaccgaaagtgctgttgtaagtgagatctagacaggt

SEQ ID NO: 98167 - DNA, 432 bp, Zea Mays
cggcgataaaaataccgagacacagaaccctgggacctggaccgcgggttggttagtaattttctcggggactcttttacaaaatgtgcaagccgaaggggtatcaggctttcaggaccgtccgatcagaagcggttggcccggattagatctgtcccaccgcgaaccggtacgcgcccgcgacggttggattaaagattaacggcacggatttaataaccctgccaatgcaccagattcgcccgctagcagatctacggcccaggttgaattccccaatcaccaacccagaatcaatcgccaatgcacgatatagatcccacgactagagatcatcgttctccacggttcacccgacggcggtgggttctcctccccaaggcggagcctcgccggggaattcccgattacagaccggagccccgatttcta

SEQ ID NO: 98168 - DNA, 692 bp, Zea Mays
catactaacatagggtcttagttctatgcactttatataatcagctcatggggctcaatgcaatataattttattctcaaacaatacctcctctaacatggtatcacaaatctaatgttgcttttgctcctcccctggtcgccgcctttctagggcagtggcccctctagggctgttgtcaccgttgtgtcgtgtggtcgtagcaacgtacacacatcttctccctctttctcccgcacccatgacaggacctcattgactgacgaggagcgcaccacgctgaggatgaggttgtggcctttcgcaagaagatcgacgacatgttcgctgcggctcaggatgcggacaaggaagctgccaatgcacacattcgtgtccaggtagccactcatctcctcgaacaggagaaggccgccgccctcgagtagaaggctagcgccgcttgacatgatttgttcctacaacaccccacgatcgcagcttacggggctgccgtcattgccaacctctacgtctaggcagctactgtttccaacgttcgagtgttggtgatggttgtccccgtgtcctcctttgacaattatgccggttggcttgattaggtgttgcttgctctcaagtgatacgcctttgtcaaccacatcttgtttgacccttcgttggacaccggtttgtgctgggatcgaatggac

SEQ ID NO: 98169 - DNA, 591 bp, Zea Mays
ccaccaaactgcagcagcgctgcttgataatttcataactttataattataacagcagtgatatcaataaaaaactccagaagcatttacataaaatttcccacaagttttatattcaaatgataattaaattccaacccctatttagcccaaaacagtccacaagataaaccctgcaatctgtttttggacagcagcatacccggattcaaacagcgacatatcctaaaatataactccgaatcaagcgcataagtactcgttggaaaggtatgacaaaactctacattattatcatactgattatcactaattacacacgaaaaatcctcagaaactgctaatactactgctgttcgcccacctgcaaatctgtttttttggacagcaacatacccggattcaaacagcgatatctcctaaaatataactccgaatcgagcgcataagtactcgttggaaaggtatgataaaactctacatgattctcccacttattcccactaattacccacgaaaaattctcagaaactgctagaactactgctgttcgcccacccacaaaatttctggatagcacctctaccaatt

SEQ ID NO: 98170 - DNA, 670 bp, Zea Mays
gactattgggcctggacacatgacggcccagctccactttaccgccagcaccattctcaggagccgaactcccgccatcagtcatgacgacttctcctgggctgctgacattctccctccttttgaacactgcttgcccccaagcaatgactgctggaaactgactacgtaaggcgacctcatcttcccaggaatccaaagacgtgtcgcagccggaccacctgaccaggacttgagccacacaactgcctccacgcgatactgagtgccactgcaaaatgacttcaggatacctcagaccatcggaaacagcagggagcagcttgctgactggagaatgaggcttaatgaaatttttgagctatgaaacatggaaaactgggtgaatcatagcagtctccggcagcctgagtctgtatgccacaacacccactctctgcaaaatttcaaaaggcccaaagtacttatatgccaatttgtgattagctctggtagccactgaggtctgaacataaggttgtatcttcaaataaaccatatctcccacatgaaatacgcgatctgacctctttttatcagcctgtgactttatgcgttgctgggcacgcaacaaattgtgttggacaacacgtagcacgagctcacgttgagagagccacttgtccaaatt

SEQ ID NO: 98171 - DNA, 931 bp, Zea Mays
tgccgacttatcctcatttggttccgatgtctagggtggtcgcgcgggagaatcggattggagctgtgggtaacgctcaaaaccccacgagccgccttggcccgcgtttgctcattccctgcgtcggcccattctgcgagcagtcctcccctggcccacgaagggatggacttgcgagacagtaagtccaaaaactttctgtgagtccttctaaccttctagtggacccaggggatatctgtcccccacaaggggttaataggaagttagagttgtggaagcacatgttggagtcgaaaagttttagacttagtaggaccaagaccgagtacacgatgttcatttttagcgcgactagacatgaagatatggagatgttaccctcgatgggcaactggtggctgggaaggagtcttgtcggtatctaggaacaatggtacaaaaggatggtcatattgatgaagatgttatgcaaataatttcagccggttgattgaaatgacgtcatacttctagcgtcctctatgacaagagggtgccataaaagcttaaaggtaagttctataggacaacgattcacccgagcatattatatggtgttgaatgttggccaacaataatgcaacatgttcaacaagtgagtgtagcacaaatatgcatgttatgttggttttgtggacacacatgaagggatagagtctgaaacgaagttattcagtatatggttgggtggtaccaattgaggagaaaatgatatagtatcggttgagatggtttggacatatcaaaaaaaccacctgggacgacggtgcatagagaagttttagatcggctggataatgtaaaaagaggtagggatcgacccctacctagaataactcggtatgctctttatctttagcattaactctactgtattttttttcttctt

SEQ ID NO: 98172 - DNA, 541 bp, Zea Mays
tcttgatagtaacttcattcaaggatctgtagtcaatgcacatcctctttgttccatccttcttctctacaaatagcactggggctgcccaaggcgaggtactcggtctgatgtaacctttctctgacaactcatcaatctgtttcttgagttccaccaactctggtccggacactcgataggctctcctggaaataggggttgtgcctggaataagctctatggcaaactcaaccttcctttcaggtggcatacctggtaactcctcgggtaacacatctgggaaatttgatactacactgatagcctctgatggtttaatctcctcaatgtgggcggtgacttggtgacaactcccttttcttgatccagacaagaccaattccactaacacttcttctcctgatagggacactaacttcactgttctcttgtcacaactaagactggcttgatacttggttagccaattcatccctaggatgacatctatggttgtatcctggttacccataactatcaaatcggtggggaactctat

SEQ ID NO: 98173 - DNA, 372 bp, Zea Mays
tttggagttaaaatgatcaagatatgaattatctaagtttttatccatttttatatacctttttatgcataaaataaacttcaggggtgattttgtaaaaactagggacttaatcgtgacaaaatctgagtgaatatggacggcgggttgatttatgaaaagtccaggggctcttatgcaaatccacacagccaatgggtatcttctaacctgagccacacgatttagatctgatggtctaagatatgacatgaaagggtatgttacgaggtgcgctggatcgacaatcaacggtcacgattcaaatacccgaaggggtatacacccgactgatccggagcgttcgtggctgatccaacggccgatcacaac

SEQ ID NO: 98174 - DNA, 443 bp, Zea Mays
ccgcgaccgagcccgagtcgatccaggcgccgagatctttaatctcctcagttatccacttgtgctgcacgaatcgtagcggccggcgtgaatcgtggcgcagaggtcgccggcgacgagcttctctgtgttggcgttctaatccaaacactgtaccatcggggttcttatcaggtgcttgacagagctatttgtagagcccggatctcaattttccatgtggcaacttattaatccacctataacaaagttgttgcctgatgatccagctacattcttgctatagcaattatagccaaacaatgactggatcatggtcgaatcccagctcaaagattgctcaatctcactgtcagtctgaattcagacttagggcagtctgacagcccaactttgggctcattttactccaaatttttcatgtgaccaaggcttaatcccta

SEQ ID NO: 98175 - DNA, 308 bp, Zea Mays
cgaaggtttaactcacgtaaattcaacacatgtttctgatgaaggtttaactcatgtttggaacagtatatccatgcgctgctgccattgcagttgtttagtgtacctttaatcctcatgttcagatattaacaataccataatttggacatttaagcatatatatttcagacactgatatttaataatcctatcagtcccgtaatgcactagttggttgtctgtatttatctgtttcttttttaatcagaatctacaatttcataatctgcgtatctaaacatccaaattctacctaccaatttctc

SEQ ID NO: 98176 - DNA, 283 bp, Zea Mays
gggtgcagccggaaatacacaataagtgcgcgacatcacccacagagtgcaaagtctttactaaaagacacgtccgagcaaaagccgcctaagggtgcagccaagcatacacaataagtgcgcgacatcacccacagaatgcaaagtctttactatcagacatggtcgaacaaaagccgcctaagggtgcaaccggatacgcactagaagcgctcgacatcgcccgcgggaagcgaggtccccatcccatctaagtgccacgccaacacgattacaagtcgag

SEQ ID NO: 98177 - DNA, 350 bp, Zea Mays
gagaatttgatgaatccactgtcggatcgttgcatcatcgggtggttcctgtaacaattgaggatcagctggcagaggatgtgccaaatggtactcaatttgatggtacgaggccttcactgctatgttggtccaactaatcaattttatcttgtgtgttcattttgcagaaacatatgtattagatgaagttgagatacctccatttgcgttatgttgacatggtacttaatccaattatgtatgctgaaactgacattttaagaattgtgatagcttcatatggtaactacaatgaattaaataacattagtacatgcttgcaacttatttcagaacttgttctcttg

SEQ ID NO: 98178 - DNA, 324 bp, Zea Mays
gagcgcatcgctagacagtcagctcactacacactcattggggaaacattatacagaaggggtgcctcgggcatcctcatgaaatgcattctctcatccactgggaagcaacttctagatgaggtccatgctgggcaatgtggaatacacgcagcatccaagacactagttgggaaggtcttcaggtcgggattctattggccaacagcaaaaagtgatgcagccgagttagttcagaggtgcgaagcctgccagtacttgtcaaagcaacaacatctaccagcacaacaactgcagaccataccagtaacttggccgttcgca

SEQ ID NO: 98179 - DNA, 497 bp, Zea Mays
caggtggcgaaagcgtggaggggaaggagggtgaacagggcgccataccgaatgggcgaatccgtgtgcacggaaagacaacgtagggcccatgacaacaggagagagccatgccatgtaaattgagccatgaggctgagtcgtgggacatgtcgcatgttatcgcagggacgtcacccacgaactcgccatagaaacatttgcgatggatggcgccataccagaagcactacttcgcacgatcctaaagggggcaccacgataactggaggactctttctctctctaaaaaggcggatattaatgtaaggtatgtcccttgggatataaaagggaaggtcatgccctctctacacacctgttgtaacacgcttcaagcaatactacaatcagcactacattggagtagggcatgagcctgaaccagtataaacccttgtctcaaacccctcgttgagtccgagtgattcaccattcggaatgagtccgcactagca

SEQ ID NO: 98180 - DNA, 519 bp, Zea Mays
tgcccctttgatgatgaagtatgaatttatactacaaagtccaaaccccaccccaaggaccatgacttgataataggatgtagtttagctatggggatcaactgtagatcgctgaacttctgacctacatgacatcctttgtagtatttaaaataatcagctatcatggtgggccaatagaagccgaatcttctcaatagccacttcatctttggagccgattgatgagtaccacaaatcccttcatgtacttcggccatagctaatatagcatcatatgggcccaacaatttaagtaggaaattgtcaacagttcggcggtaaagttcgttatcaatcaaaatgtatttgaatgttgtaagccgaacattcatgtctgtcctaacactgggattacgtagataattaattataggtgccctccaatcagttgcatcggttgttttgatagctcaattaattaaggagacgtctctggtacctttggatggtccatcgttctccttacctatacggtcc

SEQ ID NO: 98181 - DNA, 646 bp, Zea Mays
cccgggctggggctggtgtgtttccgctgtggtgatgcgcatcgccatgcagagtgccagtggagtggcaggtgttctatctgcagtcaggaccacaaggatgtggtgtgtaggaggaatcctaatgggaagctcagatgggagccgatgacttcctcctcctctcagggcactatcaacatgatgtcaagtgctgagcagcagtttttagttcttcttcctccgcagcagctttatgtgcctgggacttcttagttcgtgccgatgcagggttttcctcagtatcaggccgcgcctactcctgcaccgtctactcctatgtcgtctcagtttggagctccgcgtctgcctcacccggcggctcagtggggttcttctgttaatttcactccgggagcttcctcttctgcgggtatttctggagcttatgtgctacccgctgcggatggcggggagaaaggagacgtggtgacaggtacgatttcagttaattcgtttgtagcccatgctctttttgactctggcgctagctattcgtttgtttcggaggattttgtgtcgcaggctggtccttcggtgcagaggttgggtcacccaattttggttagatctgctaatggcttcattagtagttgttcagtttgtc

SEQ ID NO: 98182 - DNA, 508 bp, Zea Mays
caaggccgtacgttttttttcctgcagttcgtagctagattatgtgttgtgtgtctctgtcgtcatgcatctgtactggctgcagaaaccttaattagcttttttttttctctggatggatgcatggatcgacacaggggctaacacaaatcatgcgtgtgcacagtagtacactgatggatatgcttggatcggatcgactatcgattgtgatgctactactagttgatggaatggaagagctatcaaacgatcagtgatgatagtctagtttgcagtagttcatcagaattcaaaggggagggaaaagatgaacagcttacaaataatacactagtacctagctagtgcacaattaatggagtctgaggctggaagcatcgaattaaaagcacactataagttgatggtctctgtctactactgtgaccatgcatgagcttctagttctagttctaattctagctagctggtataaatggagagccccacaacaagtggtggaggc

SEQ ID NO: 98183 - DNA, 544 bp, Zea Mays
cccttatagtcgttactgccttctgccacgagtggacagtccgtgctccctgaccgaatggtccgcccctgcaagatcaactacaagatcacaatggtcagttacaatggctatatcaacgactataagagcattaaatgtgtcaccagatgtcagataaaatgcattacaaacggtccacgctttgcgttaaaattcatttttctaaacttggcaccttcgatagatcaaactttgaataggcgaacggtccgtgaattatagccagacggtttgcacatggtgtcagacggtacttgactcggctccgaacaagtcgtagtacatcttttcaaattgacatagttcctgtccgaatttagtttttagtgccccggacggttcgtaccttctgaattttggagatgaccttcttgaagtatttttctgatggacctgtgatcatatgctcatcaaactagttagttcacatggtcgtggtggtcatcaagcaccaaaacaaatatagaaatggctttaaagacaatttccctttcaatttccc

SEQ ID NO: 98184 - DNA, 437 bp, Zea Mays
aaaatagtgaattaacactggcggctggctttaggaaccggcggtgtaaatcatttctacgggcggttggctattggaaccgcttgtgaaaatcatttggtggaagcgcttccgtctgcagctgagttaccacagcccactaagtctgctttcgggtgacttctcgcattcgacacggcccgtcctcaaccctaacccgccgttccggtgtctccgccgtcacttcagacgctctagctccaccatcgcccgcatgtcgccaaggtaagactgttctccccctgtactccccctgtacacctccaactgagtcatcggcttattcatccgatttgtattccgtacgaccttgctcttgtgtttagggtttagggttaagggttcatcccaccctctattgactttgaatcagatcgagtttagggtttgtactaatg

SEQ ID NO: 98185 - DNA, 599 bp, Zea Mays
gttgacatgtggttggtaagacgatgacaaatttatgctttttaagactaagacctaggaatatgttccatcaagggaatcttacatctagactaggttacaagtcatcctccatttggatatgattatgtctaaaattggttgttagtttgtttttagttgtttatccatacctcatgtgcatgaacatgtatttggatgacaagtttatgtccctaggaacacgaatgatcaaacactagcaaccaacaatgatgtgtcaattttagatgtggagaaggatgatgagggcctaaatgaacatgcaaagtaccctagttcagagctagagtgtgatacaagttgaaagctttggtaatatgcatgctatgttccttgttcctttatatgcaaagataataaagataataaacttcaggagtatttatttttcatagagaatgtataagcctagttcaccaacatgcatttcatgtatataaaaatattacatgttcaaataagtaacttgtttatattacaattatttgaaaaggatattatgtttttcatgagctttagttgtccaagtactcaatcacacactcatacaaattggc

SEQ ID NO: 98186 - DNA, 888 bp, Zea Mays
ggagcagtggcccatgtattgattggattactgcagatgctttggctgatgggaaacaaagcactggagagcctgagacttgctttgtttcctaacacttaatccttctttggtttcttattgaattgttgggaacggttaacagatggatctgtaattgttttggaaattgattctacagtagcaagtatgtgcatataaatgtgaccatgcaagtaatttctataaggtaactgaaatccttttaattcttgtttacaatgttattttccgtcttcaaactgaaactatttagtttgtgtgattagtgttatttccaccattttttgtgaaaatggaaattatttagttgtgatcagtgctattttcagtctgcagttagtggaactatttcatcttgtgaccagtgttatttccaccatttttgtgaaactaaaacattttttcgcatgcaagcataaactctttccactattttttgtgaagtgttatctgtcgctgcctctatattcttcttgcaatgctactactggcctttttattgttcagctagctataatcactcatgggaatgaaaagtgatggaggagttactacaaccagatttggtcagacacatctggcaaaagtttgggcatcaaagtaattaggcactaactaatagattgtgtttcatcttgctgaatgtttctgtgttcagttcttgcaatgcttcattatttaaaatttatgtttcctgtgttcagttcttgcattgctgtaaaattgcatactgattaatgtggtcactacatatggcttgaactattttttatgatatgaaacattgttaaatatttgtagtcaagcattcaacagcccagaatgtatttcttatgaactatgcat

SEQ ID NO: 98187 - DNA, 456 bp, Zea Mays
ggcaacttggtccaaaagctttcaaaacgaaacttgtgttgtcctttgaagtcttctctaagattcagagtgaggggccaatgatctaagagctctaaggtattactatgaagtctatagtcaggataaagatcctcccaactagcagtacaaaacacatggtgtagcttcaatggagtggggacatctctctcattggaccatgtatatttcttgtctaccaaagggatttcctttagattcaaatcattaatgaatcttctgaaaggacccaacatagcactgttaatgttagcattatttttgtctttggagctgtaatttggttgaaatcactagccatcatcaagggcctacacacaaggctctaacatccctcagctccaagagaaaagcttgtttaagaatatcttgatgtggtccataaatccttgtggaccaccacttagagccgaa

SEQ ID NO: 98188 - DNA, 561 bp, Zea Mays
ggttatctcacctgaaggttagataggaacaaaggaaacccaaagccggaggcattgacgcaccgtcaaaccgtggggtactagcaaaaacaatattgagagcaaactcaagccccaaaggaggatcaaaactcgcgcccaaggcagtactcagtgaaacctcagctccgacagcgtgctgcgaattcccagcgcccgggtcactgacctctaaagtgatcggaccaacaagagcgacaggaagaatcgtcaacactggctccttggattgagcttggcaccgttgagggctaggtcatcctcggcagcaccctcgggggctgtgttatcctaagcgtcacccttgggagctgaagcaccctcgatcgtacccacaggagatgggtaaccctagcctgcaatgtcaggagccgatgtgttcccatgaactaggccgccctcaaaggtcgaagaagcatgagaaactgtctgggttatttcttgcccgactggattactagctgaggggatgtcatccgggacctctgtaagggtgacagcaccctcaattttaggaagctc

SEQ ID NO: 98189 - DNA, 620 bp, Zea Mays
ctcttgggagttgcggcagaagccttttgcaccttcggcagtgttgcctctattggagggctcaaaatttctggcattttcattatttcttcaatctttggctcttcattcctatcaatcttcatcccaactggctcgactgtaagcaccttcggcactacagtcggctcttcagtgctctgcgcaatcggaacagtttcttttgcttcggcagctaaagaggtccctttgccaaattcaggtatcacggccggttcaatatagcgtggccggtgagtcagaaccttcatattcttgcccttcggctcagctgtaatgaccggagcggcaatatttctcttttttacttgtcctcgcagtgggtagcgataatcaggatatacgaagccaatagcatcaaataccctgttcaatcttttcttcttccgacccccaaaagctacggacaatgcattatcctcggccttggagtatgccccaagtagctcgtcgctagtagcttcaatacacttcagccagtcatcgtttggctcatcaaacttctccccaaatctgaaggtatatttcaattggactaaaccaccctcactggaatcggcggtggtctctttcggcatttc

SEQ ID NO: 98190 - DNA, 483 bp, Zea Mays
gacgacggtgccggacacccttaaattggtctgaacccggagaaagatggtttttcaggcccgacatggttaaagagatggaagaaaaagtccaatggatcatacacaacttgaaagaggcacaagctcggcaaaataattatgtgaataagcgatgtcaacatttggtctttcaagttaatgatcatgtatacttgaaagtgtcaccaatgaaaggtgtgaaccatttcggggtaaaagggaaactggcaccctgatatgttggcctgtttcttattcttgaacgatacggacgagtggcataccgactttaactgcccgaaacattgtctgcagtacataatgtgttccatgtatctcaattgaagaagtgcattcagattcctgattgaaccatcgatgtggtagatgttgccttggaaccagacccaacttattcagaacatcccattcgtgttttggatcagaaggacaggatcaccc

SEQ ID NO: 98191 - DNA, 635 bp, Zea Mays
tgacgaggttccgagcagaccacatgatgacatctttgttgcggttgagacaggacatgagtctttcttcttctgcctccaagagatccgcgctgaccaggactgtttgattgggggtggctgtgtccagggggactgtttcaccccttcgttgctctatagttgtgcgttgatctttttccccttgtttgggtgaaggctaccggggtcttcgtgattagttgtgaggcagcatattgcgctggccaagaacaaaatctctttctatgttcctggcaacctgctggtcccgtatatggtgattgcaccctgggggcatgggatcttcatgcacaaatataattcgtgtatagctgcttcaagttttttgatggatgttcgccccatgatggcgttgttgggataaaccatatcgactatgtcgaaggtgatgtgctcacttattgcatttggtgcagtgctgaatgatatatagtggtaattgaattttgccgagtggaaaggttccttttcctctgaagccataaagggggttgtctgctggcttgacgaggctatgacttatgcccataaagtcgaaggcatgcaggaagatgatgtctgtctggctgtcattgtcaacaagtactttgtgc

SEQ ID NO: 98192 - DNA, 376 bp, Zea Mays
ctacgttgtcatccgtcgctcggcggctatctctaaaaaacgctggcaacgccacaagacactcggctgtcaactctaagagcgcagacgtggtcatcagtcgttccgacaaagacatagtttagtcatcactcggactctatttcaaatgcgtaaagtattgacaacaatagctcggccaccacctccaaagcagcaatatgatgcccaagttacatagtttctattctgaagaaatcaacttcacaaaagaagagatcaacttgctacgaaacaaaacaatggacacaggagaaggcgaaatcattcttcatttaagggaagtaatagtacttacaaatcaactcattatgagttgatactcccctactactac

SEQ ID NO: 98193 - DNA, 414 bp, Zea Mays
gaaagacgtctgccttttatagaagggcgtcataacctcccttgattcaatctgctaaattccaggaatcactccctggaatatctctacgtgcaaccgtccagagatctcgcacgtaacgtgtgtacccattactcccggttgacgtgacagtctaggtgtgatatttgataaccaattaaacaaaagacaaattaaactatcgtttagaacacattacgtcacgatcgcgtatcatcacaagtcacaagtaatgggataaataacgcgaaacgcgagcgagcgtgatagcctccatagacctttatttgtctcgtgtgaagagtaggaaacactcacacatataagttgattttctcatacctagacggtcaatatggaactaaagtcatgtcatctctacacaccaccttg

SEQ ID NO: 98194 - DNA, 688 bp, Zea Mays
ttccctgctttcacgagggatagctataatcagggtatacgaaaccaatgacgtcaaaaactctattcaaccttttctggcctcagccttcgaaggccaaggtcattgcatcatctttggcccttgtataggccctaagtaattcgtcactagttgcctcaatactgctccaccactcatcatttggctcatcaaactcgcctctatatctgaaagtatactttagatagattaggccaccctgactagacccgacagcagcttccttcggcatctcccactcattcacgagcggccatactctgtaggcgatatgctcttgaaccaagtctcttgtgccaaaaaagtacacacagtgttgaagcttctctagcatgcttctatatcattcccaagggtagtggctggcctcctgataccgaagcgagaccaaatggggcactgaataatccattttatatcttccctctcaactaagttattcttcacataaaaccattcttccatccatgctcctggccaccttttccgaaatgttggaactaggtaacttacatcagagcgaggcacaaagccataacaaccgaagttgttgtgatactgctccttgccagtagccttcgtttcatatagcagctcgtgcatattacagaagcattttgcgcttggctctagcccttggcttctc

SEQ ID NO: 98195 - DNA, 530 bp, Zea Mays
gccgcccagcaactccgtggacacgctaggacatggtgggatcatttcctcgccatgcaatcaacagacctcatggtgacatgcgatgaatttaaggtagcttttacaggacaacacatcctagctcgcatcatagaccgcaaactgaatgagttcctagctctctcgcaagggaaccacactatactctactacgcgcaaaccatcaacaactttgcgccagtatacaggttatcatgcaaactataatgaaaagaagagggataggttccggagaggcctcaacaacaatctccatgagcgtctcaacactgttagggccgacggttacaatgaactggtcaacttggccatctcttaggaagactgtattgtggctcacagggcagagaagaaaaggaaagcatctatggcaagaccctcagctcagcctcagtgcttcaagattgtctccaataatcacagcaaaggcccttagcagcaacaagggtgatcaggccacctccacagcaaccgacgcccaatctccc

SEQ ID NO: 98196 - DNA, 350 bp, Zea Mays
gctagaccaagtgcgcaccgcccctatggacatagccggatgcgcgaaggcacacaacctcatcatacaaactatagttacacacgtacagcgagggcatcacaccttacataggttcaaccttcggaatgattcccatctccctatagttaaatagcattatcctaagctcctcaccctcaaaaagacttcgcaactccccctcacctacactcgccccaaccgacgaggacaacaattcccgcttgccagccctgcccacacgaagtcgaccgccatccacttcactcactctacgcttcgccacctcccttcgccacctacgcccagcactcggactaggcaaaact

SEQ ID NO: 98197 - DNA, 701 bp, Zea Mays
gtcgtcgccatacataaggaactttggaaatcgtacgcaaatataaacaaaatagtattatgaagatttcggttaagtatcaaataaattaacataatagtatataacaacgattaattaatgtcatccacatatgaactagaaattgtaaaatattcagataaaagtgacgatgatccattatatacaaatatgtatgcatataaaattcacgctgatctagaaagaaagactgccctagcaatatcatcccgggatctgtccatggttcgatcatttgattgtgttgtcgatgtatccgatgcattttgcgatggctgaaatctagcatacctttctggaattgtgggcacataatcaggattccgatcacacttcacaaaatccaaatctaaagcatggttctctcgaatgtagttatgcaaacacatagtcactgccacaatcattttttgaacttccattttgtaagacggcattttcagtagcactctccacttcattttccagactccaaatgctcgctccacaacattacgaatacttgaatgcaaatggttaaagtgctcttgctcaccatttggagccggtcctctcctctagtcaggtacatggtacctttgacctttatatggtgccaagtacccaggtcgatttggatatcctgcgtcgacacaataatatttccctacaattaaaac

SEQ ID NO: 98198 - DNA, 450 bp, Zea Mays
ttcttgttccatttagtttgacccttttggtttctctatgaaggatctagccaccaggatccctctcgcccctgtgatagctcggggggcctctacacgcttcggctttcctccaccgatgcgtcctagtctccaccacttgacatcgtcgtctaggccatccagcacccgatgtcatgaccaagctcaccagtagtctagacatttcatgtagtaggggacattttgagggtctttgtcatgcttgtcagctaggccgacatacttgtctcacatttactacttcttctcgagatgtgcaggcttttgatctaattcattgtgttctctggacttctcttgcactcagtctttttggatataaatactacttggtgattttcgatgattttctcactttttctggactttttagcttcggctgaagcctgacacgttcgccacccctca

SEQ ID NO: 98199 - DNA, 863 bp, Zea Mays
cgcctgcggatatgatccatcgaccttagtcaaaacatatgttctgattgcagattcacgtggtctgtgataactctcctccgattaattcaccctgatggtgattcgcctcaccaagaggttcatcttgatgatgaaattcctagcaatgcgcgcaatatcattgtgctaggaatacggaacaacaaatcttttgtttttgggaaatgacaaagatcattattaaatgtgggagacaaatgtgtcgacacctatcttgcctctatagattgcaaagggatccaaaacaaagtcctaggcatgagtgctttaagctctcttaccgggtcattgataaatgcaatcgaggctgaaccaagaatcgcaaagtgaaagtcgcgaactttaagttcggacatttatgggcactattgaaataatgtgtggtgaatgcgatggttcaagtggtcttgtaagagacccatcccacatatgtgttgaataaacattgttctgctatgtaatatatctggcaaatggcatgaattaaaatatgcagttaataggatttcagaagatccgtcatgaggtccaaggaggactcataatcttgaattataaatatgcaacttataaatctcataccgaataatgcattcctgatgaatgaccactctcaggtgtagggagaatatctcctagttgagattatagttctcagatggaacctttccagaagaaacaaagtctatgttgaacactaaagtttgataatccctataaaggtataaagacccatacagacccgaaaatgaataagatgaggtaccaaaggacttgaagttcaccgaataagcacatgtgcattccacgagttttactca

SEQ ID NO: 98200 - DNA, 383 bp, Zea Mays
caccatagagcagccgaggctcaaagcaatcgaacatataaggaaatatcaagcataaaccataagatggcgagccagaaaagtaaaactcaagaacatagtgtcaggccacatgttatcatatttggagagcaattgatcaaaagcagggctggttctgaccagtcgaccatttgctttatatgtgctttacccctgcataccctttttgctttgtgtgggcactgacgcctctggccattgtccgaccgtccagctgagttagccaaactatctacttgagcactataccatccacgcgcaggtactagaccatctgcgatgcgcgagacaacaagctttgatcgactgcttgatcgtacctgcttccgccacctccggtc

SEQ ID NO: 98201 - DNA, 667 bp, Zea Mays
ctcctccaaaagtggtttttactggaatgaagtgggccaccttggtgagacggtctattattacccagatagagtcattccctttttgcgtcaggggcagtccggttacaaaatccatgcctatttcctcccacttccattcaggcactgggaggggttgcagtaggcctgcaggtttctggtgttcggccttcgttcgctggcaggtgtcacactaggccacatactgtgctatctcctttttcatccctctccaccagtatctggctttgaggtctaggtacatcttggtggttcctgggtggatggagtaggctgagttatgggcttcattgagcaggacttcccgtgcctctccttttggtacacacagacggttcttgaaccaaagaactccttgttcatctgccctaaggtccggaagttgctccttgcgagctctttccataagtcttgttgtctccgcgtccaggcgttgagccttgaatatgaggtcttctagcattggcttgacttccaggctaccgttgtctcccagacatgcatttagctgagctaatttcttcttccaatcatctaaaaagttggtcccctgtatcccgaaaggttttcggctgagggcgtctgctaccacgttggccttcccggggtggtaatggatctcgag

SEQ ID NO: 98202 - DNA, 386 bp, Zea Mays
atacccacataccttatcccttggttaagtaccctatcctagggtttaaggatcacttcaagttagcacatcaccactggttttgaagttttagcctagtggatgcactctaggtgtaacatacataatgaaatgtcaatgcatatgatgtcatgcccaagtttagttcttgtaacaccaggggtgttacatccttccccccatgaaagaatctcgtcccgagatttaaggtcctagggtatgtaatggaaaaggaaacacgtcacaacttctttcctaatttatcttacagagcaggggtggtgtgggggtttgttctaactttacaatagattacataaactctaaagattgcaggaggctaagaacttaggaaaatgcttctc

SEQ ID NO: 98203 - DNA, 918 bp, Zea Mays
gcgaagctggtgatgacggtaggtaggtcgaggatgctctggtgatggtggaacttgttctatgaagctctagaatggcaatgtgaacactagtggcaaggggagagagctatggtggctaggatcttgaagcgaggtgaccacagtatgctggggttgggatttatacgatcatgccatagattggagggagacaacaccaatggaatctagggaggagcgagggggaggaatggctagattgaatgaacattgtatccgttgtcgggtgatgtgcgcaaggacgacattcaggccttgcaggggtgagatcgacacagggggtgttcactattgaacaatgaacacgagcaggaggtcagggatgacacgtaggctccacactctagagggagagagggcgtgcattcatggattgcaactgaccagccggtcccacgtattagcaagcgtgggcatgggggactggcgttcggatgataaatgcggacctcgcccacgaccccctccctccgtgctcacatctagcgatcgtacgcattgaaacctcgaagatcggtgggtaggagattggtgagcgccaccacgacagatttgggcggtctgcactgtcgggacgctgttgttggggcagagaggatcactggtgcaagctgcttgcgatagaaacctcccgaggccggatcgtgagcagggcagcttctaattgctcgccatagtacgctttccaccgtcacccatgaccagaggtcgtcgccgcacaatccacggtaaattcgcccttaatatgttcgcattagcaccaggcttgaatagtaggattcagatgtgggttttgaggcttctcggcgccgtcatgggtcgcgccggcgatgagccgccgtgggtgcgggcggcgccaccgccttggctgtgcgg

SEQ ID NO: 98204 - DNA, 318 bp, Zea Mays
tggtcatgtcgtttggactaactaatgcaccaacatactttatgaacttgataaataaagtattcatggaatatctcgaccaatttgtggttgtattcatcgacgacatacttgtatactctcagaatgaagaaacacatgaagatcatttgagactagttctgcaaaagcttcgtgagaaccaatcgtatggaaaattctcaaagtgtgatttttggctgaaggaagtcgctttcctaggtcatattatcacagatggagaaatcaaggtagaccccggtaaaataagtgaaatattaaattggaaacaaccaacag

SEQ ID NO: 98205 - DNA, 717 bp, Zea Mays
cactcacgcaatttggctaaattttccatagtatttattttattttgagtaatgatgtgtcatattgatgtgtggtgttttacttgagtggacataaacacaatctaggtatcccttgaatagaggggattattggaaaccaggtatcacaaaaggtcattagctagcccaggtatcacaaaaggtcattagctagcccagtggaaaaaggtgccttacaaccttaacatatgtttggatagttctctctctcaatttggctaaattttccatagtctttattttattttgagaaatgatgtggcaaattgatgtgtggtgttttacttgagtggacataaacaccatctaggtatgccttaaatagagggtagtataggaaacctggtatcacaaaaggtcattagctagcccaataacgtcttcatccactagttaaactctaataccctctagtgtgaatacaacgcccacaatatcatagaaacgtcatttgaggtttaaaaggtgatctattgttttgaattctttatattccaactttttatcaactatatggtggaaaaaagttgccttacaaccttaacctatgtttggacagttctctcgtgcaatttggctaaatttcccatggtctttattttattttgagaaacgatgtggcaaattgatgtgtggtgcatccactagttgtactctaataccctctagtgtgaa

SEQ ID NO: 98206 - DNA, 335 bp, Zea Mays
catcttcttttaccattctagtggcctgtctacccacaacactgacaactctttttcttttctgcccttcggcgcccttgttcaaccgttcataatcaggatattcaaaatgtagagcatccattacccgattcaatcttcacttcggtcgggagccaaaggctgcggtcattaactgatcttcttttttcgtatagttccctaaaatctcattacacataacttcaatcgtgtctaaccattcttggcagggttccttgaagtgttttttgaatttaaagtgataaggcagccgaacgagttcaccctctttcttctcttctccaagcttcggc

SEQ ID NO: 98207 - DNA, 842 bp, Zea Mays
caaaatcttgaaatgggaaaaattgttttcttagtaattttagcaattggatggtgtggcccattgcttgataccctaaacttttgcaaatccaatcacgttctgttgaattactttagctctgaagttgtttctctataatgattgccacttgcagaattattgaacactgatggtagcagcagccagcgctctcatattaattatgttttgaagcaatgtcctgcactatgtagcagcgaatcagcagcctaatctaattgaaatggttgctttctctaattcacatactctaccatgttatcatcaaatatagattatttccgttgtccctatattttattctaagcatttttcctcaaaatatactatgaacaactcttgttatttaatctctaggtcagcatattgatctagcaatagttctaataagtgggtgttatggttggtattccatacaaacacagaagcaaaggagaagaggtccagcaggagataagtccagctataaaatagcttagttggttcaagtctgtttagatccggccagtttgttaggacctcccatttgttagggagtcggccaattagcaagaccttatcagattaggtcctagtcaggtccatttatatgaaacaatggatgaaataaagagattgatccctgcttccccgttttcccttaccttctccatcttcacgtctgcccctgtgttcctcgtcggccatcagcacggcacctcttcgtcgcccgtctctgaggccgcgaccggagatcttccacaagtacaacctgcgctgtagaagagcccacaccagtgggtttgtgattttgtgaagcc

SEQ ID NO: 98208 - DNA, 418 bp, Zea Mays
tagcaaagcttcccgtcttggcaaagaatgtgttgtcagcaatgcgtgccgagcaggtgctattggaggtcgaggggcaccccaccgtcgtctaggaggtgatcaacaaacgatggcgagaggagtgcgtgttgacggacctaagtgggctcaatgatgagtaggggcaggaaatgcatgccgactacgctccgatgacaaagctacaacacaacctgcagctatttgttgacgacgatgacaatgtcagcgatccagtgcaggaaggtgtcaggaacgaaggagtcgcaaaggatacatatattgtgccagggttgggccgttgctcacttgcttgtctaggcctagtgggcgttatctagttaatgtgtggtctaagtttgcaatatggactgatgtataaatacgtgtaaacaac

SEQ ID NO: 98209 - DNA, 375 bp, Zea Mays
tggggtccagcaatcccctcaatgcagatgactggcttcgcatgatcaagaggaagctggaagccatcagatgccccgaaaatcaacatgtccaactggctgctcatcagctttcaggaatggctttagcatggtgggacaccttcagtgaggccgtcagagatgctacctgggcagaattcgaaacagccttccatgagcaccatgtaccccaggggatagttcaactcaaggtggatgaattctgggagctaactcaaggtgggagaacagtcagtgagtatgtgcacaagttcacagagttggtctgttacgcgcctgacgatgtcagcatcgagtccaggaagatggcccgttttttgacaggactaagac

SEQ ID NO: 98210 - DNA, 553 bp, Zea Mays
cggtaacattcttagatgagggaatgaagaaaatgtgaaataaagcatcactacattcattaacaaaagatatgcaggttcaagaacaaaagtcaagcttaaccgatgttgcaagtctctaagaaacctgaaactatattcaattaaactaaacccagtatttcatccctcttctcatgaaaaataatccatcagttaagaagatgatcttgccaatattgaatccacaacctcttcatttttatcactgtacaagagtgtgtgggcttctgtaattaaatgtctactgttcatatcaataaagatgcatcgatttctaaattaagaaccttcatgaatacaaatgatacttttccacattatgaacgtaacttaagcatgctggagtgaaatctttaacgttaggattcagagctgatctactttatgtgaattcagagctaataatactatgtcatattatctgaagcctatggtcttcgttatatgaatttagtgctaacaatattatggcactgctcgacacctaggtggcacttgatgttctagtaga

SEQ ID NO: 98211 - DNA, 483 bp, Zea Mays
cttttgcaatatttacgtggcagaaggggtatcggctgatcagagccgttggatcctgtgccgagggcctggattagactcaacgcgaaccgatacgcacttaggaccgtccgatctagatctgacgctccttgttttaaataaccacacacgcgcctcggccgttggatggctgatcgatggcccagcccaaaccgtccccagtttctaatggtatccgttggatgagaatccagcggcacaaacttcatctcttcccatccatcccttcgcccgttgcggtggcacgacgcccgcatggtgacaatgatctggtgagaacccaatcccctgattccgcgcatgaaactccacgaaggatgataaacgtaagggagacgatgatgaattaacagggcaagcccttaccggtaatcgcaggacgcaggacgcctgctcacggcatcaggcggatccacggcgagaaattctagtcacgccgtg

SEQ ID NO: 98212 - DNA, 666 bp, Zea Mays
caaatatgattcaacgtgatggctcctgcctcatggaggaatccaatctcagcgaaaggatggagacggtggtcgagtcccatcttggtagtggatgggcaaagttgtatcgttgtagctctaggtgttaggagtatgtcctaactcaggtatgaccaggccttgagtcaacttgtacttatcccggatcgaccattgagtcacattggtgcacgcgcacaccatagcatatgacatcattatctagatcttctttaatctttcgagggcatgtgggttgcctttgcggtaggagtggagtaatcccatctaacaagagtttggtcatcatgatgttttgtgtcagagtggtatagattgattgtcgttggaactcgaccatatagatctagcagtggacctctcgaccactccagtgtaggtcttcttgtgtccaccaagtcttatttgtccaccaatgataggtgctcttcttgctcgatgtccaccatgaacatgaaccgagaccctgaaaatttggagtatgaatctgagtcatcatagttttccaagacggtgtgatgcctgagactttgtaattgatacctttttcatttaaagacattttggtgctaaaatatttgattcacaagattatatagggtgtgtttgggtgcagggccaaag

SEQ ID NO: 98213 - DNA, 933 bp, Zea Mays
gatacaaatacgcaaaaggtcaatacctccttttgtacctttaccatgttatggtgtactttccatctaagtaggcggagttccttttgccaaaaatttaagatttccatctttaaagttttatctctagagagcttcttcacacttttgcctgatcctttatcctgaccttttcttgttgctaagacaccaaacttagaacaagttatagtattgtggcacaagatgaagcttctattctagtgattaccaagagatacctattactcaacttgtggaggtacccaagtcctgattgctccatttcttgcttatcttcccttttccaccttgagactatatagtatcacacaagaaacagttagtctcaaaagacacaagttatgtgtgctcgccctaaagttgtgcatcaagtattcgaatgacttgcatcttgcacattgtagcgtcctcagaactagaggggatcacaacataccttggtctaggcataatatatcaattgcatcgcaaaaagataccaattgaatagatgacataatacaacttatgactagtggaaacaatgcatgcctcaagatatataaccttttaaaagcaacctaggcacgcttcacacatgatgatcattgcaacacatagaccaattgaaaaatgacaagatcatgcatataaagcacaatgtctaagcacaccatgattaagaagtattttcttaggtacaccaaaggaaacaacattttaaagcataaggcacctaagccaagatactaccaattgaaaggcaagaacatagttgtgatcacaatcaacggaacttcaagatattcaatgaaattgcatagttccattctccatacctttgccttttacctgaatgccatgagattcattcttttaggtagtgtgagcacctgatgtcacccatctagg

SEQ ID NO: 98214 - DNA, 387 bp, Zea Mays
caggatcggagggcggtgagtaggctaggattcattaaacctaggtcgtaagatcgtgatccgagggccatcctcgcttaccgtttcggtgtgggtgcagtctaatctgggcacccattgtggatcgtgttgctgagatatgaacttaccccttcgcgagtgaacgtttgcgtatgagaccctaagaaatactgtactaaacccgcagtccgttcctgtgactgccctgagtctgtggaaatcttgcgccagaccccctgcgcttaccagaaaatgacgcccagtccaaataattaataaaaccaggacaatcatttagaaaatagtttttagtacaaatttaattgcagaaacttgtttaattcatagaaaatgcatatgatctcc

SEQ ID NO: 98215 - DNA, 583 bp, Zea Mays
gtaatctcgttgtttccttgtaactccactcggtaatgaatctttacttcaacccttctattggaaccttatcgaccttacccttgattgttttctccactttgtcgtttcgtgagtcttgtcttaactatatcctttgttatgctttttaattattatcatatgcacccttgacacctctatatcctacattgatgtttgtctcatacctgccctttaaaatcgcccctcttccgtctcataccttctttctcttggtcgtaccctcttctttggctcgcgagtttgtaacctcatcctttgttgtgcttttacttcttattgcctttacccttctcatctctcaatcttaccttggtgattacgctatgttcgttatctaaaacctccaatctcccaccttagttcaagtgtggtctcttacttatctcacccgtggttatatcctatactttacctcttgcaagacttatcttatttctattcttgattgtacctagatttctggttttttatgcacatttacctcttcctttatatccttgcctattatcacctttgacccttgacctctctccatatt

SEQ ID NO: 98216 - DNA, 1665 bp, Zea Mays
attcgtattggaaagcatttgcaaaatctcataaattcggaagatttaagaacaaatgctagaagatattactggtccaaggtatgcatcgaagatactgcaaagttatatttgtcagatatttttttactggagatagtaattgacagtggcctgtttatgtaacctaaatatccagaaactgtaaaattcattaataaaacaggaatagataactactaaattagtaatgtcccttaagaattctgaaatctggacataagatgctacaatttgaatttgagtattaccatactaattactaaagatttaataccacacggtggaagacgaagtccatctttggggaatttgactatagtaatatccaaagtttgcattgtataccctgtaggttctaaggtgtcaaaggaaaatgaataaatggatgatgctcaatgaacaaggttttaacttcaacccattttacttcaattattctattgtgctgtactatacagtattactctcttatttcttttctgttcttttgtgagattactagacactgtttccaaaggcataagcatggtacagttgtagcctatacatgattctgcagctactattactataaatgttgcttgtgccctagagccaaatacatgcttaagctttacgaaatattcagttagtggaaattaagggcatgaatgctggttcttttttttctcaaatacgcaggtgagctgtgcagtgtgcactaatatattaaaaagagagaaaaaaaaccaaagggaaaaagatccccggtacagcagagctcacacaccccacctaggattacataaaataaaacaacgacctagagctctgttacacaaacagttctccaacctggtgggaggacagagcttttgctcctgccaaggaccaatacaaagcctcctcccttgccacccgtagggcgacagctaaactaggactgcacccataaaaaacacacttattcctatgcttctatacaacccaggcacctaagatcaccaatgagttaaaacatttttccatctgatcaggcattctagagctgctgctcctccaccaagattcaaaagagagatcatccttcagcggacagaactcctgcaaaccaccatctttgagaaactcaaaccagaattgcttggtgaaaacacaagcaaccaatagatgattaatattttcaggtttctgatcacacagcgggcagcgttccggatgtgatagcccacgctttgcaagcctatcagctgtccaacatctgtcatgctccacaagccaaataaaaaacttgcattttcctggtgcccaggttttccagaccctttttgttggctcaaagcctactgatccttggaagagggctttataagccgagctagccgtatattcacccgaagtgctgaatttcgaaatatgctgatcctgaataccatgctgcaaaaactgctcctcaagaacctaataaaaatcaaggatttcagcaattaaatgccttggactaggaagccatcaattatctaccatcttcctttcaatccttccctacttttgcttcctatctttaacttccaaccaagtccataatgtaactgatccagcaaacatacaattttattttcttgggactgcttgtgctctttc

SEQ ID NO: 98217 - DNA, 443 bp, Zea Mays
cgtagagtgggggaaccccgagttatgggccgccaccttggtattctgaccccgccatcgatctgagtcgggtgagtggtcagggaggatcgcgggatttgggggaaactgatgccccctcaatttgacgatgtgatgcctagggtggacagaattgatcgccgatgcatcacctccaccacggagccgccatacatcgtggtcaggctcggccattacctcatctcgggtaagataatttccatggagtttgccttggtctcctctacacgtagagccatcgggattggaggttggggcattggtgcgccaacacacgttactctggtgggtcaccaggagcaattgggccttgaccgttcgatctgtcgtatgcggtcatgaatagaagcgctgcataccggttcgccgtgtgagatctaggtcgctgatcttagacgaag

SEQ ID NO: 98218 - DNA, 278 bp, Zea Mays
gcatcatttcttctgtaattagattagaatggaagcacaaaattcactgtgctagcatggtactgtcacaaatcagtgctgtgaaattctttgtacaacggagtggagtgctttaatccactcgattcccttggggaagcagaggagtattcagtgcaactgtacccacaaccgagctatctgaaattgctaactcacctctgtggctctgtctcttgatacatcctagccgtttacggatagagtctattcatttgcccatcctggataacgggtag

SEQ ID NO: 98219 - DNA, 928 bp, Zea Mays
atggtgaggtattttacataaatcatgccttattgaattatatgtttttttggcatggacaaaacaatcaatataaataaatatataatttatacttgcattgtcatgctggggtttctgtttgatgcatcaaatatattcttgaaattcagaatcaaacttaggattgaaatgagaaagaaaattggaatgaagacacatattactggaattaaataaaggggaggaggaaaaatactaacatcgaaaatagtggcgtttatattcataaattggatcatatttgatactgggaacctgaacttcaaaataggaaatttgaatttgaattaaatattgtaaacttgaactagagaagagaatagaaatagaaaaaaaagaaaaagaataaatccgtgcgtttgggctgagttccctgattcggcccactagcttcatacgacccaacttcattttacatgcgaggcccacataactcccgcgcttctctccctctctatgtctgcctggtggtccccactagacaggttcccaccgcacggtctgcgcgcttgtggatgacacgtgcgggcccgcctagtcagtgtcttcctttgccacgcaggttgcatctagtggctgtcttgcgggccctctctgccaggtcgttcgtcctcaaacagaacacgcgaactccgtaacaaccctaggcgaacgccgcaatctccgatgatgatctctgcgcgtatggttcgaaagatcagggcaattccgggcttctgtatcggacttcgccgcttggctataaaacctaggccatgagctcttccataccatcttcattaaccaccgttgtgcgccatggtggggcatgaacagatccgccgctgggggtcatagtcgacggcgtgccaccgctcggtctctggcgattgttcggggagcttcg

SEQ ID NO: 98220 - DNA, 327 bp, Zea Mays
aagaggcacaagaagaagcaaaatcaacatcttagtaaaaaacaatcaatcatgtcattcattatcaagatttgcctcacccactatactattccttccactatggaaataacacaactaatccaaatccatcatcatcgtttagttatagccatatccaccaactttcctctacgattgtgtttcgataggctcgtcgattcatttcttatcttcccaacaagttgcagctagcaaaacgactataaaataatgaatgagacaagatcggttaccagatatattgtatacttggtgtgtatttgggggcccaaggcatgcagctac

SEQ ID NO: 98221 - DNA, 583 bp, Zea Mays
atgggtttcgctgactggatcaagagatatggaggggtgaagttgggtttgtctcactgctgaactccgagagaagatcccaggtttgacgtgtctagggcacgcatctcgatgccatcttcacacacattgcagaggggttagtttagaacaaaattgtcaatgggggcttaaggatttgagctagggatcaaggtgaacgcgctcaagttctaggtgaaggctgaaattcagaaatctgattttgagattccccctagggagctttcacttggagggcctttttggggtttttaataaactattttggccaaacttttataacaattgttgtagtttagttagtgtatttaaactttaataattggcctaagccatgattccatgtttttcatcgtctttttacccatttcttcctttctacttaagtggctaaattagggttgttctagggtttcaacatttttccctttttgaatacatcatatggtttaggcgtgattcttagataaaatacttagtggaacttttattctcaagttgattgatgtcttttgcccaatttggttcacatgaaatactg

SEQ ID NO: 98222 - DNA, 298 bp, Zea Mays
cataacggtattgtggatgcaccgtaggacctccccacatctggttaggtatatatggtggaggtggataggcaaatgcataagtgggtggataaactagtggataaattggtggggataggggcttaagttggtgaaggatatggctatggtggatgaataagtagtgtcgtccatggtatcagtggtgtgggtggaactagctggagtatcttttgggctgttttatttgcctgtgtttattttgctttcttgtctaatattggtgaatgaggttgctttgttggtcgatcctttg

SEQ ID NO: 98223 - DNA, 605 bp, Zea Mays
ggccaacaatgcctggatctccctattcatatcatgtgttgtatccttagcctggaaaacatggacaacatttttccaagtgatccaactgtgccctgggtccttcttgatcccaacattcttcatctcctttctcacatcggttgcttctgcccacctgggacaattaaaaacttacattaaatctgaagcacaatttatgagtgagtgcagcttgtttgaaaagaagggtatttaagttactttacctgccagcagatgcaagcatgtttgagagcaaaacatgattgcctgaatcctgaggatcaagttcaaacaacttctcaacagcaatccttcctagctctgtcttcccatgcatcttgcacccccaagtagtgctccccagacagaaatggaaggtctcattggcatcccctgtatgatctcataagctcgctcttccattcctgcacggcaaagcaagtccaccacacaagcataaggctcaattcttggttcaatcccaaacctccacttcattgtctggaacaactcatacccttcctttgtcaaacctcctctgctgcatgtggtagtcctctaagtcaatcgataccaaggag

SEQ ID NO: 98224 - DNA, 507 bp, Zea Mays
tttggctttgtcgcaatgatgttgtttttacttttaaaccaaaaccatcaattatgcgggttcttttcagggcaacatactggctcagattctggagattgttgcagaaagaacaacctcaacacgagatccttgcggtatgtcaatccttagaggtggtggctatggagatctttgcaagccatggatggaggtccaatgctagattagaaggagcttgatttgttgatgttttatttcaaagaatgtttacgatggatgattgtttttttcgatttgtaaggccgtatgtaagagattgcaaaaggctggaacattttgtttccataatcaaaaaaaattataaaagtatcccgattacgtgtgtaagctgcggtaccttccatatcaagtcgatccttcaaaaatatagccaactctacaccgcactcttacgccactacaaaaatgattttatatctgttttatttttagctacggagtgcacccgcatgtgatcgatcgatc

SEQ ID NO: 98225 - DNA, 503 bp, Zea Mays
ggagggagctcgaggaaaagaagaagaagccgagggggtttttgaatagtcagtgactcatgtgaatagtcccgcaggggtataagttaaagacttggtttaggaaaagcccaggggtctcggtgtaaactggtttttcttaaaacctttaaacattattcatttaaatgtagacatagcttgtaaaattcataacttcagttttatccaaccagatctggtcaaactaattttgctaagttttaaataatatggactacttaggaaaaataccaaacaccctaagtattgaagaaaattttaaagtttagatttaaatagtaaactggccaaaagctaaataaagaagggaaaaatagctacacttttagactggggttaagaaaaatcagagaggtactaaaccaccacctagcctgtttaaaaataataaacccctcagtacactagattagggaagggtttaccatttaaatttactttggttcaaaactaaagaaaat

SEQ ID NO: 98226 - DNA, 646 bp, Zea Mays
ctcttgcttaagctctctgacttgccgctccaggctttccacccgggagtttaggtgggtgcagtgggaggagaggtcatcgtagtggttgttgagggtgtggaggtatccggccatgtagacaatggtggggtcatcctcggtggggtctctccctgacagagcctgaagtcttttcctccaggtgggggtatttttgttgctgggtgggaaataacgaaggggggtttcagagatctcttggctgtagttttggcatagctgtttaagggcttttcgggctacactttggcaagtgtctgggaagcggtgtccggtgaagttgacttggaagggagggtggtttgggtagcttcggctttctcccaggtagactgccatagagcacttttccactccattttcgtggtattccttctagacatattcgggcttcttgcggatccccatgcgtagcgcgcaactccgtaagaggtgagggaatccttcttcccctgagcagtaggatgtcctaataacccaggagtcttccatctggtagaagaaaagaagggtctgttaatatcggggaaaggagagagtgtttcttggggggtaagaggtgttttcttgttaaggcaactttttaaggtcagggctgcggtct

SEQ ID NO: 98227 - DNA, 398 bp, Zea Mays
tgctccgtctaactagactctggtactaaacactatctaaacggagttcacaactacaagttgtataggtgaccaccacctccaaaagtaataagaaagctagcttgcatgatgatcttctagtgccacttgatcaatcttccaattccattagaatcagtctctagcttttccaaatgctatcaaaatggaagtgtatgagagtggggtcttagcaagagctctaatgttttgagaattgtttccaagcgtgtaaaaaggctccccacgactagccaccctcacatatttatagcctaagcaataaagcttgccggttcgactttaccgtcattgtgtacattgtgtagtctgttttggtccacccgatgatgttcaaaccattggcaaatggattt

SEQ ID NO: 98228 - DNA, 365 bp, Zea Mays
tgggtgccggccacttttatttgaagccatatgcatggacaaattaaatgtcgctcgactctttacacttgcagtaccctgcaaagcatggacggggtttgatgagaagcaaacactagtaaatgatgtcaggtacagttatagcctcaccgtgtatatgtatttatataataatactagtaaagtacacaggagtataggcgtatagtatagctaggtatgtagaggagctaggtatgcagacgaaatacaaaaaggatggaagttaatggctcatcactgtgaatcctgctgatccgctagctgcagcgcccacctctaggtagtgtgggccatgcatcgcattgcgtggttgcaagtgtcgt

SEQ ID NO: 98229 - DNA, 395 bp, Zea Mays
cctgtttcacacaccgagcgctttgtttcctctggccgccagcgctgctcgaccggattgatcaccaccgctcatgtatcctataaattgaggcctcagcttgctccgctaggtaaccgtgcgtccagtgaaaccactcgtagctccgatcgtctcccacagcgtcccaatttgggatttcccccaaaatggttgaagaacaccgcgaacccaagctcaccgtggtcagtcctgtctgaggaaatcccagccccactgctatctgttctagctccctttaggtgtcgtggtgctcactagctttggaattggaactctactgcagcagatcatcgagaacatcgcctcaccgttacagagcaccgccgtagaccgcctgcacgtgtgacggaacc

SEQ ID NO: 98230 - DNA, 541 bp, Zea Mays
cacaaacataagcagtagcagttaaaacaacaatatcaaatgtgatgcaccagactggacttcttgtttccaaacttggtttgacgatctaaaagccccatgaaaattattttctatttcagacatgatggcaggaaattacagaacattaaacatgatggtattaatgttgcatgtgaatcaatccaagtactactaactaataaaacaaccaatttcttattgatacgttaaatacttaaatgtcatagtatatagcaaatcagctaatcaggtactttaaattgtaatttggcaacctgtcagcacaaaatgagagttgctaatgggctgagatccaaactaaaccaacctcaatccataaaagcacagctacctcaccgaaccagtctaatccacctacaaatactcacaacccacaccaaatcaaactggtggatgggtgattgagccccagaccagaacaaaaccttggtttaaaactgctccgagcacatctagtacctagttgtgaatggactggaactgagtgaaaataaaa

SEQ ID NO: 98231 - DNA, 673 bp, Zea Mays
ccgaagtcgcctcttcttcttcttcttttcctcaacaggcgcagtcgggcggctaacttggcgaggacgctttgggcgagcaccctcaggcttccgagtctccactgctttgtcaagctcttgtctagccatgatagccatcggcttagcatgggtcgagtcggaagattccccagctaacatactaagcacatcatctatctctgcatcatctggactagctagcatctcaaagtgaatttgcttctcatcattgggaatattccaaagaggagcaatcagagcctcaatgtcctcgggagagggtcgcactctaagatccagaccaccatctctagcaggagggttggacacaaattcagaaattgacctatgaggtggcagattccaggcagaataggcaacaggagcaccaacatttgacactctgtcccttagaatcatgtctagtcggctcaccagatcctcagtaggaattctcttgttggtgacccgggtagagtcattgataccactgtacaaataagccgggtatgccctgtctttcaaaggttgaatattcttgaagacgaagttagcgaccacaacttcagcagtcaaacctctgtctttcaataagtagatctcagcaagcaacactttcgcctctgttacctccgaaggggtcggagat

SEQ ID NO: 98232 - DNA, 287 bp, Zea Mays
cgtaaagactccagaacacgttgttttccgattggcccgacttttgtcatagtttgttgtgcgaaaacgatatccattgacgtcatacccagaatatttcttgaccctataagcaaagctgttggctacttgtctcaactcggcactcatagacggatctctttggccctgcaagtattcgcaagttaaaagatgctaaattgagttcatagatggatctctttgacaaactaagcacgtaccttacgtttgaaccaggaaatgaaattgggcaaaccatttctcgc

SEQ ID NO: 98233 - DNA, 573 bp, Zea Mays
gaagaagataacggtttggttaggtttacgctggccctcaagtgtggatcgagtggtctgcgtgttcggacggccgcgatctaatcctgacggttagatcagtatcagacggccaggatcgctcttggcatccaggtcgggcaggcagatcttgtgcattgatccgtggatgaacggttctggggcgatcaagcgattttaaatccgggccaccgatcgtcgatcggacggttgccactccatacctcttcgtggggagtctggtctaatcctatccgcagattggtgatccaacggctcaaaatatacgataccccttcgcgaccgattaattgcaaaagagcccctcgctaacttcgaaataaacccatcgtccatcagtgggttaatatgagtctagggaatatttctatgttagcccccgtgctttctggaatttgacgctcggtccagtgaaccaagaaaataataaaaataatttggaaaatacttattaatacataaactcaataaattcatagaatagtcatattaaatcatttttagttcattccagtggcattaattttgtct

SEQ ID NO: 98234 - DNA, 543 bp, Zea Mays
gaagcttttctgctcgtagcttcggctgacagacagacaactttgctcaaccattatcaaacacctgagatatccgaagacctgctcgtctagctttcattgtacacacctgaatcataattatgtaggccccccaacaagtaaatatttttttgtacaacttggtgaatacgagaaaacaatactcggggcaacaaacaaaatcaatttggtaacatgttagaaatgtgttggtattctttttctaacaaaagttatcgatgtttgactaagaacacccattatgttttgaaacaaagggactgttacgacacaaacaaaaatcttgtcgctaatgcgaccatcatcagctctagcgcttgtcctacaaaaaaaatacataaatgatgtgtatatagctatattcaattttttcaaaataaaattaaacctcacgggcgccaatgcaaagcgacgaactggattgggggaaatggtggactgccacggcccagacataacggtaatgattgcgccaatccagaccagatcaactgcaaagct

SEQ ID NO: 98235 - DNA, 501 bp, Zea Mays
cagccacccaacaatacccactcccacaaatagattccgcctaagggagaggtgaggttccattgtgagtattttgagagggaggggcatttggctgctttctgctttaggaggaagagagatgagaagtgggtttctaagtagagcagaaggaacatgaaccacccttctcatggtgttcatgatcttcctattcagagacgtcttgcgaggcctaaaggtgctttgcctcatgctgctaggcctcaggcagtgagaccacatggtggttatacccgatggagtgctagtcgtgtgccatatggccaagaaccctgtggtagaggccttggttctcacttccctagcagaccatagtttccttctcgtggtgatcgctatccccctttgggactagggatgtttggtgtttttcctaacacttttcatgggaaaatgttgtagcaccagtatccttcatagtttactaacctcagtgttgtgccatttgctcacctcgtg

SEQ ID NO: 98236 - DNA, 1677 bp, Zea Mays
tcacatatatatggttactgagtgatttgtcgtttttaggttggaaactacattcacaacatggctacatttttcggtggtcttgtcattggtctggtcaactgttggcaaatagctttattgacattagcaactgggcccttcatcgttgctgcaggaggaatatcaaatatatttctccataggcttgcagaaaatattcaggatgcttatggtgacgcagcaagcattgctgaacaggtgtgtggcatactgattttgcaatttgagtaccttttctttcttttgacttcctcaaaacaaacaatatttacacaatcaagcttgaaactctgaatggtaatttcacaggaaaaatgttttcaatgctgggtcattaaacaaggataaactattaagatggattgaaaatatttctcaaaactgtcattatttttcaatgaagagcatgtttggactgaagatatttctttctgctatctacattttctccatgatactagttatggttgtgacacaatattggcaagttaaaatttatttttaaaaagcaagctttattcagttaacatgatgttgcacaatcaggttcgaagattggacaaaatgaagattttatctaatgtctattattaaatcatccaccaaactgcacctatatgtatggtcgcataataagactcaaggatctgttgaacttgcttgtaggggtgcatcattaggctaggtttctcacaagattgcctcttgaattttgaaagcgccacaagacaagggtaacagaaacaaataagcacacgcccgcccgcacacgcacacacacacacagagatgtatataggataatgtctgcatggagcacctaggccttgaaaactgcagagtgcagacttgttttaagtcaggcaacgacttggtgcattattttagctaggaaaatccactgtttctgttctactggtttactggaagctcaaaaataaactaagcatcaatgcttattttgcaggcaatcttgtacattaggaccttgtattccttcacaaatgagacccttgcaaaatattcttatgctacttcacttcaagcaacactgcgctatggaatccttataagtttggtgcaaggtcttggtcttggatttacatatggccttgccatatgttcttgtgccttacaactttgggttgggaggttcctgatctctcatggaagagctaatggtggtgaagttgtagtagcactgtttgctattatcttgagtggactgtaagaatgtagattttaagagtttgtttttagtttaatttaaaaatgtaccctaatattcatcaaagcttttaactcattgtagtggacttaatcaagcagcaacaaacttctattcctttgagcaaggacgtatagctgcatacagactatatgaaatgataagccgttcaacatctactgtgaaccaggatggtagtaccttgtcttcagttcaaggcaacatcgagttccgcaatgtctacttcagctacttgtcccgccctgaaatccccatcttaagtggattctacctcactgtacctgctagaaaaactgttgctcttgttggcagaaatggttcaggaaaaagcagcataattcctctaatggaacgcttctatgacccaaccttaggtattatcgttg

SEQ ID NO: 98237 - DNA, 478 bp, Zea Mays
agcggtcgggtcattacctcaagaatctgagtgtagcctagtgacgagttcgtggtggtgcttcccttctcctgctcttgaacaattgcagtcttcgttggagccgaagcttttttcgtgactgcatctttctcagcaataggattggctttttttcttcacctgacccaaaattggctcttcggcctcattctgtgcaaccctttttcttttctccctagccccagtattggccgaaggatcttcgtaatctagttattcaaaccctaggtcatccataagaccataaccctattaagccgaagcttcccttgaccctcgaaggcagatcgcatatcctcttgccctctagcaagataattaccgcacattttatttcatttctcttcaataaacttttgccacccagccaaaagagccttgtatgtggactgctctttgaagtcaaaagctaatgtaataagttcttcatctttac

SEQ ID NO: 98238 - DNA, 429 bp, Zea Mays
cgatggaggtcatcaaaccactctgataatctagctattaatctgattattgtcgaccagtgggatctattgtgatgtctagtacgatgccatgcattggctaatactagagcccctctctataacctttctaagtactcattagatcatgcactatttgttcaatgatacccttcctctcagtctgatattaccactatagtgaatagtggtgatgtatggtctaatgtctgccttgatatttatttgatgctcctattctcgatagcctaatgccctactgatgctgctgctagggttagccaacatataatccaatggctctatgcttccagtctgatgctatgaccaatgccccattgaaatttttaacttatttcttttctattttgcatctagtttagttccaagtcgtgccttggattttta

SEQ ID NO: 98239 - DNA, 688 bp, Zea Mays
gtgttgccatggtcctaggtctggccgacacgggcgcaatcctgtgcggggtgaaggttggttgaggtcttcacaccttggagttcattagagtggttctcgctgatgtcgggtgggacgagcctgcctccgtggtcgatgccctcggagaaagcctcttctcggaaggatctgtgatgtggtgtaggacaccttctcgatccacgatgcaggagagggatccaaagcggaaaacctccccgacgttgaagatgctcggagtgttcaagacgatagccatagagtcgtcgggaatcaacatcacaccccctacctggcgcgccacctgccggtgtttatgacccaactgcgcaccacgaggttccccacatgatgcttttgggtaggatggtgtcgttgattgcaactcgatggtacgtgaggatgcacgtcggatcacacgtagaggtttatacatgttcgagccgctagaatgcgtaacaccccacttcctatcggagatgagtctttgagtatcactggtgtacaaaggttgcagacaagccgtgagtggaggagagtgagttcttgtcgatctagtggtggtgtggttgctatgagagagctaatgagctatgaggtggtgatgagctaagatgtgatgtgagccgagctgagagatcagagatgaaataggtgttcgtaggcg

SEQ ID NO: 98240 - DNA, 550 bp, Zea Mays
ttttcttttttcatttcatcactagctttcataactatgtcatatttggcatttaaaaattcattttcatctttcaacttatcacatttagcttttgacttcctaatgatttgagtgtattccttgaggaagtcagcttgttcatcataggaaggtgaagcaaattcatcatcactatcactatcatcaataatatcattatcattttgtaccttccgttcacctctagccatgaagcataggtgagaagtcgatgagggtgatggtggtggtgaagagaagtccccagcgatggcggcaactttttcatcattttctttttcacttgaagaagacccacttgatgacccaatgtctgtgagccagtcaccaacaatgtatgccttcccatttttctttttgtggaacctcttgtgcttcccatccttcctcttaaagaatctcttttcctttttctcgtcatcactgtcatcttctttcttgcccttgaacttgttcttcttaggcttgttacattgatgagcaagatgaccaagctctccacagttgt

SEQ ID NO: 98241 - DNA, 420 bp, Zea Mays
tgacaccaatgtctatagcctctaagtaagcttccatacgaattttccaataaggaaaatcgtcgccatcaaaaacgggaggaggtccatccccgccggacatcgctactctagcggttaagctaatctaggagcaacaaggttttgataccaattgaaaggatcacgatgcccaagaggggggtgaattgggcttttctaaaaattcaacaacaatgaaaccctaagcaaatatttaaaccctaagctagagcccaacttcacccaactactagcaataagagaatactactggaaagacaacaatcctacttgctaaacaattgaacaaagtaaaatgcttgaattaaatgcgaaatgtaaagcaaggttgagaagactcctccaatttttgccgaggtatcgaagagtcggcactct

SEQ ID NO: 98242 - DNA, 393 bp, Zea Mays
gtctggcatacatggtagccattgtaaccacatgtattgcatagtgctcgtggatatgcctacgacatcatatgtggctatagtgatgtcttttgactgtaacatcatctcgtgcaataaatgtgaaggatgggagacttatctcagacactctaagtcgtgggatctagcggggcacatatggtgtcgggtccgtcctaccttggaggcgtattggaaagtgactagggttcatacataaatctcttggcttgtaaggccacagaatctagccgttatgaggctcgactctggagacgctaagatcctagagatgctaggcttccagcgctaagatcctagagatgttggaatctttttcgtttggctttaatctgtaccggcttctactgg

SEQ ID NO: 98243 - DNA, 403 bp, Zea Mays
ccttaagtggggttgtttgccttgcttcacttatccacattgcttgtaatgacctaagggtctgatttgagggttgctcttcttacacccattgccttaagcttcctgaagcctagcaacagagcttcgtactcaactatgttgttcgtacactagaattgcagcttagtatcatttgatgcttttactttggatggtgagatgataatagctgtagcactagccccaaaggatccccatgaaccatcacagaagattatacagacagcttcatctgatgcactggcttcatcttgtggaccaggtgatgaggacatcctacccgttggcgaagacacaattggcccagttagcccaactgtagtcgcacgacgaccgtgtgagcctcagaattatcccacct

SEQ ID NO: 98244 - DNA, 534 bp, Zea Mays
acatccgatacttgagaacgggttatagcatataaccagataataggatagaatcattaaaggatccaaatatttggatgataaggccacaacatgattcacaaggtaaggattactagatccaggtgaaaagagaggtcatcaacctagatggcttctaggttgagcagaggagaatttaatgaggattttggacaaggtttccaaaaagaatttgaggctaggtatggtttgcatgaacaggtagtaaaccattttttgacataaacaagtgcacaaggaatctttagtcgatttaggggtcaagctatgggaatctacaagttgtgtaggtgtaaattcaagtgtaaaacattcaagggctagaaacaccaaaacaagcacatgataatttttttgaaggttttacttgctaaccacaaggttgtttgggggcaaaaagggttgaacaactaaaacatttcctagatagcaagacaagagaagcacataacacaacctagtcaagactatcatgacacacaggataagaca

SEQ ID NO: 98245 - DNA, 701 bp, Zea Mays
gggtgacctaggaacactcgccaatttggcatgaacacactgagaacggtctgcccgcgtgcacggcggaaaacgtgaccacgagctcacattcccgttcaaccctggccgaattgaccaaacggtggccacgatgagcatccagtgcataccaagttgcgaaaacggcacttgagaggcgtagaaccttaccagagtgggctgtccacggacgagctatccacggcggcttagagacccgagttgggggaaaatggtgtcgcggcggctctgggcgaattgggggtggagattggggctacacggccgttaggaactgtagtttcaccgtgtatactcaatttgagaggaggggcggaggatgtgcgaatttgggcttggatcatcacacttggtggaggtgtgcataccccgccgtggatcatggtgctatttatagccacggcgacccgaccagctatctacggccacgaataacttcattagcgcatgcataccacatagggaagaggcacagtgagggagatcgaggcatgggtgacaccgcggcaaaagttactgagtcacgttggccgccggtgactaactccagccacgctcgactgggttcgcgggattgcgccacgttcgaagttatccatccccggatcgattcactggatcgcgcgagcccatcctattcaacaatggccctgatctta

SEQ ID NO: 98246 - DNA, 504 bp, Zea Mays
atcaagtagtatgacattttaattagttggtgggttatgcatagtagttcggtcgggtggtttagaaacttgatgtgcttctatccttattcccaaaattagatgtcttatactaatgattctaaactttgttagacttctggtgttcaacattagctaaggaaagtagagggtgggtataacttatcgttttcgtgatgttgtaactagatctagttaaactggaagaacgcgactgtaatatcccaaaaaaatgttgaccaaaagttgatcttcggtgcgtggatgtggggaaatggttgtgggccattggaagttcggagtccgctgatgtgaagatctcatttaaacgatatcatttgagtattcatttgtctgaatcagggcatggatgggggatttggttgtgagccgtcggtttcctagaagggcatcgggggcatcgctcactcctcttttcaaaaaccctagccgcccctccccttccctcatagcagcagccgc

SEQ ID NO: 98247 - DNA, 701 bp, Zea Mays
gccgaatggtccgcacggggtgccagacggtactctttttcttcggacagttcgtagttcatttgttggatttgtacagttcctgttcaatctgatcattggtactccagacggtccggggcagaggtctatatggtccggaacatgcatgttgtgcactcgttttttattcctgcaaatatcaaaaacaaggcaacacagtaagattaagcttcatcttttttgtccacccttctttgggaagaaggttaagtaaaaggcaaagatgtgattaaaatgaatgaagaaaacatgaagataatacaaagcaaattacatgggatatgaacacaagacacaaaataaggtcttccaaatatcgcttactacttcatacttttttcattattgaattagagattacatttatacctttggctctgcgaggcttacaaggggaataaagaaatacaactttgaagatggagttgtctgctttttctcgatccagaaaatgtcccaaatgcatgacattgttcctctatttataggcgcgaggtacaacttcgacaaaattacaatcgtgtcctcaagcctatacatttgaactattagacataatgagggtaatcctatcttttccccttgctatcatgttgagcaaactcgtgaagacttcttgaagcttcatccagctttgttgattgcacatatgcattact

SEQ ID NO: 98248 - DNA, 1078 bp, Zea Mays
ggttgggagaatacccaaggaagacgcatagggtagagcgaggagatagtttgtggggtgtagtgggggtgagattaggatagcacttgcagccgaaaacacgaaggtgttcgtacgaggggcgtttgccaagtaaggcgaagtggggtgtgccggaagcaagtgtctttgtgggaaggatattgagaagatatgtggcagtaccgagagcagcagcctagaaagtgggggaatgctggcttggaagagaagcgtgcagacgacattattgatggagcgaattatgcgttcagccttgctgtttggggggggggagtataagggcaagacatgcgtaaaagaactccatgggaggagaaaaaattgcgagcgttgaggttgttgacttcgcgaccattgtcacattggacaccctggatggtgacaccaaattgggtgcgaacataagcgaaaaaatttgtaagggtggagaaggtgtcagacttaagacgcaagggaaacgtccacaagtagtgtgaacagtcgtccagaatggccagataatatttatgaccagaaacactagtgattggtgaagtccaaagatcacaatgtattaattgaaaattgcgactggcatgtgatgaagaagaatggaaaggtagacgaacgtgacgtcctaactggcatgcatggcatatgggggtgtttttattcggggtacaagggatgacagaagaccgagctagctgattgaggaccgtagatcctggatgtccaagtcgttgatgccacaacgaagaggtggtagcatggagagaagatgccgtgctcctgagtgggtagagtgggccggagctatcacaccgaaggatcatgcgtcgagtgggaagatccttcacagagcagccaagagggtcaaattccacagaacaattgttgtcagtggtgaattggcgagtaaaaattaaatctttaatgagagaaggtgaaacaaggacattgttaagaagaaaattatgagaaagttgagtggtgccagtggaagtgacaggaagaaggttgtcattgccaacaacaatgttagagggtagatgat

SEQ ID NO: 98249 - DNA, 884 bp, Zea Mays
gttgaactgattggtttttacgagctcgatcgattcgtttccctggcacgcagcaagagagctgtcgccactgctggagggagacgtggaccccggagacaccaagtcgcagtggaaatgcttccggctgtgggacaactactgcgtgaagaacaagagatgcgtcgacgagtgcctgggcgtcgaggggaagggctacacccacggacactgcgagctgtggacgtgcgtctgttgcaagaagaatggcgaggatgaaatactagctcctggcgggcagctgggcggccctgagcagcgagcagaatcacccatcagtgtcaaacaaacgaagcgttaggggggaggcggggagctcaaaaggtttccacatttcgctgtattgttgtgcgtttgcgcttggctaaactttttgaggctacagatcgattgagagaataagacgtcataagtacgcagtttttggttcacccggcttctttctaagtgcacttgggaagttgggattgggtccagacttttgatgagcttgccgtggatgccttttctatgggctatggggacggcgtccctttcttgtttgtttctgtttgttgagagagagagagaggattgaaggagggcttcgaaagcaaagaacctttgcactggagagatctttgctgctatcagatgcacgcagcaatatgcttcgctatcctcaggaaacctcctctcctaggatcgaaatatcctcgctttctcttgagaactcctacgatcaccgggagcacataatagttccagagatcttgctgctccatctgcccagagatcttgctgctccatctgcccagatcccagcacgttcgatatcttcatgaccctcccatgatcttttttac

SEQ ID NO: 98250 - DNA, 595 bp, Zea Mays
cttggagacagtccgttgagcggtaggacttcattcgaaaggaggtccagaagctgctagatgtcggcttcattgaagaggttcatcacccagtgtggctggccaacccagtcatcgtccccaaggcgaatgtgaagcttcagatgtgcatcgactacactagccttaataaggcttgtcccaaagacctgtatccacttccacgtatagatcaaatcgtggattctacctccgggtgcgacctcttgtccttcttagatgcttactctggtttccatcaaatctagatgtctagggaagataggaagcatatcgcttttgtaacagtggatgagctttactgctatgttgtaatgcattacgatctgaagaatgccttgccaacatttgtgcaggcgatgagtaagattttcggggacctgatcaaggatagagtagaggtatacgtcgatgacatcgtggtcaagactaagagagggtcgaccctagtggaagacttagccctggtcttggacaagctgcgagcaacacgcacaaagctgaacccgaacaagtgcgtctttggtgtttccacagggaagttgcttgggttcct

SEQ ID NO: 98251 - DNA, 642 bp, Zea Mays
aagaaatagaaggttttatcgctgcggctagagagacatgcaaataaagcgtttgattatattgatctcctttactaaggctagagacatcactttaatcgaaatagtccccatatgagcaaattagacataagccaaagttccaactatcatttgtactttttggtgtcctgaaactacttaacattgttttgcatgtactagctgctactatataaactatttgtagaagcacattttctttacggtctagctgaggtggcactgttagacacataattaggcttagcacttgagtcttagaatcacatccttagacattcttacattgctacgggatcatgcgtgtccggcgtagcatgactagggttctatatctactcttgtgattgatcaatggaaaactgtcgtgagattactaaaatattccatgctattatgatatcagtttgcagtcacttgctgcgaactagcttcccctccacggtgtactagctagttacaacttttttcacgccgcctctccgtcgttcttccctctgttgctccatccgatgatgattgatgaacgccatgctacacccttgctcactgtctttgattccttgccaagtatatacactcatgttctctctgaaaagt

SEQ ID NO: 98252 - DNA, 828 bp, Zea Mays
gctaaagacagtggtcatggcttcgtcctctgccttcgtataagccccaacagttcatcactagtcgtctcaacaacttcaagccaatcatcattcggctcgtcaaactaacttctatagcgataggtgtatctcagataaaccagaccaccttcgctggagccagcggcggtctccttcggcatctcccagtcattaacaagcggtcacaccttgtaagcaatatgctcctgaaccaaatccctggtgccaatgtaagtacacactgtgttgaaggccatgaaacatgcttgaacttcatttccactttcaatcgaaggccaccttatgccaaagagtgatcgaatggggcgctagattatgccctttacatcctccctcttactcagatcattcttgacataaaaccattgcttcatccaagagcccagccatttttttcgaaatgttggcacaggacacctcacatcagaccggtacacaaagctgtagcattcgaagttgttatgatattgctctttcccaactgccttcgtctgggaggacaattcgtgaatgttgcagaagcagttggcctctggctctcctcatagcccaaatgaaaagtccaactttaatcaaagcttcaggagtaagttgataaaggtatatctcaaatgtcttcagtacttcgactaacatcttttggaagagcaaccaaagcacagcctttataaaacttctgaataccactacttcgtctccttcaggaagaggaatagtactctctccccagccctcactatggatatatcatgaaaatatttgcccttcatcacttcaatttgc

SEQ ID NO: 98253 - DNA, 328 bp, Zea Mays
ttcctaacaacaaggagattgacatatgtcgagaaatgatggacaacatgggttacccgaagcttgagcttgggctatccttgatgccgaaagatcatctagcagattgcttggcatacaatagcttaaatgtttgtgtttgcttttctcttctggctcttgataattcttttagatagagtatttacttgttttctttttgccgccattagggacttattttgagcaaagctttgaaagcgcagaagcaatgtgaagatgaaagcactcaaatagcctttggaaatatgcgctcagaagtcataactctttggaatgaggcccttga

SEQ ID NO: 98254 - DNA, 425 bp, Zea Mays
gtgtggccatcatatcaaaatcttaggagttggtccattttgccccgggctaactggataggctctatgtatctagggatagttgagactagtgaaataacactctataaatagacaggtgagctattgtggatagctatctcttttggcttagagcacttgcacctttcattttgttctcctagttttactcctctaggtggcattagtttagctggattgagaaaaccccaaccaaaataggatttctgatatatgcatggagttttgttttgctctggttgaaactttagaaatcatattctttccctgtgcacaaacttcctgtgaagtttgaggcgattttatacaattttcattgcgcggcactgccgtccccttgagcggcactattgatgcccaacactatcggcctactgtgcgac

SEQ ID NO: 98255 - DNA, 580 bp, Zea Mays
ccggatcctggatctgtcttgtggcggaaattagaggccagcagttggcaaaaaaacaacatcgttctcgttggtctttcggagcaagaaaagacatcgttttcatttcccctgtatggctctggctatatgtaagacagaacagatcacgatttgaccaaaaccaacccaatgctttcaaatctgaccgaatttatagtacaaaaaaatactggcatttataataatatagattaacatattgttagatttcctatggagtatacttctgtaataatccgatttggggacataaatatgaatactattcactgtaaatttggttcaatctggacagtagttgcattcttttttttggatggagggagacagcgagtagaagattatcttgtgtcaagaaaaaaaaggaacatatttgattcactgacagtgccatctactggagctaggcaagggaacctcaaatcgatttactggtgtgtgtgtgccaaataaatgctcataagaacaagatgaaccagctcaagatgccagtacacttgtgcaacctcaacaacagcatttctggatgtgctctaac

SEQ ID NO: 98256 - DNA, 323 bp, Zea Mays
gtttcatttgtcagttccaccatagccaagcactgtccacgtattgttcccctatcaactcctttatgggtccaagtagcaaatggtactcaggtggcatgcgtttcataagtgcttgcagctgattggtctatctagggttaccatttcacctctaacctcaagatattggatattccaacttatgatatgattgtggggatggattggctttccactcatagtcctatggtagtgcattgggcagataagtggctatccatgtcaacaaatggcaattctaaaaaacttttcggtgtgcagacatcacagacccatagtgc

SEQ ID NO: 98257 - DNA, 446 bp, Zea Mays
cgtgtcccttctactacgggatgtgggtatttatagggtagtcgagggtcggtgtcctaaaatacgcccgtacccccggccacgaactacattcctagaatatgttgtacaacatggtatttatagggctatgcacacacgccccagttacactaaactttccacccttgttaaccactggtaagtggggccactcaagagcggggtggatcctcatccgtgaggtagacatcacaggtgttggcttattcctgtcgattagggcaaggtcgctggaccccttcgcctagagaagactttcttgaagccctcactagaaagggccttcacttccttgcctggcccctcgcaggacgtaggccctcgcctcccgccaaggaaaaaagggaggcttcatggtagttccgagcccttgtccctaagaaggcttagcccctgtgtttttc

SEQ ID NO: 98258 - DNA, 474 bp, Zea Mays
gaatgagtgttgacatgtcataatctagcttcctttggggtctagcttgattcctattcttctttaatgatattgacctcttccttcttcggtcttggtctcattgattcgagattagtgtattttatcggagctggggagtatggttaagatagatatggatgagatagactacacaatgtaggtcaaaactttggttgatgtgaggtggggatagacagattatgcaatccatcatgactgtattggttgggttagatttcatgcacgtggctaagtaggtctaaggtgctaagttaagttatcgtctggttagtagggtctaatctcttcttatcagtatcactagtttgattaagtagaccacattagattagtttagtagatggctatgagttaaatgagattagtcagaatctggtttgattgttttgcttctaaatggttttggataggttaggtaacccattatgt

SEQ ID NO: 98259 - DNA, 406 bp, Zea Mays
atctcaataacatatttggggactcgaagacatttctttaacggagacacgtggaacatgttgggcactattggaagatcttctgacaattgttccttataagccacaggttcaccaaaacctttgtttcgaagcttggtagtcttcatgaacaggaaatggtagcatagaaaggcaaagacagatagcaggaatagggtggacgaaacatgtactaatactgctacatagggggcttaatttaaaattgtatgtcatgatgcatgctcgaccgattcgtcctcacaattcttgccaacatatagtggcgttcatgctctatggcggtggcatacctacactccgtcattgaatactagtcgcacttttctagggtttagttagtgtacctgcagaaaattgcatt

SEQ ID NO: 98260 - DNA, 461 bp, Zea Mays
gcgagatttggggatgaacacaagaacgcgcaagagtttagagtggtacgggccgctagagcgtaataccctactccactatgtgttgtattgctcgtgagcttgagttgtgtcttagatgacttgggtcttttttccgaactgtgttgtaacgttgcatgcctccccttttatagctcaagggggcacgtacaagggtactgagccccgacatgtgggcccagggacaaaatggagggaaataactaacgcctgcaacgttcgggcccaccccgagtgtagtaatgtccgtagtgtttatagcattggcttctcttggctgcttcctcagtaatacgcgagtcgtcatgagtatagtgtatgtgacagcaagccgcctgccaatagattgcacaggcacgccgcctgcgagctggcccagttgctgcctactagaggagtagagagagggcgcattaaat

SEQ ID NO: 98261 - DNA, 448 bp, Zea Mays
ctgcaagtcccccctcggtcagggaggcagccagatgtccgcacaccgagttggatagaatctctgaccccttcagagataacagaggctaaagtactgcttgccgaggtctgcttgctgaaggatagaggtctgactgctgaagctgtggttgctgacttcattttcaagaacatccagccgttgaaggacagggcctatcctgcttatttgtacagtggtgttaatgattctacctgggtcacgaacaaaaaaattcccactgaagatctgatgagccgactggacatgatcctgaggggtagagtttcaaatgctggtgctcctgtggcctattctgcatggaacctgccaccacttaggccattctctgagtttgtgtccaatcctcctgctcgtgacagtagtctgggtcttagagtgtgaccctcttctgaggacattgagg

SEQ ID NO: 98262 - DNA, 426 bp, Zea Mays
tttagaacgaggctactactagtaatgcttggtaaatataattgtgttatcacccagttcgggccattcctttgaacactagtacctccattattatttttccacgtgaggacaatagtacctccattttgttttttatatataccaggcttgtacgccaaatcttgtaataacaaacttttccacatgacaacaatcttgttatacatacgctacatgcttacatcaccgaaagtattttcttattgttgtgatgttactcgtatataatcgtaatagtgcttcacggaatttgctagtaaaaaatgagttcagaggccagttaaatcaaaccacgctttctctattttttcaaataaatggagcatattgatttaggacccaactcgcagctggaagatactttaagtttatagtaaacgcaag

SEQ ID NO: 98263 - DNA, 452 bp, Zea Mays
ctcgtctcggcgctccaccttagctctcctgtgatgtgattccccctccctacagctacaacttgctcaagcatgcgggaatgcagcagcagcgtagccggtaggcagtgctgctgctgggctggtagtggtacaataatgatgagagtctgctgctgctgggctggttgtacgatagtactactagtgatgagagagacgctagctagctgctctgctctacgttgctttgctctactctgtgtccccgatcaaacgagagggggatggcccactcagacgcagcagcgcccgactgtttgcatgggctataaaatggaccaccacctcaatcgataggaacaaccacgtcacaatcgccactaccctacccactagtacatactagagctgctgatggcctcaccctctgtttcgctgctcgtcaccatcatgttgctgctgttgttgcc

SEQ ID NO: 98264 - DNA, 407 bp, Zea Mays
tcgatagcatactgcgacaagtgattgaatttgttgaggtattgagtaatagtatctccaccttgttgtaacttcataaactcctcttgtttcatatgcagcactccttcggggatgtagtgttcacggaaggctgctttaaactcattccaggtgacttgatggttatcaggttgaatagccataaaatttccccaccaggtactggcaggaccacggagttgttgtgcggcaaacaacggcttctgcgtctctgagcatcggagaagaccaaacttttgctcgataacccgaatccactcgtcagcttctaagggatcttctgccttgacgaatagaggtggacgagtttccgagaaatccagataagtggtctcacggggaccctgcggataacctcttcccgc

SEQ ID NO: 98265 - DNA, 411 bp, Zea Mays
agctgacaaaacgcaacccaaagatgatactaagcaaatagaagttgaagctacaataacccgggctgaaaccgaggtagggcccacagtgcctgctgagacgaagcttgccacaaccgagcagagggccgaaggaataactccagatactaatatagcttttgagaaaagtgtggccaaagaagctgaatcccttactcccgaagtactctccgaaagttttgattatatcgttagacatgcttcgggaaaaagactatccgaagaagaaatttctgaagccaaacattatgcctgggaattgcagtatccgaagggggccctagtgtttaatggtacaaacgaagatgactttttgtactgcctcccggacaacaaagaattatttgtctctcgggagatggccagaag

SEQ ID NO: 98266 - DNA, 380 bp, Zea Mays
tggcggcagttgactttggagtctaaggaataaaataaaactaaccgagtccccctttccgtagattccaatcgacctgacaataatgcagcatggttggttagatctagagaaaccctattctgctccctacagcaacagagacctacagttacctgcctaattactagtaaccaactgtgtgcacacagctaaattccctagccactaactgtcaggcttggtagctaggtaggcaggtactactccagtggtaaacgaagcgcgtcaaacggcacgatccaagggctgcatcgtgatcacgtcctcgatccaagcgctcgctcgtcggtaatcacgtacgcaacgcccctcgccgcaaatccgtaatcccatgtgct

SEQ ID NO: 98267 - DNA, 1322 bp, Zea Mays
ccccctagtcttagccggaggagtcccgatgcaaagactggaccggaagttgcagaacgtcgacgaaggaaggcctttggtcatcacatcggcaaactggtgcccactcgggatgtggagaacgcgaagatcaccgagggcgacatgtttcgaacaaaatggatatccagctcgatgtgtttggttcgcatgtgatgtacggggttgctggacatgtaaaccgccgagacgtttgtggcctaccgcttgctcgaccatgaaaccagcaatttgctgaagaagacgtagtacctgaaagtggaacggtgggtatccgggcagccgtcccagtcggcgtccgtgtaggcggtgatggaggttgtcaaggatgcccgaagatgtaggccgagagatgtcgtcccccgaaggtaacgcaagatccttttcaggagagcaaggtgacagtcgcaggtatcatgcatgtgcaagcatgcttgctaaacagcgtacgaaatatccgatcgtgtcaaagtcaaatattgaagtgctccagcgagactccgaaacattgagggatcagccacctgagcaccttgggagccagataacttgctagcggtgtcaatgggcgtgagggggatggcttgcagttgagcgtccccacacggtccaagatgtcatcagcatatttatcctgagagaagaaaattttggtggcagaccgtcaaatctccatcctgaggaagaagtggagctcgcccacatccatgacaacgaattcggacttgagctggtcgacggtgtggcagagtatagtaatagaggaggcagtaagaatcatgtcgtcgacgtagagtaataagtatgccagatgaggtcctcgcttgtagacaaacaacgaggagtcagagcgcatcggccgaaatccaatggagacgccgaaatccaatggagacgacgaattgcgcgaatctatgaaaccaacgtgaggtgcctgtttgagtccgtaaagggacttggacagagcacatattgcgcctggcatggcgacattaacaaacacgaccggttggtgactgaacacatgttcctgcaagtgacagtgaagaaaagcattggagacatcaagttgtcgaacgggcagtgcctgttggttgctatggtgagcatcatccgaattgtgccaggcttgatgacaggggcaaacgtctcgctgaagtcgacacccggctgttgtgtgaaaccagtcaaaccacggacgacccatcgtgccttgtatttgttgaagctgccatccgggcaaaatttgtgcttgaacacccatttcccagacacaatgttgg

SEQ ID NO: 98268 - DNA, 553 bp, Zea Mays
gtggctgcacgctccttgtgcgtcgattcgccttcaggccagcttgtatgacatgtgaggcctggcccccatgtcataggatgggaaccctagtgcgcatcaggggagaccttgcccgtgacgcttcggggcgcgagcggggaaatatacctttaaaaaggggttcacccttcgagtagcagccatgtcttgcttctctcccactcgcggtgccctttcatcttcgagctctctgtgcccctttgccttcaaggtttctgctttgcgttgccgtagtttgccatggccttgtgactttatccccagcacacccaaactgagtgagtgctcgaaatggtataccacctgcttggatggaatgcaccggtatttgccgggaggacttgtgctggggtctctcctttcggcaacctttccgccgaagagtttgtgttctttgtttccaaactcccagcgggtcggtcccgtcgatcccatctttcttcgtgcagctgttggaggggcctggcccccgggctctacccgtggtgtcctgtttcattcttcaggcgac

SEQ ID NO: 98269 - DNA, 599 bp, Zea Mays
gcatcctggtccaagcatgatagtcgccaaagccgtccctttttcttcttctcctcctcaacagacgcagttgggcggctaatttggtgaggacgctttgggcgaataccctcaggctttcgggtgtccactgttttgtcaagctcttgtataaccgtaacagccattggttcagcatgggctgagtcagaagattctccagccaacatgttgagtacaacatctatttctgtatcatctggactcaccggcatctcaaaatgaacttgcctctcatcattgggaagatcacaaagaggagcaaccagagcctcaatgtcttcaggagagggtcgcactctaagacccagaccactattaccagcaggaggggttggacatgaaattgaaaaaggacttaggaggtggcaaattccaagcagagtaggcaacaggagcaccaacatttgatactttgcccctcaagatcatgtctagtcggctcaccagatcctcagtaggaattttcctgttggtaacctgagtcgagtcagtaatgccactgtacaagtaagttgggtatgctttgtccttcaagggctgaatattcttaaaaacaa

SEQ ID NO: 98270 - DNA, 524 bp, Zea Mays
aagacaggtccttccagtgccttttcccctaagttggaccacatgagaggggtctggcattttcgtccatacaatgcttcaaacagtgacatcttgatgctggcctgatggctgttattatacgagaactctgcataaggcaaactggattcccaacttctatcgaatgttaacacacaggctcttaatagatcttcgaggaccttgttgaccctttctgtctgcccatctgtctgagggtgataggcggtgctgaagtctagcttggtgcccatagctttctgaaggcttgtccagaatttggaggtgaactgggttcctctgtctgacactatctttcttggaatgccatggagtctgactatctctttgagataaattcgggcaagggtggctcctccaaaggtagtttttactgggataaaatgggccaccttggtaagacagtctattatcacccagatagagtcattccctttttgcgtctggggtagtccggttacaaaatccatgcctatttcttc

SEQ ID NO: 98271 - DNA, 322 bp, Zea Mays
gaattatcttatacatatatattgttttctactcttaaaagtatgtaaacatacttaaactagtaaatgaatacacacaatagcgtttagtgaagacgagactaattacaacaaactaggccatatatgtggagtaaaaagtctgtgtagtagagctcctatggaaggagagaagtgattcttatggttgaaaatgcttgcaatgcatgtgaatatctaggatgcaaaccctaagcatattgcgccaaaatgccctgtgcgtggagctaagggtgaatagctccacagttcatgttttcgtaaaatcgaccttatgattgct

SEQ ID NO: 98272 - DNA, 335 bp, Zea Mays
caaggttgtgtccgagttcccagatgtgttcccaaaggacctaccaggcatgccaccagagcgaaaagttgagtttgccatagagcttcttcttggaatcgcccccatctttaagagagcttacagagtatctggaccagagttggttgagcttaagaagcagatcgatgagctgtcagagaaaggttacatccgaccgagcacctcgccttgggccgcccctatcctattcatggagaagaaagatggcaccagaaggatgtgtatcgattatcgagctttgaatgaggtcacaatcaagaacaagtaccccttgactagaatagaagatctgt

SEQ ID NO: 98273 - DNA, 352 bp, Zea Mays
gaggagttcctttctcccaacaccgacgaggtcatcgtcttccttgattgcttcaagagaggtttcaatgtgtctttgcattggttcatttgggaccttttgtgttaccaccttacctatgatgggatcatactcctcttggcattcatatcctttcgtgagaattttgtggagtggacatttttcacaaattcttcaatgtgcaacctcaagacgagtaggaggtttcagatagtcttttgatcaggtcaagtgacaactctttcttctttcacattgacctaccttcccagaatggagtagctgaaaggcacaatcacactttaatggatatggcaacaagcattattag

SEQ ID NO: 98274 - DNA, 403 bp, Zea Mays
gtcagtatatatatggctagaatttgtagtaggctaaggatcggaggtggaatgggctgatttaattaatcagtgcaactatgtgttcatgatctgatacgtatacgtatatatcctaataagcaaaacaagggcgatttgaggccatggtgatggtttcctagcttgctacaataaggctacccgcagtcacggacttcagaggtcactctatccgtttacagtccacgatcgagtgtgtaatcagctgcagcgggtaacgctttcacctacgctaaaatacaggcggacagcaaaaaccccatttacagagtacccgtgcctttactctatctctctctctcctctcctcggcgcaaactaccgcacgcgcatacaggtagcaccaacacgtacagctcgc

SEQ ID NO: 98275 - DNA, 299 bp, Zea Mays
gtatacttctgatttgtgtatactgaattactgatagttgtgatctcatgtacttttgatctgtgtatacagtttacatatagttgtgcattgtgatatatgtaaagtctccatatagttgtgatgtgcaagtgtctgtaaagtctccatatatatgtgtaaattgtgtgatgtgaatctgtgatctaagttctaaggtgaatggataatggttctggtatttgtcgtgcttgggctagcatagactccttcatagaccgtgttttttgggctagcccgacacaatcgggccgatacag

SEQ ID NO: 98276 - DNA, 385 bp, Zea Mays
gcaagcgtgtggaagcctatgtagatgatgtggtaatcaaaacggagaactcagaaaacttcattaaggacttgcagctagttttcaacagtctacggcggtaccgatggaagcttaatcccgaaaaatgtgttttcggggtaccagtaggaaagttactcggatttattgtcagccaccggggaattgaggctaatccttataagatcgaagctataatgaaaatggaagcaccacggtcacaaaagaaggttcaacgacttactggatgtatggcagctctgagcagattcatatccaggctgggagaaaaaggtttaccattttacaagctactcaaaaaagtggataagtttcagtggacttcagaagcacagaaagctct

SEQ ID NO: 98277 - DNA, 283 bp, Zea Mays
gatttaatgggtaattgactaagacctttgtaacaagattaaagttggtttataggggagtaactttggtacagtcatcttccctggtcgttgtacaaaaattaaagaaacaacagcccaaatttgctctgtcagaactatgtcgagctgttgaagtgttactgaaaactaaattcaagaaaaggaatggtcacagtggaatggggccgaattggaagcaccatatctttgattccattcagttttggtccaaggatcctatagtaagtttgaagactgttga

SEQ ID NO: 98278 - DNA, 837 bp, Zea Mays
ggggaacaccctaccaccacaccctcgggggttgtagcaccctcaggggctggggccgggtcgacggggtgatgaaccactacatcaacttcctgaaagattggtagacttacctctggctctgccaataaactaacatcagggacctcatctaagcgatcaacacaaatgtccacaacatggacctcaggcagctcatataacaaggcctctgagacagcctcttcaaggtgacattccatgactgatattgctaggccctagattttcatcatccttgcggaacggcaaagctcgaagcatcactatgatccttcgtgcaccgctcatgacggaccagcggaagatccacttcctcatcctcctctgcctcttccacgacatatctagccgacttaccagcaccaccaccctccaccttatcgaccaaatcaacgtccaccccttcatcaccaacagtcggctcagctcaagcaaacaccgattgcatatctgaagtgcgtcagagttttctcctcttctgtttgccctccgagacatcagtctatgcatctggctagcttggtcgcttgtgcctaggacttgcaaggctatacactttctccttgatggcgcccggttgctcgggggctccgctcccctgttcaagctctgcagacttagaggactctccagccagcatgccaagaatggcttcaatctcggagtcatcatacagctgctatattaaaatatgggtctatttatcttcataaggtaggctccaatgagaaacaacaatggcctcaatctcatccacatatagttgtgccctatggctagaaccactgtattctt

SEQ ID NO: 98279 - DNA, 448 bp, Zea Mays
ctatttcttcgcacggctaggactccgacagcgctcgcgcacggagaagctccggcgagcaactgtaccggccgattggggtgatgaccggcgtacccgagcggcggacaccaaatccaagctaccccgagtaattcccctaagttaattgcacaattggtgccctattctagcctgcccacgagaaccgcgaagaccaagatcggttgatcgtgttcccaacgagtgggggtctcttagttcaaattggaggctcggtaagcatcacagggtgacaagagtgctcaaacaagggagggtgagggatgaacggacctagaaaggactggccgcggcgagcagtttcttgcggtggcagaaacctgatttggggagaactccaaattcgcggattccagtgaatgactgtggctgattcgtggtggctggacagcttactagcctacgg

SEQ ID NO: 98280 - DNA, 329 bp, Zea Mays
aagttacccaagttgtcatttcctctgtttgatggtgagtatccccagctgtggattgctcgatgtgaggcatattttgttatgtatgaagtggaatctgaggcgtgggtgcgaatagcgtccatgtatttttctcctgcggtgggttgctggtttcaggcattgcaacggagatatgttgaattgtgttggcctctgttttgcaaattgctgttggacggatttggcaaagaccaacagcagtccttactccgccacctgtttcgcattcaacaaaagggcacattatctgaatatattgctcagttttccactttgatggatcaatt

SEQ ID NO: 98281 - DNA, 652 bp, Zea Mays
ttgttactggctcttctataaaaaggtccatgtgtgtttgtgggtcacatgattcaaatggatgtcttgattttggtggattcagacagtgccaattcttttatcaatcaatccactgtcagtaggttgggtttggttactgtatcagctgctcctattcaagtccaagttgctaatgggggtctgttgtcttgttccatagtggttccgcaagctttctggagtcttcaggggtgccattttgtgcaggacttacaagtgttagcattacccacttttgacatcctctaggcaatggattggcttgaatactacagccctatgaaagtgcactggcatcaaaatggttgtgtattccttatcaagggaagcaagtagtgttgcacgattactctgatcaataaccaatagatattcttttgcacatcactcctgtcagtctgtctatgcctagttcatttgatgaacatatgcatcctaatatctctatattgttgtcctagtttgaagctatgttttttaaacccacattcctaccactagttcgagaatgcgatcatgccatacctttaattcaaggagctacccatgttaacatctgaacatatagatacccaccagctttgaaagatgaaattgagagacaaattcc

SEQ ID NO: 98282 - DNA, 433 bp, Zea Mays
tgaaacattggcaagtaaacactaggtatcaatatatcactaagcatactaattacacttctccaacctattcaggctaattcaagaatcacgaaataatacgtttattcacacatcctatgctctcctaaccaaagcataataataaagactaacaatattaggactcgccattatcagatacctacttggagcttagatagaaacacatcaactattttctcaactacttattttgactaatttgcatcacataccagtcacatgatcattacgacattctatggtctaggaggtagaatattattatttaggatcatagattttacaagaccacactttaaactctaaaggcttaaaacactaatgaacacgtccactaagtagaattcagattttaacttaaaaggtctaaacagtcgctaactcaaat

SEQ ID NO: 98283 - DNA, 496 bp, Zea Mays
atttatctgaaggtaggagtttaatgatgctatcaatttccagcttagaaaatggatgatcaagcccctgtaattgctcattggaagttaaaatttctgataggtcaaacccaatgtcagaaaagtcggacgaccccagtctgcacttgaaagcctcccagagaagatcagacttatgttcatgttcaaagaacatggtcccattgtcatcggtcaaagtagagattgaatttttcctgtgtttaatggtggcatgggcgtgaaagaagcgagagcagatgtctccctcagtagcccacctaatagccgcacgctgcttccaataaattttttgaatattaagcaactcagccactttttgttgcaggatttccctgaagttccattcctcaacagcaagatcccggtgttcttccatgatgtcaataagctcaattagcaacttaatgttcttcaccgttatatctatttttggcagcgatctctgccattcttt

SEQ ID NO: 98284 - DNA, 936 bp, Zea Mays
gcgaaagctatagacattagttcgtgttcccagtgattggtgggcttttagtttaattggacggtttggagagcatcaccagcatacagggacatgagaacaacgcgcgaattggacggtgccttaccataacggactgaccacggtggagtggtgctttacggtggcggagaccaatttaggggaaaaggggaattctccggctatggtggacaatcgagttgaagaacgggtgtgtgggcttcgtgatgacctaacgcagctgcccgggggctcaatttataggcagcttcgtcggtggcgcttaatttggccggaccgtgcgggcggccggagatgaggaagaaccttggcgcggtgaatacgtgtccagtggcgtggcagttgttccggcgatcaacggggagttagagggagtcacggtgatgtggtggcgcggttgggacacgcggtgaacaacggcgatggcacgacgacggtgagcagctttacccgcgggcggtgagcaagggggaatgaactatggctagccggagtggcttccaggtcaccggcggcgaagatatttgaccccgcgatgttatcgacttaccccgagcgtgaatcttgacgccggcgacgcgaatcacggcgggaaaggttaccggcggcgggatttttctgccgcgaccgatctgatccgctgggggacactgtaccatcgcgctgcttcatcagagcttctgacagtcaatgtttgggctcaattttctctcaaatttccatggcaacctatctgaggctctgtagcaaatttgtagagctacaaaccagcaacacttcgactataggggttgaactcatttgagcactggatcaaggtttaattcacactcaaagttgaccctgttacactgaaaagctgaatttcagaatgaaaccagcctgacagtcaag

SEQ ID NO: 98285 - DNA, 382 bp, Zea Mays
gttgactaagtcaaaacaatgattgatagtggatgcgccggatgacttgagtgatcgtgtggtcgtggaaaaccacagtctatgtgtaagtcggaccttgttgatcttggcaataaacaaattgaattggatgttgaattaggctaacctaaagtttcccacaacaatcaaataccacttcacaccttgtgcctaagagtgttttctattctatcataatttttgcatcctaggtcttcaccctattctagtaatataaagataataattgaattatgcaaatataaatgatcaaagtacggaacagttagaaacacaatatgtttgccaaggtatcggagagtcgatactcctcgctagtcctcgttagtgcacccgtgaa

SEQ ID NO: 98286 - DNA, 768 bp, Zea Mays
tacacatagtattaaggtgctgtcctccttgatttattgtcatcctcgatgcctcaaatgtggtctgatcatcaactcccggggccctcaaagctgctggtggagtaactgcctctacaacaatagctgtttgcatatgcgcacttgcatctgaggtaaactggttccctccttgttgttcttcctgcaccattattacgatatccaagcatggatttgttcgatgaactgatgtcggcgtcgtatactcactgattgactcgttaccccatggcgctgccatcttccagatcagattacgcccttcagccagccacgccataaccaatgattcgtactatctaccttttttggaagcctatgaatatttcctcttgaccatgcgcatatccattatcgtggacgcgatattcacggcgcatatcatttatccgctgaattctaggatcgtgggcgcgctaatcgtgggcgtaacagccatttatgcaatttatacatagatttatgatgtcgtaattgtctgtttaaatgtgcttccccaattttcgggttacacgtcaccggcccacgttcggacaaatggcccacgtttggttacgcatttctgtactaactattacacttgcgtaaatgcagtgcataaatgcgggccacctggatcggcccattcggtgcgaccaggctcggctcgtctacgtaacctcgtcggggctccccgcacctatctgaagcccagggcttccattaccatcagcctatatatatatg

SEQ ID NO: 98287 - DNA, 1342 bp, Zea Mays
attgggctgaaactggcctgggtcggcccatttactggcgaatgtgcgcccgcgcgcgcccgcgctactggttttgtagaaaggcccctatcggtttgaataactggaaacgagtcacggcgctatttctatgtctcactcacacgttacaaaaacatccaccgagttctatttcttcaccgcccgaagtccacgacggcgaacagcgcagggccgagctccggtgagcttgtaccggtcggattacttgatgacgggtgctctacttcagttgaaaccaaattcaaggcctaacaatcgtttccctcaactaatttcacgaacggcgctctaacctgctctgtccacggtgaccgtatgatcaacggccaaaccaacacgttcccggcgatctaaggtagcttagctcaatcgagttggtcgaggagcatcaggggcacacgagaacactaaaacgagagggcagagggtatgagcggacctgagatgagctaaccacggcgaggtcacactgctcggtgttcttgagtgatttaggggaaatcccaaactggggagttctagtggatgattcgaggcacgggttgcttctctggttgcacaattacatagcggagtgggtggggtcggcaatttataggcttccacagcggtggtgtccaatttcatgaagatgtgctgttgaccggagaggaagaaagttactagcgctcgggattagtggcttcaaccgtggcaagctccccagtgatcaccgggcatgcacgatgtgattcactacgacgtggtcaagcgctttagcacgtggcgcatggtggtaatcggccaacggcggcgaggtctatccgaccgattcgacgagcaagtgggtacggtgagcttagctgtgaccgagcctgagtcgatccaggcgccaagatctttactcgcccatggttatctgcaagtcatggcgcacgaatcgcagcgaccgacgtgaatcgcggtgcgacggtcaccggcggcgaagggggatgaacttggaatcttgttcagttactgtaccatggattccctattcagtgcacctgacagaccactttgcagtgcttagatcttaggtttttacatgacaacttattgatcggtcagtagcaaagttgttgtccaatgatccagctacaatcttgctatagcaatcatagccaaataatgactggatcatgatcaaatccaagctcaaagattgcctaatctcactgtcaatctgaattcagacttaaagcagtctgatagcttgactttgggcacatttttctccaaatttttgatgtgaccatggtttaattcctatagcaaagtt

SEQ ID NO: 98288 - DNA, 743 bp, Zea Mays
aggagagccctaaggggatcctcgtagatgccatgatatatgccacgacatctgccaggcctcgatttagcatgccttcctagaaatcgccgctggtgcaaagcccctcccggggcggttgaggtcccaccgccgagaggcggggattgtcgcgatggtgaacaaggcggttacgccgaggcgcttggcaaacacatgttgtaatcactagtgtccaccaccgcctgatctacggtggggctgacccaccatgattctcttaggcaagccacaacgtcgcagccactattgcgctcctggacaaactccccgaggcagaaaccccaagcaaacaaaggtcaacaagaaatccgagtccccctaaacctcaccatgcatcagcaggccgagagttccatgttgcgacatcaggagccatggtctgaccagtataccgcgtccacaccagcgggagacgacaccttgatgggacaactgcccgagcctaaggaagacacaacacgggcctcaccacgtcggcacctaaggttaggagaaagagcatggagcgcgcctgacctagggaactgtgagggaatgcagaagggctcggagaacggccattgatacaaccggcgccgcgagggccgcttcaacggcgatgaggaccgaagtttgagcccccactaccaggacctcaggcctttagctgtcacatcctctgggtgcgagtcccacagcggtatagggcccccgccaacatc

SEQ ID NO: 98289 - DNA, 658 bp, Zea Mays
tgttaagaagtttacttcatgtctatgtgacttatggatgatgaattgtttttattttctatctaaagaaatcatcattcatcatatactcccttgtgctattaacatctttcttgagtattttcaataagtttggaaggaaaaagaaacaactacaaaagggaggacactcacatgaaagagaaagacataaagagcaacaacacctacttggataatgagatcctcaaaacaatcaatggtgtggttgtaagcactctaaacctttttcatggtgagaatactaggcataaattatttattgcaaattttataagccttgatcaaaatgaatgacgcttctccctatttgtctttaaaaataagtgcatctatccaattcattcaatttcttgatgcatatctttaggaggagcctatttctatatcttgatcatatcgagactatcgctttatcctagtaatctcatatagtctcttgcatgagaataagtttctcatgatgtatgctactacatatcaatccaacttgttaaaataatgtcgctcttatcaaggattgttgctttcattgctaaagtagcatatgtactagattctcctattctaatgcatatgttgttcttttgatcacatctgtcgtttgtttgatcattga

SEQ ID NO: 98290 - DNA, 802 bp, Zea Mays
attgacctttcgcccaattatcgagcgatagaggtaaaatgactgttcaagatgaagagggacgagcatgggccgttgactaaacacaagttgaggctcatagtaggtctacgtgcaatgacacgacatccgactacgacaaggtgttcatgtcagtggttagaacagactcggtgcgcctgaccattgcaatcgcggcacacgagggatgacattgcaatcgtggcacatgagggatgataggtgcaccacatggacgccgagtcaatcatttttggacggcgacttgcgagaggagctctacgtgaagcagcagccggttttggcatcaccaccaaggagcacaatgtgctcacgcagtcacgctgcgaaagacgttgtacatactacatcaaacaccacgcgcctggaaggaaaaaagggtggacgacattctgatgtcgttcggcttcaggaggagcctatcgaagcacgccatctacatcaggtgaaacgatgatttgcagatgacaatatccaccaaccagtataaaagaactctgatcttatacgactgcgaaggatgatgctagctagctgcaatatattgaaaattctgggaacaaacccaggcctcccgatattaccttctgaagcacttgtttttgagcgtgtgctcatcttcttattcagtgaacgatgatatgcgatacacaaaatcttacaacttggagcatataatctttcggcgtgcacccacaattaaaattagatggaaaaaaaagcatagcgtcgtggagcaattacaaaacagtacgataca

SEQ ID NO: 98291 - DNA, 418 bp, Zea Mays
aacacattgaggagtttgtgcaatcttgccttgtctttcagccagcgaaactagagaggagtggatatccagggctgctatttcccttgcctatacctgaacattcatggcaagtgattagtacagacttcatttctgggttacctttatcacatcattacaactgtgtcatggtggttgttgacaagctatcgaagtatgcccatttccttgctctggcacatcccttttcagcactatcggttgcaaaactgtacatgaaggagacttatagactgcatggtatgccatcttcgattatctctgaccgagacgccatctttacaagcaagttatggcaagaattgttcaaactatctggtaccaagttatgtctaagcagcgcgtaccatccgcagtcggatggccaaacggaaag

SEQ ID NO: 98292 - DNA, 616 bp, Zea Mays
tttgctggacttgcacttcatgcatacgcgtcttgtctgcatggctgcatctcgttcaacaaatgtacagtgctggtcacttgacttgaaaaatggtgatgccgttaccgtagccgcaccttattgttttgggatgaacgattcgctgtcaatgggaaactttgaatacacatgcccaaaaaacaatttgccctgcacattagaaactgcaaggaggtaaaattcatgcaaaataaaaataaaaaaattgacctgcacatttgaaactgaaaggaagtgaagttcagtaatcaggtaagacaaactggcacgtgccacagcaggaactgaagtgctagccactttggcaaaggccgtaatggcgtatacataaatttgaagccacaaactggcacatgatctatctcagtatctggggtccaagtatgacctttcgcataggagatgttgcccccacaacgagaaaagcaaagcttttcctggtcggtttaaaaggtctgggccaggcaaggcttagggtagggaccagggcatgtgttcgtctagttgctttcgctccgactgccatatctgctcaccagctgacgtgcatatgcttgctctgcgtgcatataga

SEQ ID NO: 98293 - DNA, 515 bp, Zea Mays
aaggcccagtgcaattgtatgaacatggatgcaagggtcaccaccctatgtgatgagttatgcaagttgaacctagaagtcatttcctccggtgctttaagttatatttcagtggagcccacattacaagagcaaatagtcatggcacagattggagacaagggtgttcaagtcattaaggaaatgatcaaacaaaaggtggacaaatacaaatgcttccgtcaggacagcaaaggaatcatatggtttggagacagattggttgttcccaagaaccctgagctcagaaagaagatattggaagaagctcacctctcgaaattctccatgcaccccggcagtaacaagatgtatcatgatctcagatccctatactggtggaccagaatgaagagggaaattgctaagtatatatccgagtgtgacacctaccagagagtcaaggccagtcatttgaaggtagcaggcactttgcaaccccttcccataccatcttggaaatgggaggatatttg

SEQ ID NO: 98294 - DNA, 678 bp, Zea Mays
taacggagcaatcggcttaagtcgacaatgacttaagacggtgcaacatgctcacacttacttaactcagggtgaccactataccctactaacggagcaatcagcttaagtcggcaatgatttaagacggtgcaacatgctcacgcttacttaactcagggtgaccattataccctactaacggagcaatcagcttaagttggcaatgatttaagacggtgcaacatgctcacgcttacttaactcggggtgaccactataccctattaatggagcaatcggcttaagtcggcgatgacttaagacggtgcgacatgctcgcgcttacttaactaagggtgaccactataccctgccaacggagcaatcagttcaggctggtgatcactatacccccgacagcggaacgatcgatttaagctgacgacgacttaaattggcacgacacattcggcacgttcgcaactattcatcctagggtgatttctatgccccacgaaaaaattcaaaaccatcatgatgcacttacttttacgattgtagataccgtggaactttaacaaaacaataacagtattcagcgccgaaaagtgttttctaacgaaacatccaagaacactaaccatatactcaaggcattcagtgttttctatctggaaatgtttttctcaggagcga

SEQ ID NO: 98295 - DNA, 1816 bp, Zea Mays
gacgagctcttgcagcagaccgcctccttcgccgccaggagctacgcgctcctcccggccgacctgttctcaaaggcacgggaatggtgagacgaccgtctccctgtttttcttgtgttccttctcattactcttcttcctttgaatggctgtatgataggcaatgcctcgaattccccacgagtttcatgtctgagcgggcgtagtactcagcaatgcgtaggatgatcagctcatattgacctacatgcctaatgacaggcctaggtgattttaggtagtcagctgcctgcaattctgcacaccacgatggtaaccctgatatacgatttcgtacatcgaatatgacattcctaggttttcaaggcgttagacttgctgctgggtacaagtgaggaggatgatctagggtaactgttcattttcacggcggcgccggttgccgacgattggttaacgtgcatgttgttcgcgcggcaacgagagctgttttccggttggatggatgtgaatccctacatgttagtgttcggttattccgacattctagtaacggctgcatttaaggagtttccaaaaggagcccatagtgcaacgctggaagccttcttcctttgctgagctgtgcaataaagcactggttctttcctcacgtgtcagtactttgaacgccgatgtggtcaacgcaaatgcaaagcttgtggtgtattaataggctgtagttgctccaactccaaagtttaagttgccttgaaggggtgcatcaaaggctcaagcaactcagagcaagaaatctggcgttgccctgtggccttcaccaggatggatggctgctgacagtaagaaatattgtgctacctcgcggaacattttgaagtctaggacaactgaaacatatctttctgactggaagaaaccctttggattttagtaacatcttattaatgcagtgttgcattgtatagttatcttaaggctagcggtctttaaactatatatgatcagctgcctgagtttagttctcatttatttcttttacttacatgatgatttgactattttcttatttttttccttgcaggtatattgtgcctgccaagtctgcagtcaaaaacgtgtcaccagctggagagggctcagtaaatatttaccccataatgctaagagtttcagccagcagagatacatatacactaaccgtgaagatcggcaaaaaggtgcacacaaagtacttgtattcttgtagtttgcaagagttctctctttttttttaaagaaagtttgtttacttaatgatcttaaccattcccttttaagcaatgtatcttaactttgtgttttcccctcattttgatacactcaggacaactcaactgagaactttaagagagcatgcaagatcctgactgcagactctgagccggtattcctatgagaattcttttgcccacttactagtaatggtaaatagccgaagttatttttcttgtattgcatgtttgcaggttcacatatgggatttctctgggcgaacaacatacatagttatgactgaactgaaccggtcgccccatgactcaaaatctgcagatcaggaggtatcttcttctccatcaagtcttccatctcatctcatactcttacagttttgctgggattgtattgttctggtagctacttttgtcttttttgttgcataaaatgccaatgatgattttttatgcttcactttagttctgcttaccaccgactgcagaatgtctagtttgtcaaggttcttatcttcttttctgatgtaggtgcatttaatctgtac

SEQ ID NO: 98296 - DNA, 398 bp, Zea Mays
aatgaagatgaccctaccataatctacatgttcggatacctccacacccttgataaccactttgatgaccttttctccaactgcacccacctaaacttctgggtggaaagcctagagcagcaaatcaaggaattgaaggaagaaaaggcggctctcaaagatagcctcgagatggcagaaggcgagtaagccaacacttgtgaggcataccggaccctgaagatggactatgctagaaggctaaagaagctcgcccccgtcaagaagatcaggaagcgtttcaaaagccatggatgccagactgacccaaaggaagaagccccgccagcactgccttccctagggatagagaacctttctgacgtcgaggaaatgtccctggctagccttgatgatct

SEQ ID NO: 98297 - DNA, 529 bp, Zea Mays
gtttcctctgggactttgaattatatctcagtggagcccaccttgcatgagcagataatcatggcctagattggtgacaaaggtgttcaagtcatcaaagaaatgctcgaacagaaggtggataagtacaaatgcttccgtcaggacagcaagggaattctatggtttggagaccgattggttgttcctaagaatcccgagctcagaaagaaaatattggatgaagctcacctttccaaattctccatgcaccccgatagtaacaagatgtatcatgatctcagatctttgtactggtggaccagaatgaagagggaaattgctaagtatatatctgaatgcgacacttgccaaagagtcaaggccagtcatttgaatgtagcgggtaccttacagccccttcccataccatcttggaaatgggaggatatttgcatggactttattgtgggattgcccaacacctctcggcaccatgattctatttgggtcattgtggatagattgaccaagacaactcatttcttgc

SEQ ID NO: 98298 - DNA, 351 bp, Zea Mays
attgcttcaatgcacggtaactctacgatcaaaaagtagaagtaactctaggaagacatggccagatgttgttccaagtgacatgaggtcaagcacaggtcaatggccacagatgatgccatactattacatatgcatagttcttaagacgacgcctgttcccattttgtgctctcggcgaattgacgaattcaggctgagttctagatggctttgggaatagcaattggatctccattgtctatctgcagtgcttgtcagtcttggagcctaccagctcaatgaatgacaattatggtaggtgagcttggtcatcccatggatgcagattaaaggtggttggatgatcaa

SEQ ID NO: 98299 - DNA, 407 bp, Zea Mays
cggtgaccttccccagggagaatatgctccccatcaccaccccaaagcaagacagtctgacctagcccataacctggacaactactaccctggacctaccctgcccacgactacgatggagatcaaggtctggtgagctctattcctgacgacaaagtatggtagagcttgatccctatgcacaacaagctttggtgagacacaagaatctaagaacaatgggggagaggacccaaggaacatccgaaagggactgaccatggtgaggaggcttgctgtggtgaacttcgatgtcttggctggcgttcacgagcaacaacgacggtagagctcaaacgaacaacgaagtgagcaaaggagagatataaaggagctagaaaaagtgataaccaaggagaacaccggcc

SEQ ID NO: 98300 - DNA, 283 bp, Zea Mays
gacgaacgagaggtccatttcgaggtgcccttgaaccctagtgatgcagatataaatgccatgcttgatttgctagttgaggattcttccgacgctgctccttctggtacgttggcagtggtgcccctcccagaggttgatacaactttggatgttcagaaacctgtcagtactcgcccgaggcgccctagccgaaccaatcagcctgagccttctgttgatgagcaaaagaagaaaagaagacgcctccggcgagtgtccagctttgatggggacgctggta

SEQ ID NO: 98301 - DNA, 409 bp, Zea Mays
tttcggctgaaggtgtaaatttttcagagctgactccaatagaatgaaacacatccttcagccgctgcacgcatcggctgccgaagcttaggcatttctcttgaagctctttcaaggacttttgcaaatttgaattcttttccatctcagttttaagacttgcttcaaggtgtttcttttcctgctcagatttttctagttgtttgagcaattcattctttaagctgttattctcggcttggacctcagccaaggagccttccatggactgaataacaaagtctttcttttctaatgcaccttcgtgttctttagtcatgatttcaaggtcctggatggtgaagtccttctttttcagaacaacttcgtagttttcaactttttcttccaaatctttgatgatagtttt

SEQ ID NO: 98302 - DNA, 561 bp, Zea Mays
cacagaagggagtagatttgagaggtacagtatacctgaagtgaagccaaaggggagcggcgactttgggttgtgctttaatttgctagaggggctcatttgttgttgtggttatagctcattgttgttgtggttatagctcattgtgtgaaacttattttccttctctactttattgaaactatggtggtctgccttgcccactttgccttctagctaggtgatataagagggtggtgccgtggtggatcgccatgcaatgccttattaactatttaagaaccatggctgacaaggtgtactaggacctagtagtgtcatgtcatgttggccattgagggcacacctgaacgcctacagggcacttcggaaatcattaacacgtgtctgccacaccgatatttttatgtttttatacatcatatcatataagccctactagcattcctacattactagctagttcaacgcatttagggcgtgtttggtgtggcggccaaattgggcgccacacttgtggctgaaaagtgtggcgcggtgtggcggcttaggcgccacacc

SEQ ID NO: 98303 - DNA, 512 bp, Zea Mays
cgtggatgcaagaatggttttatgtgaagaatgatctggttgagagagaagacatcaaggggattatccaacgtcccatatggtctcacttcggcattaagagaccatcccttgcccttgggaacgacatacaagcttgacaagctacttataacgcggtatgtacctacataggcaccagggacttagtccaagagcacattgcctacaaagtgtggccactcgggagtgggtgggagatgccgaaggaggctgctgctgggtctagccaaagtggcttgatttacttgaagtatacattcaaatacaggagccaatttgatgaaccaaacgacgactggctagatgccatcgaagccaccaacgatgaattagttggtgcctatttaagggctgaagatgacgctatgactgtgtccttcggaggctgaggcgagaaaaggctaaataggatttttgatgttattggttttgtatacccagactactgctatccctcgtgaaagcatgga

SEQ ID NO: 98304 - DNA, 497 bp, Zea Mays
atcaattgacaagttaggagtggaatagttaccaatgggacaatccttgcattgatgtcccttccttcggcatgtgtagcataggcgtttttgaagttttgaagatttcttctttccttgtttgttgattgctacatggttagtaaaaactttcttttctaaccctatgcccttttgttttaaatggagacaggatttaataaagtgtcccttctttgaacatttaaaacaaagtttatcatccttgttaataatcaagccatttttaatatagggacatgatctaatcaagtgcccctcttcaaagcattcactacacctcttatttctcttaatgtgaagtgtggcttgatcattaccttggatgttaccttgtatggaggcatggttgaggcttttggaagaggtattgattttcttcttttgttcgctcctcttggcaatcctcaagtccttgacattttcttcaagggatttagtgcatgccactgttgttc

SEQ ID NO: 98305 - DNA, 380 bp, Zea Mays
catatgagaagatcgacgtgtgtcccaacagttgcatgctattctttgaggaggacgacaagctggaccgttgtaagcattgtgaagcttctagatatgtcgaggtgacaaatgatgagggtgaattggtagttacgaaggtcgtagctaagcaacttcgtcggttgcccatcattcctcggctttcaaggttgttcctcaacaaggaaatagctctgcatatgacatggccaaagaatggtgtacgtctcgtcactgatccagacataatggtccatccgtcggacggtgatgcgtggaaggcatttgacgagtttgatcccgaatttgcaaacgaccctaggagtatatggcttggtctatcgacggatggattcaca

SEQ ID NO: 98306 - DNA, 361 bp, Zea Mays
ccttctggctctgtagtttgctgtggtttgtgatctcgtcttcaatattttttgtcgcttgcatttatggcccttcacgccttctttttcttcccattccctgacgtcctacaaatgacaaattacaggtctcttgttgctgacactacctggacttttcttctgcttatgacaaagacgaactgataagctggcattcgtagatcggtttcttgggagatacacatacagaagctttagggtcggctcgtagaatctctcagacaccgtcgttttgcatccgagaacttggtaagtagtatgagatgtccttcttgcggttttctgaaccaatgctcgtttaccttctgtttgtcatcag

SEQ ID NO: 98307 - DNA, 373 bp, Zea Mays
gtcagtgcagtccatgtgaaaatgaactgaacatgtgtgaactgaaattcagttcacagtcagtttgacaattcagtttgacaattgatttcagttcacatgaattcacatgaagtcagacaattcagttcaaggctgacccacaatttagttctggatgtcaaactaacaattcagttcaaatgaagtcagagaacaaggtaaaatgacccacaatttcagttcaccagaatttcagttcacacaaccaggattacatttcacacaaccacaatttcagttcaccagaattacatccacacatccagaatttcagacaccataaaccattacaagacacacatccagaatttcagtcaccataaaccattac

SEQ ID NO: 98308 - DNA, 821 bp, Zea Mays
gcgccattcaacttgtcgggcctgtattccactgttatatcatacccaaacagtttgctgacccaagtatgctgagggattgttgacagccgctgatcgagcaagaattttaagctatagtggttagtgcggactgtaaagggtcggccccagacatatggccgccagtgtcgaactgcctttaccaatccagtcaactcccgctcatatgctggcaatttttggtgatgaagggacaccggcctgctgaagaaggctatggcaccatcgccttggtgcaggactgctccaaatccagagccagaggcatcacagtcaatgaaaaaccttttgtcgaaatccggtaactggagaagtggtgctgtcagcaaggcttgtttgagttgatagaaagcctcggctgtttcctctgtctagtggaatgcatctcttttcagaagggctgtaagaggagctgccacggacccatatcttgctataaacttgcggtaatacccagtgagtcctaggaaactgcggagtgctcgtatggtcctcggtatgggccatgattcaactgtgtccaccttggaagggtccatggcgaccccctgcgcagagacaatgtgtccaaggtaagtgactgcagatttatcaaatgagcacttggacttcttaagaacaaggttgttgtcccgcagtaattggaatacttgcttcacatgttgtaagtgttctatccaggatgagctatatatcagaatgtcatcaaagaataccagggtgaactttcggatgaaaggcttcagtatatcattcatcagagcttggaatgtggatgg

SEQ ID NO: 98309 - DNA, 346 bp, Zea Mays
gccgaagccgaagccactgaaatgaaaactgctgaagctgaatccggcgaagccgaagctaccggggctgaagtcggggccaccgaagagtcgaacctggaaaccactcttgaagttattgacaacatactgctgaaaatggctgaagaggaggctaccgtggctacagtgaatacggcaactgagaaggggaaagaacaaactgatgaaatttcagaagaagaagattttaactttcaagatttgctcagacaagaattatcggacgccgaaaaggaggaattgaaaaaatatgccatatcttgcggatacaaatcaggggctatgctttttggtggggtcaacg

SEQ ID NO: 98310 - DNA, 289 bp, Zea Mays
ggcgggagaaccaccatcaagatagtggcgtgccgcgcattcagcacgcaattccgcaacctccgcccgaaccttgcccaactcgtcaagggcgtggtccaactctgtgttgagcacggcgaccaagttgaccatgctgcttagtctgggattgccctcaccaactggcgagacaatcacacctccagcactgtcgatcgaacgacgagggtagtacttcaggtcaaggccgtcagctaccccgctgaacaacgagcaatactgagaaagtgctcgtcatgctgcatct

SEQ ID NO: 98311 - DNA, 602 bp, Zea Mays
ccaatccagtcatcatccccaaggctaatgggaagcttcgaatgtgcatcgactacaccagccttaataaggcttgtcccaaggacccgtatccacttccacgcatagatcaaatcgtggattctacctctgggtgcgacctcttgtccttcttagatgcttactctggtttttatcagatccagatgtctagggaagataggaagcataccgcttttgtaacagtggatgggctttactgttatgtcgtaatgccttacggtctgaaaaacgccttgccaacatttgtacgggcgatgagtaagactttcggggacctcgttagggacagagtggaggtgtatgttgatgacatcatggtcaagactaagagagggtcgaccctagtggaagacttaaccctggtcttcgacaagctgcgggcaacccacagaaagctgaacccggacaagtgcgtatttggtgtctctgcggggaagttgctgggtttcctggtttcacactggggcattgaagaaaacccggagaagatcaaggcaattgaggcaatgaggcctccagcccgcatcaaggacgtccagaagcttacggggtcattggac

SEQ ID NO: 98312 - DNA, 735 bp, Zea Mays
cttggttgacttttatttatgtcattgaatataggaatcgtcatactatcaagagggatcaacatatggtattggcgttgttgctaaagctcacactctttatttttgagtgaactattttatttcagctccactgtgattgaagtgggctgttcaaccagtccttggcccacctcaaccttgtttctctttggtctccagtaagtacctttactgcaactgttgtggtgattggtatttaagcatatgggatgggtacaacaatcttgtcgtcattttacaggacaagtggaaacttgtttaacaatgaccccgctccaccacctccaccatcaccactagcaccaaatacccctccctattggcaacctgatgttccagcttacccatccccatacttatatttaaactctactcgcgaacggtgcagtctacgatgcagaacaatgtaaaatagtacatatgggtaaactttgggtaatctgctggagtcggcctaaagtctaagatacccagccgaaaatggtggcagacactccaaacttggtgatggtgcagttgcaggaatcgtaatatgtttgctggatgttggtgcaatagttgcattccttgtaatcaaaaggaaatcttggaggttatcatggggacaagacccggaacaaaatgaacctctcagtcctcttgcttctggacttaaacgtaagtcttaaggtagttgtgttttcatctttattg

SEQ ID NO: 98313 - DNA, 479 bp, Zea Mays
tatcaagtgcgcacgaacttcattttcatctttccatagagaattaacacattttctacatggacatagaattttgtttccacctatagaattgctaaatgcaaactcaataaatccagctaccccatctatgttgaccttcgtgtgcctataaatattaggtacaataacaatatgttggtcaaaggtgattactacaaaataatggtttgtagtacattgttagaaatatacctaggttcattcatccaccttttatccatgttgtaccttaacaaatataagatgaaatgtacccttcacagcttcataatgtaagtgcaaaaagggtaaaaaagagggaatcattacaagtatcaaagataaaagttgaattaattagttttttccggtgcaaatcaacaggagatggaaaagtaacaagtaaagattaccactgatcaatggatgtcgtccaagcgttgttcacgcacttctcc

SEQ ID NO: 98314 - DNA, 524 bp, Zea Mays
tcacgaaggattaatggtaggcgaggcttagcggtgggtgccctccccctcctctcgaggggaagtgctggctacgagagatggggatgcatccttatctaggcagtcgcactcctccttaccggtgatagtgttggcgacgtgagaagcgggcgggcgggggtttgttgcatgtgtagatcgtggctagcacgaaggtctcggtaggcgagtcgcatggcagacatggaggtctcggctagggatgtcaatcgggcaggtagtacacgaatatatagttcgtgaattcatacctgcgagacaaaactcaacacataacagtacccataaatgttcgtgggtatggatctgtatccatactcgttacccacccgcccactacaactttagcattcaactccaaacaacaattttatcaaatttcaaaataattatcattccagcaacatcaaatgataatttcagcaccaaacaacatgtcatggataaaaattgaaaaatgagaatttataataatatattaa

SEQ ID NO: 98315 - DNA, 488 bp, Zea Mays
tcttaaaaatcatggtgtcgtcttttaaggccaggccaattacatcattttcggcagaggactagggccaaattatatatgagcttctgttcccttccctttcggatgtgtacagttgtatccctacgcgtttgagtgtttatgatggcccctgcccttgttggtggatctggctagtgtgtgctgttgatgggggccactttacagggcactttcgtttggatctttgcgctgaaataggtggtgaggattgcgcgccgaggctaatcatcgacgtagatggaccttatttagtgctgtccatggccacgtacgaatggcccccctccctgcgctttacaggaaggaagcactgttttagcagtacgcgaaattaaaccctccatctcctcctactagtacacaaatccaatccatcatccgtcgctggatcatggtttttgaacgcgttcttccgttcccatcctataaaacctagcagccttatt

SEQ ID NO: 98316 - DNA, 613 bp, Zea Mays
gaggcatcctaagctctcttcgtcaacgccaccgaagagcaacgctcctggctggtagccgcaagatatagcataatctcttagctcctctttttcagtcctagataactcctgaccaatcatgttttgaaaattgaagtcctctgaaatatcttcagtaatctttttctctttgttaaacaccttctccccttttccaggcattgtggccagggtttcctcggcatatgcaacagtttcttccgtggtcatatccaaaatcatcttatcaatatcagaaaatacgccttcaagatttgtggcttcggccgccgcaccttcggcagttgtagcttcggcgggagcagcttcggcagctggtgtttttgacgctgaagccaacggtggcgttctttaagcaggcttcttgattgccgtaggctcctccttctgaaaaagcttcatcagttgtggccctcgtggacttagcttcagaggtaaagatttggtcattacctttaaaatttcctccatgtcaacagcaggaggtgttgaaggaatttcttcctctatatcagttgttcttggcttcgcagccgcaacttttcttttcttcggaacagccgccttcggc

SEQ ID NO: 98317 - DNA, 398 bp, Zea Mays
gaaggtgcaatgtgtaatgcattgtaagcagcaatggatgagtctatgctcaacctcaatgaagagtcatcgacgttacatcaatcgtgatcgtgagtctgcccatgatcggcttcatcaagactacttcaccgatgactgtgtgtatccttcgaattacttttggcgcaggtatcacatgaggcgacaattgttttagtactatgcatagattaggtaaatactctctgtatttcacccaaagagaagatgatctgggtcgacttggtctctctctcctacaaaagtgcatcgcagctctgcacttgttagcctatggattcgttgtatattcgatagatgagtacttaaagctagctagatcgactacattagagtgtctagagaagttttgtgag

SEQ ID NO: 98318 - DNA, 564 bp, Zea Mays
aaaacagttgtagaacttcggtcttcaaaagagaaatgttatgaaagatccatagagtgtgtgcaaaaaaaatctagcttcgccaatactggcgcattctctagcgaggacaacttcgtaagggccgatcctgaacgcccaattgattggatcagcaacgaagttgaagcctttgaagaaattttgagtggtcgcggggatgtctgcgccttctcaggtgccaggggaatcgtggctattttggagaaactaggctgtgaccacgtgaaagctttggccgaaaccgaagctaccttatctattgaagatacaaaagacccctcagccgaagcaagcttagttggcgggaaattcttcactgacatctgggaaaatggcagccgagagatggcgcatgatataataaaaaagagtgtaaagattctcatgatgcaaaagaagcgacgaaggcagctgagaaagctgcggaacttgaaaggcggataggtattgcttaattgcttttgactttgtgttttgtttctgtgacttcaaacttatttttgttttgtatcgcagctgagc

SEQ ID NO: 98319 - DNA, 927 bp, Zea Mays
tttgagtgaaactagaatattttatgaattttaaatattgtggtgttgatttttacattgtccttgtgattagtaagtttgaactacatgatgtcaattttattggtttcctttcttacatttgatctatcatatacatgattatgtattgcttaatttatgtgtttgttggatggttggacaattaatatcatcggacgaactacccgacaattatccggtacctacccgagtagtatccgttattcgtttcttacccgcccggattattacccggtcttgtcctgtatccgtcccgaatcttaactacccgtatccggtcccgtatacgagaaagatacattagggtaggatacaggatgaccttgtatccggctgtatccgtcccgttttcatccctaatgtgatgttaggaaccaaaccatatcgtcccattacatcttcttctgatacttcatatgttctacttaactacttaggtttgaagtttatcttaatttgacctcttctcataagattcagaacaagttcatactagtgaaaacattggcttcatattacattagcatagtttaggtgtcttcttggtctcattttagcacattaattaggataaaactcttctacatctttatcgccttgtgtgtgaccatagtctgcatccgaatacgcccatcgttccctgcttccatgcaacaatttctccacatcagtttctacacccacctttttgtgcacattctcgccctctagtccaaaagcagctctcatagttcgaagttgcttctcctgttctaggacttggtggctccgtgtccgtgaacctaagaggaatcaccatcttgtgggaaacaaatgcaacgacatgagcaacttcaaacagaacaacaatccaatgaaagatgtaaagtgcaatgtacgttgtgc

SEQ ID NO: 98320 - DNA, 312 bp, Zea Mays
ccttcgtttctagatcggccagggggtcgaacggttccggtggcggagataattcagctacagtggaaaaaattaatcagtctgaagccacaaaaacaaatgccgaagctagatgccgcgaaacaatacctatgtgtctctcgcgctctgcagcttcttcagcttttttgcttgtactcgggcgtcatggatgtctttctcacttttcttcataatttcgtgagccatcgctcggccaccatttacccagatgtcattataaaatttcccgcccattaaactcgcttcagctgagggatcctttgtatcatc

SEQ ID NO: 98321 - DNA, 553 bp, Zea Mays
aaaagattggggcttttttttggccaaaacattgtgtcatcttcagtagatatgcctggactcgagcatagtgttgttaactgtgcgagcttcagactgctcctgaaggtcacgttgttgccgaggccgaaaatgcccttctggttgctgatcatgacttggggcaggcaccattggtgggggtggtggtagttgagcccaggaagcttgagagtggcttgctgaagcagcagaagccatagactgttagttgcctacgtattccgggatatatggagagtagcacgaagcagtatggaggatctgcttcggctgattcagtcgtgcctcggcttcagcgatttccttttgcttttggatcgtgacctggcacgtcctcgttgtgtgacccttttcctcgccacagaaaaggcaaaacaacttccagggctaattaccgaaccttcctccactgaagcttcttcctcctctgcctctcggagctggtggtctgtaagaagtttgttgcatgcctgaagattgtgagctgtgatgactgctctgagcattgttg

SEQ ID NO: 98322 - DNA, 624 bp, Zea Mays
ccccaagtaccttggattatatctcagtggagccgactttacaagagcaaatagtcctgacacagattggtgacaagggtgttcaagtcattaaggaaatgctcgaacaaaaggtggataagtacaaatgctttcgtcaggacagcaagggtgttctatggtttgaagaccgattggttgttcctaaaaatccagaactcaggaagaaaatattggacgaagctcatctttccaagttttccatgcaccccggcagtaacaagatgtatcatgacctcagatccttatattggtggacccggatgaagagggagatagctaagtatttatctgagtgcgacacatgccaaagaatgaaggctagtcatttgaaggtagcaggtaccttacagcctcttcccatcccttcttggaaatgggaggacatttgcatggatttcattgtgggtttgcccaacacctcccggcaccacgattctatttgggtcattgtggataggttaaccaagacaactcatttcttgccagtccataccacccacaaggcagagaaatatgcagagatctatattgaccaaatagtgcgtttgcatggaattctgaggactattgtgtctgatagag

SEQ ID NO: 98323 - DNA, 727 bp, Zea Mays
agagagagaacaatcaacgccatacacaaaaacaatgaggtatgaaacataattagatagaaagagtaaaaattgcacattcaagctcattattgcatagcatatggtatgaaaaattactactgctattacaataatgataactcatctcgtcacatcataaaaatgtttatggcttcagagccatgcatgcatcatacgatagaccaaatagttattacaaactgattgttcattacaaaaataaaatgtactgccagtctaataaaccttctcccccttttggcaacaagaaccaaaaagagagagagacgccaatccgaagatcaccagttgggaggaggctgatgaggagcaaacaagtgatgcgctaggtgagaggcaaagtgttcttccccagactgatccgggggaagatcactgccagaaggatcctggggcggagggtgagaggatgattggcccggatccccgtgatacggaggcgggacaaactgctcacgatcatcaaaataagcttcttcttcttcgtcgtcgtctgctgtcataaaaggcaccccgtatgcctgctggtgccactcgttgatctccgggggaggaggatggagaggcacgtcaggcgatcggggggcgaagggagtacccaaagaggaagcttgacgacgaaggttgtcgtcagtctcccgctgacgtcttgccacctcatggacatccgcagcaatgttcc

SEQ ID NO: 98324 - DNA, 613 bp, Zea Mays
agggtccattaagactctcaagtgtcgcttagtcacccaatcaatatcatcaaatatggttgggtaacgtcacaacgcacaagtattagacaagtaaggtatgacttgtagctactacgattgtaaggaccaaacttcggtttagcgtagcacaaactagacgaacaaaccagccgaagttatgggatagccccaaggcttgtacaacaatatagtggacggaaaagactgatgccttatctccatggtcgtcgtaggcaattgaacaatgagtgtctcgatgggcgagctcatgagctaagctacgaaagccatggcgtctgaaaaacacagaacttttgaaaaggcagagctaatgaagcctcccattctccttgccacaactcctcagttccacatcccttccatctcgctaccgcacatcgcaatgacggtgcacaacacccaacgccgcctctttgcggtgtctccctctccaaactagccctgacgcatgcccagaccaaaaaccacctactagaggagatgaatgagggcccctaaaaattctcgacttacgagcacatgagttttaaacccaaagttcaacacggaaccctctaaggactcaaag

SEQ ID NO: 98325 - DNA, 371 bp, Zea Mays
cgcaggtgcagtggtggtggtgttggagtgtttattattgcctcaccgtgtgcttctttttttatgttccagagcaagcacgtaatgtagtaggggcgtagaatctagactatcaaatcgcgaggggcgacgacggtgctcggtgcagtgcagctttgtacaggaacaggactagtcgttttcacgtcgtaacagagcacgctcccgcgtcgatagatcgctacgagcagtcgacagacacggcagcataaatgcgcgcgcaaaagctagtagtaggactaggcctacagtgcagtgcgtccccgagattcattcgtcaagttcaggtcgaccggccggccttgcccttgcattggaaaacagttaccgct

SEQ ID NO: 98326 - DNA, 392 bp, Zea Mays
ataattcagatgtgggttagcttgttgtttagttcagtttaggtgatgtttagtttcaatactccttttgtattacttggctgcttgttattgcttttgctgtattggcatgtgaaagtgaactatgtcgagtgttgtcaagtgaactgctgctatgcaaaatttgtggaactgaactgatgtcaagtgaactatgtcaagtgatgtcaagtgaactgatgttgcctgttttgctttgctttaaaatcatgtggctctcactagtagctttctatgtttcatggtttctatgtttctttgtatttacttattgttgctctgcagtagtatgaatcactatcatacactgaggtaacctcaatttgagccctattttaaccaatatcatacat

SEQ ID NO: 98327 - DNA, 477 bp, Zea Mays
taacccctctgtgttaacctaatagcgattctgacttacctacaccttataacccatcccatctcaaaagattctaacatatcctaataacatttatcctaccctagtagatctatccaacctaaactagtctaatctagtcatattcaatctaatctagaccctttccaatataacatgatgtaatctagagtgagttacttaatgctagtataaaggataaggccatactcctaaatcgcttaagcctaaattggtgccctatactaacttggccgtatacaaaccacctaacctacatgttgggttgcataacccacctacgccgacctagaagcaaaacaacaagacagactgtgcttaaacttatttaactcataaccgcctactaccctattttgggtacctacgaatctgctttaactacatgtccctaatttggataacaacttcaagaacaaatatcgaagatgatcg

SEQ ID NO: 98328 - DNA, 469 bp, Zea Mays
ttgagatccctctcaaagacagcatcaagggatggcgtttggagtggttcgttgttgagaattatggaaactctctcccccctcggtcgggaagacaaccggacgttcgcaccccgagttggaccgagtcccccacggatcaggaagtagctgaggcaggtgctttgctagctgaagttggattgctgaaggagaggggtctgactgctgaagctgtggttgctgattttgtcttcaagaatattcagtcgttgaaagacagggcatacccggcttatctgtatcgaggcctagtcgactcaactcgggttaccaacagaaaaattccctctgtagacttggtgaaccgacttgagatgatccttagaggcaaggtgtcaaatgttggtgctccagtggcctactcagcctggaacttgcctcctcccaaggccttcactcttttcgtgtcgaatccacctgtcactga

SEQ ID NO: 98329 - DNA, 593 bp, Zea Mays
cgtactgctacttatgttgtccctgggaggagatgaatccggtgatcacaacacctagctgggggaaggccactaggtgtctcaaacacttcatgaagctgctatagcagacattccatcataggtttgggctctactttgagtgaccaaactgcaggtctcatggaaatgtcccagcgctgcgaacccagtccattctagagaatacgctgtcctctcctccagaatgccatacacagatcttcaagatcccaaaggatgggtcctaaagtgcacagaaatgtgatacccaatataatgtcaaaggaatctagaggaatggcgtatgcgtccatcaagaactcttcaccgacaatggacatactaatactgttagcaatctgtcggcagtgaatcttgtcgccatttgctactatggcctagaaaccttggttggaactgtaggctagccgcagcccatttgtagttttgaggctaacaaaattgtgggtagatcccgtgtcaagaagagttgtgagggtgtatccccaaatgttgacttgcagttgcatggtgccctctgagcggatgcctgttaaggcgtggagtgaaat

SEQ ID NO: 98330 - DNA, 327 bp, Zea Mays
gtttgggtaagaaggagtaaggtaagaaaagactccatccaagattgtggatcttgactcatcttggtgatctcacttgatccttgaagacttgagttggtgctcatcctttcttgatgaagttgatcatcttcgattcttcgttcttgaagttgttatccgaattagggacatgtagttaagataaagtagtaggtggagcagctagtttagtaggtgactataagttaaatgatattagtcataatctggtttggttgttttgcttctgaatgattgggataggttatgtaacctattatgtaggtcaggttgttgggtatggcc

SEQ ID NO: 98331 - DNA, 388 bp, Zea Mays
caacgtgttccaagcgtgtcactactggtatcaccaaagctctcgtgagggcatagatagttgaactacgtttagaagatgatctacagaatagcttaatgacttttgacatggatagtatagctaccatgtgatgatgtgaatggggttttcttcacgttagagatgtccgacacgtttgtgatctttgcattcttcaactcatgcattcatgtccaaatgctacctcgtatgtcgttgtcactgccagcataggctacgacctgtcaccttaattaggtctctctagttctgtcagggacaggcaaaccttctcccaggacccttaatcgctagttgagacaaattaatttatttccacgtcaatcttctccagttcccaaggaaa

SEQ ID NO: 98332 - DNA, 721 bp, Zea Mays
ggtcgagcttggtgatacatagttcctcgatctttgcatgagcaacaacgacaatgtaggacttggtggcggtgtggacactagtgaccccttattctttgcgtgtgggattgctagggaggcacgacctacaggtgggaagtcatgcggcgaccggtgggcacgacatacttcacggctaggggaggcgaacggggcacgtcgattacttccccttcctgcaagctccctcttcagcaaccacaccctaacgtgaggaagaagtggacaactcacttcgcatgtagatacggataatgcacgacacatgagtgaattgtggatattcatgggatgtggacgcttcctcaaaccactattctccaataatctcaatcttcccctcctttcaactgaagagagccactgccgccatacgtcgccctttcagcaacaggctcacctttgacttctccactagccatgaagacatggagagcaggtccaagctattatttcgctactctagcgagcaagcaaggctggaagcatctatttaccgaggatctaggggaccacaccacatcgggcatcgcggttcgccgggcttcgtcgatgacacctcttcatggtaagcaatgaggcaagtgcagatgaggtaagatgtattcccccctccttcaattttgggtataaaacactgaatttttgaacgttgtggtagcaatgcacatcagttgca

SEQ ID NO: 98333 - DNA, 401 bp, Zea Mays
gtcctccccactgcgggaagttcccaccccatcatgagcatgagttcgcgatggcaactgaggaagaaaaacatcctgaattattacatgccaaacacacaccatctctattacattgctaaactataataattatacatactcagtatacaactcgacttccttatttattttacataaggacattacttaaactatactactctaatcctcttcatccttagctgctccactacccgcttcaggggaccgttcatctgcaaggttcatggaaggaggggccccaaaaaggtccaactccccatcaggtcctccatcagctgttctagatggttcggctcccattgctgtaacttctggtggcacactcggatacagccggtcatacaacacgtgcacct

SEQ ID NO: 98334 - DNA, 415 bp, Zea Mays
aactccatacctacatcagttttatttgattctggagcatctcattccttcgtaacaaagtcattcatggaaaaacataatataccaaactatcccttgaagaagaaactattattcgatcaccaggaggtgaacttagagccactcactcatgccctcagattaagattgaattagaggcctaagctttctagtagagctgataattttggaatcaagtggaatcgatgtgatacttggaatagactacttgaccaagtatgatggagtaatatcatgtgccaaaaggatggttacattaactagtccgcaaggagaaagaattgaagtcaatgtcagtatgccagcaacagcagaggcaatggtaaatcagttggaagagaaatctttggagcacatcagaatagtgtgtgaa

SEQ ID NO: 98335 - DNA, 514 bp, Zea Mays
gttcttcttctccctatactattacatcacttgtcttattggaaaaatgacttccatcattaaccttccagacatgaaaccaaattagttcataaagattcgttattcctctcagatgatgctcgctaactctttcgtagctttatagtatggctcataggtcggtagcaatatacttcttcactcgtcaagcatcgtgttcgactgaaaggtatggttgaacaatttggctagccatattggttggctatagtatagctatatccctaaggtatctctatgtgtcaatttggatatcatcagagcccattgtattaccctctttcatccttttcagtgtgtctttaacctcatattcttggatcctacgcacaaaacgtctattggtgttataaaaaaagatccaactgaggttgtgtccccatttttctcgttgaacaatttgtcaaaatactttcaccatctatgtctgatttcaacaactggtgctatgtttcttccttaattcacttaa

SEQ ID NO: 98336 - DNA, 286 bp, Zea Mays
tagtcaacgatgccgtcctacccaaaagcatcacgtgggtaaccatgtggtgtgtagtcgggtcacaaacatcgacattatacatcccaccagctcacaacatacctcattcatgagaggaagctagagaaggactatgatgccttgggacttcaacatgttcctcgcaacaactcgacgacagatgaactccttgtgagggcatcaacttgggcatccatgcctgaggacatcttcaaaagacagctgttgagacctacctcctagcccatcgaactaggcgaaa

SEQ ID NO: 98337 - DNA, 296 bp, Zea Mays
cggatctttagctacatggtagcgccgacgtcgatgctcgttagggcatgcgacgagatacccaatgccttggctacttcatccatctcctggtcatcgtccagttccatcagaaatacccccatgcctgcacacttatggttaggtgtgtattcctctaggcagtggtagcactccccattcgcctgcttcaccgccagcgcgttagtggccagccgtcagaaccgaggtctggtgggggttgtcagtcctaggaccctaggtttgggctagccagctgtaacgccctgaatttg

SEQ ID NO: 98338 - DNA, 662 bp, Zea Mays
ggatttctctatgccccgtacttgaacatgagatactctatcccagcattgacaaaccaggaccagatatgacaggaggtattaccaacgtgttatgctaatagacatgatggtccagatataaacaaactagcctctaccaaaattcggaattaagagctgctaccaaattagcctctaccacagttagcttgagatgtaaacactgattatataatagaatttgcagacatctaattatctaatcatgaatgaatagcaaaacagtacagaatttgtcgagtccaaagtgtagattgcagtagtgcattgtaaattaacgatgcaatttcagattttcaaaaaaacatggttgcaaattgtgaaataaaaaagcattcatggtcctgtttactactccctccgttccaaattggaagtcggttctggcctttctaggtacatatttttgctatacatccagatatacactatgtctagatatacttcaactaatcattagcatctgctatcaaactagcttctaccaaaattaaaaattaagatatgctatctaattagcctctaccacagttagtttgagatgtaaacactgattatataatagaatttgcagacatctaattatctaatcatgaatgaatagaaaaaaagggtgcaga

SEQ ID NO: 98339 - DNA, 632 bp, Zea Mays
catccccgcgcctttccatcgtgggcgacatcccccatcttgcagcaccgcctcctagccagatcgcttgtccacccacctccctgcatgtcatcctctatgtaggcgacatcctcatcaccacaatgggccaccttcgtgttgccacctggttgtcctatgcctccctgcttcagtcgatcgtccacctcctttccattccgcccactcgcctatcggcctccttgtcgtgtttgcccacccacctccacattgtggttgtccgtgatgaacatagaggtgaagaatttacaaactcaataatcaacaagcgccatggccttgtagctctccctcccaattttgttctagtgaaatttctagcctaacagtccctagttcacctttatgctagcccctagtatactataaaagttagatgagatgatgtggaatatgttgaatatcccattatgttgctgtactactctttttataaagcaagggaagagataggattgcatatcgatcgtaccatggaccccgatcaactgtggtcaaataacatcaatcttatcatgatcatggagtcatacatagtgccataccttccgttgtgtcacaatatcgaggatgtcctactgcaacagtag

SEQ ID NO: 98340 - DNA, 706 bp, Zea Mays
cgagccttctctccatttgtagaagtaacattcttcaacttatcctttgtgttgcacaagttcaccttcctttgagttgtttcacccttgtaggagtggatcctccttaaggcatcatataaggtggtaccttatatgaacttaggggatcaccaccccttatgctcaatgctagggttcacctcataagcgttgtacccaagtccattttttccattgtttttccttaagggtttgtacttaggctcaaccttacttaacccatcattgctagagcgtcttttcaatacttgtttgacatcaacctttgaactattcttccttgcatggttagttaagcaacatgcagcatgatattttaaacaatgtttatatgtgctagtgttgcaagaactagcatgagagtctaccactaaggttgaggtggtggagatcttgcacttgtcaattagcacttgaagttattggttttgaaccttaaagcttgatatgcttgactcaagtgtctctttggcatttgcaagaccaactataaagactttaacacaagagagttcagtttctttatcctctatagttatattggctatagacacttctttaattaaaacattcaacatttcatccttactagttatcaacacctgaagctttaggtttctctccttttcaaggatgagcaagtcttttctagcatcaagagttt

SEQ ID NO: 98341 - DNA, 603 bp, Zea Mays
tgtggacatagttattataaattgtagggttcattttatgaaattccggacctaaatgatatatcttttgatctccgctcgacggcagacagaatttaataaaacccagggtctcataatgaaaaatgctatgtctatgcattggcagttgctctggaccgtttgatcaggatcaagggactagattagatcttgtcgtacacgaatcggtacacacagatgatcactagatctgaatccaacggtggcgaacaaccgagagccacacagtttcgtccgatcaaagatctacggctgccattccatacacgaatgggtacgcaaacacaatgttctgcaccgcccgatgaggatctaatggtcgttggccattcaccctaacccgacgtctagatgaacgacggcaggccaaggcgcggcggcgccatcgccggcaacgacaaaccgacatgccccatgccccaaactcaagactaattgatgcaacgcgaataagggaatcatgagagcttgatgtgaggttttactcaccgcggttcacggtagaggtccctgaccacagggaggggtggttccatgacgtaggtttaattttgatgggac

SEQ ID NO: 98342 - DNA, 395 bp, Zea Mays
ctttagagggtcttgttggagctctctgctcacgtcgcagctggggaggcagttgcagctttcgtggggggagatggggcgtgcgcagagagagaggtgggggcataaaaaatagtctacactattgtcttaatagttagtggagataatgatttttatgtgaagcgtgtttttataatgtcatttgaacgaattaagtttcataatgacatgaatccaaatttctcctcgtgggacggtggaaatgtcgaaccatcacataaagaccccactcgtgagcgtggagcgtggctatatggacccacatggcattcggctacacgcattcgctaggtgggcctcacaacagagcacacaggctggttcgagaccccgggcacgtttctacaaatcct

SEQ ID NO: 98343 - DNA, 439 bp, Zea Mays
ccggcccctaccatattatcgaggcagttggatgccccgaagttaatggtggtgcttcgccagctttgatggcgtgctatcttcgaggccccaggggtcaccgagggtacgtcccagtgaagggacttaacatcctttcgggaggtcagctcccagctcctgtacatcatgtacaacttcttacggaggtcatcattgctggagtcagagcctccagtgagaaggtccttcaagacctgcttagggggattgatacccaagctccctttcgcccgtaccaacatcgccttcgtcggccttttccttgctaggcgggtgacatgacggtgagccatccttggaaatatgctcacgtcgcccgctggtgttacaagaactaaaactttggcatgacatcttatgcattggcatttcattctgcatgttacacctagagtgc

SEQ ID NO: 98344 - DNA, 475 bp, Zea Mays
agagaatcgccactaccgcctacatgtcttgtctgaccaggtttagaaaaatggcctcatcatctgcgtatagcaaggttctccatctagtcgtctctccagcaacggggaaagtgtgccttgcccagttgctaggtcaagtaagcgttgcagagggtccatagctaggatgaaaagcataggcgagagagggtctccctggcgcaccccctggcatgggaaagctttgagcctgggcatccgtttatgagcacagaggaggtggccatgcggaagaggatggacacccattcgcgccaccgctgaccaaagcccagaacacgcaggacttccaggaggtagctccagtcgattgtgtcaaaagacttatggatgtcgagcttcatgaagagtgccagcggcttatgcatgtgcatttccctaatggtggattgcacataaaggaaattatcatggatgcttctcttcttgacga

SEQ ID NO: 98345 - DNA, 330 bp, Zea Mays
ctcgacttagggtgaccactataccctactaacggagcaatcgacttaagtcggcaatgacttaagacggtgcaacatgctcgcgcttactcgacttagggtgaccactataccctactaacggagcaatcgacataagtcggcaacgacttaaggcggtgcgacatgctcaagtctactcatcttaggtcaaccactacgccttatcagccaagcgattggcataagtcgggaaaaaactcaaaaaccaacacgccgcatttacttccgcaatcgttcaagatgattgttacatcctgacaacagaaacaaatgttatagttgtcagcg

SEQ ID NO: 98346 - DNA, 286 bp, Zea Mays
ggaagacatcaaagaaatcattcagcgccccatctggtctcgcttcggcctccgaaggccgaaggtggaaattgatggcactgttgaagcatgtcagagggcttttagcactatttgtgccttcattggcacaagggatttgattcaagagcatatatccttcagggtatggccacttgtggagagctgggatatgccaaaggagaccaccgccgattctagtgatggtggtctggtccgtctgaagtataccttcagatttagggagaagtttgatgagccagac

SEQ ID NO: 98347 - DNA, 438 bp, Zea Mays
tgttttcttgatagcggtgaaaatcttgccattggtgcgctcgatgacgccgttggattgcgggtggtacaccgaggcaaaggcaagcttggtgccgatggagaggcagaagtccctgaagtcctggttgtcaaactgtttgccgttgtcgaatgtgagctcggacgggactccgaatcggcaaactatgttttgccagaagaacttatgggcagtcttcgacgttattgtggatactgccctagcctcgatccacttggtaaagtattcgacggcgacgaaggtgaacttgaggttcccttgagccataggtagtggcctgacaatgttcagcccccagcgttgaagtggccatgtgtgggcaatcaacttagtgaactgcgaagggtttcccgagcggggagaaaacttctggcaagcttcgcacgacctcgtgac

SEQ ID NO: 98348 - DNA, 1037 bp, Zea Mays
agtttcgtgtgatattagaagaagctattactcttgcttctatccacttggtgaagtattcctcaacaacaatggcgtatttgaggttccctgtgatgtggggagtggttccactatgtcgaggcctagcgttgcagtggctaggatagtttcatgaactgcgagggtgccctgctccgggctgaaaatttttggcacgcttcacatgaccgtactatgctttttgttgcgcatacaatgtccggccagtaaaaacctttgcctgaccttggcagtcagggctctagggcctgagtgacagtcgcatgttcctttgtgcacctcgctgacgaggtttacatcctcgactgatgtgatacatttaatcaaaggttgggaaagttctttcttgtacagttgttctcctgttatggtgaacccacaactttggtatgtgaatattttggcttcagctttgtctgtgaggtgatagcgtcctcgtaggtaaataattattggggctctctactctgtggtcattaagaggcttatgtttctttgcccgtcgcattcccttacgactggggcttcgatggtttgaaagaaaatgtctgaaggcatggggtatccccttgcagcggccttcgcgagtgcgtctgcctcttcgtttttgtttctgtctatgtgctggatggtaaaacctttgaattgtttttctaggcttcgtatgatagataggtattggaggagcgccggttcatgagttgtacagtctttttctatctggttggcgacgactttagaatcagtcctaacgatgcatgtttagacgtcgagtgccctcagtttgcagagtccgagaatgactggtttgtactctgctatgttgttggtgcagttgtctatcttgagagaaaagcataggcggatggcatatttgtacttggtacctaaaggagctataattattgttcatgcaccagcctccgcatgataccaggtgtcatcacaatgaattgtctagtgtgtttccaaatttggatgaccagaagacgaag

SEQ ID NO: 98349 - DNA, 752 bp, Zea Mays
gcggctaatcacgcctccattatggttagagtaactcaccgcggaaaacgtccgacgaggaggaatattcatgggaattgccgagttcttcgcgttgatgaaatttcgagagccccgaaatcttgaggaacgaataggagatcccaatcgcttgaagacagaaaatcttgtctcatcaaaattcccaacagaatgagtgagaacctttctgcgatgaatcgggacagcatttgcaccagataggggaggaagcttaacaatattagcaaaagaaattttcttcttgcccttaataatccatcaattggcattttcttcctgaatgaatttcctgtattcatgagtccaattcggtccaccatgattccatagattgaagaaagccctgaattccgaacgatcaatgcatttagaattataaacatgaaaaccgacggccttggagaataccgagaagcgaaaacccgatcagatagctgagatacattgaaaccctttgcaaaacctcccagagcagcttgaagaagataaccaactgaaaccgtgtcaagcttgaatatgcaacgaccaaaagagatgaccaaccaaaaggtcgcagggagattcagacgcctaggacacactgtagaagctaaacggcgccgaatatcatcctcaaagattgtccccggccgaaaatccagctttgccagatccatccagaagaaacaaagaagaccaagtaggaggagagagggggagcaggagagcac

SEQ ID NO: 98350 - DNA, 568 bp, Zea Mays
aaataatgatttttcttgttttaacagctccctcgtgactcgtccttcctttaaaaaattctcgtccctcatttagagcgtcctctctctcctattttcgtgtcctctttttctccccaatcccgtccgcgcgcacaccagcctcctccatttttatttcccacgcggcaaggctcaagcgtttttgcccttttgttttcccacacggtggcgtgcatgcgagcacccgttcctttttgtgccgaacaaacaaagacaagcaaacaaccctcggagcaatcgaatctgtttattttgtcccatttctcgattttcactctttatttaggggaattgttgaattacacatctagttacactgttaaaattttttagcctaaacccaataatcagtttttagggaaaaattttaacattttttagaagttgtccctacaactcaatctatctctaaccaaacaggtttttatagtataagttgtgataccaataaaaatatttattttgacaaatttagtttctttttcattttttgaaacatggaaaatttagtatttttcaagacagt

SEQ ID NO: 98351 - DNA, 592 bp, Zea Mays
aaaaattaaagaaacaacagcccaaagttgctctatcaaaactatgtagagctgttgaagcgttactgaaaactgaattcaagaaaagaaatggtcacagtgaaatggggccgaattggaagcaccatatctttgattccattcagttttggcccagagatcctatagtaagtttgaagattgttgtttagtgaataatctttattaatggagattaccctgttcttaacaagaatcaagagaaacagagggcaaaaggaggtcggttcggtaaaacgctgaagatcagagcactaaaaatatctgaagaacgctgacaaagatctagggcactatagaattggatgtgttcgagcgatttggggaagggatcgaccgtggggagataacttcgggcgtgtcatgattccgcgaacctagccagagccggaccggagatatttcaccggcggtcaccgtggctcagtcattccgccgccatgtcactcgtgcctcgctcctccctcactgtgtctcttccttacgtggtagccacgcatggacaatgcaatccatggtcgcggcccactagccggaccaccgtgcctataaa

SEQ ID NO: 98352 - DNA, 516 bp, Zea Mays
gtaggccagaccgtctgtctggtcatggtaatgccacaaatgatgctcaacaatacctacactcaccatacctgatgtgtataacaaatgacctaataaaatatccatggtatcaaaatttggcatacacatgctctaatacaatttttacccattatgtattgggcttctgatacccattgccatttgtcttggtagtcgctctgcctgtctcggtgcaggctcaggctaggcatgcctaccgctttgtttgagctatgctacagagggttttgtgtctattcgatcataggtctagagccagagagatgcagagcaaggcacacaattaggtgctttggtcacgggagctaaattttagccccattacatcaattgtttactacttactggtttaaatgtagtctaattacaaaattaattacacaaataatgaataaacggtgtatctattaattctaattagtttataattcgatcatgtggctacactaaaaccaaataccgagcgcagcg

SEQ ID NO: 98353 - DNA, 1078 bp, Zea Mays
cccatccctgaggccgacaaagctttggatgctcagaggtctgacagtgttcgcccaaagcgttctcgccgagccaatcagcccacttctcctgctaaggggaagaaaaagaagaagagacgtcttcgtcgagtgtctagcttggatcaggatgccggtccttctgttcatgctgctgaggaagtgccagtgcctgcatttgctgaagctgaccccaatgggtgtgacccgactgctgtggatcccaatgggtgtgacctagatgacattgatcccaatgggtgtgatctggccaaagctgaacccaatgggtgtactgtccgcgttgttgatgaagatgaggaagaggaggatgaaatccctctaattcggaagaatagccggcgctacctagccagcggggaaagcagtggtgttccttctccagcattatctgccctcattggtctacaagaattatctctagcgaattttgatcagactcttgaagacatggtcccagaagatctattgtcagagccagcagacggtggcatgatggatgtttgcactgatgtgcctgatgctaggctagagttatcccgggcggcgtcccgcacctcatcgaccttggagcgcggtcttaagggtcaggaggctggtctggattgttctgctcccatggaagtgggtgaaggtccttcagccttagaggtggctgttatagagagcttggccctcaaggatggtgctagcgcttacccagcccccgagggtgttgccggggatgacccgactcggatgggtagcgcgagctatgacccagcccccgagggtgttcgagtcagttctccctctcacacttccatggacgttcacgtagggtcttctcctccgcattctggttgcatggcaacagcccaagcttcgggtcagggagtcgccttagaggccaacgctcctgatgacagagttttgacctctgctgatgatactgatctggtccccactaatgcactgcgggttgttccggttggtgatccttcatcgagccatcaactaacttcccacgacttgggagttccttcgttctttttca

SEQ ID NO: 98354 - DNA, 442 bp, Zea Mays
tgcttgttccatgtctgaagagaagaagatgtctgaggagaagaagatatccgaggaggagaagatgtatgaggagaagaaagttgcggacccttttcttgctgggttttacgaatatatggcaaaaacaaatacagagaagatcacaaaggaaataatggtggatttgtctgaagattccgacgatagtgatgactatgatgtggaaagtggggatgaagattctgaggaccggccctagcgaccaagccataccatcttcggaaagtcgaccattaagcaaagtcatattgaagccatgaagggaagatactttcgtgatatgtctattgtgagggttggagacaacaccgcccctgctcctgaagaaaatgaggttgttgtctacaaaagctttttgaaggtgggtctttggttcccattaagcagaattttggttgaa

SEQ ID NO: 98355 - DNA, 275 bp, Zea Mays
gtgttgatgatggttaatgggaatttaatggaaacgaaaaacttggttgattattgatagaaaggattttcataaggtggtgttgtcaaacttgcttgatttgcttgattttgtcgaccttaatggtgaggtttctattcaaaggcattttttctgtaatccatgaatccatcactaatgtgagcgcctgtggtctgttccttgtaagccataggatgcccagatctatcttgttagcattctattcaagtagttttagctccatctgtcatagt

SEQ ID NO: 98356 - DNA, 754 bp, Zea Mays
tggacttacatgtgaatgcagtatttgaggcgtatccatctccctggagctaatattggacataggaggtcggaccctttgttctccttcttcccctatgctcatctcgtcgattacaggacccggtagagcaggaggtggtgtgaccagtgagttaccatcaactcctccctctgtctctggatcaagatgaacgccaccttctaccatcgccggcgactctccagagccggccatctccacctccaaatggttatgcaggctttgtggtgttttttccgatgaaaggaaatcacagatactatacaagtaaccgcatccacgtttccagagtttttccattattttccgaaaccgtcccgatactctagcgatgtacatataaaactaatttccctaacacaatacttacgaacaatgactcaacattttatgccacaacgtatatactatttatgcactttttgtacattaccgattttatgacatatccttcaacatcttattctacattctatttacccgccaccatgcaagatccataaatttcgcgcccacgtaacagagtaatcacgtttgcatgtggaaattattccctataattccgcaccacttccaaatgtttaccgccttgccattgaaccaaccgcgtaacggcgtcgtctgccctgcatgccgtctgtccgcgtaacacaggcacgcttgtctcagcggaccagaccacgtaaccgacctgggctttctttaatatccg

SEQ ID NO: 98357 - DNA, 642 bp, Zea Mays
tgaagggtgaattactggtgtacacgagttacaggtgagatgtgggtcagtgaagggtgaattctcctatcgatctagtggtggtgtagtcgctatgagtggactaatgagcgatgagatggtgatgggatgtgacaagatgatatgtgtttgtaggggaacctctcagccttatataggtgaccggagggctatccctttacaagttgtgatgactatctacctatatctaaatctatctcttgacgcaacatgaattcctgcttatctggagttcgatcacctttcatccgagttatctatgagtatctagctcatcggttatgcgcaaccttcctacgcgaggcatcaacgctccttctacgcataactcggttgtctcggtcttcgtctcccttggtcgagctcattcagcctggttgcggcccgacgacattccttgctaggcaaatcatcgggggaatcaagcagcccatggaacattccttgctaggcaaatcatcgggggaatcaagcagcccatggaacatttttgtgctcataaggacctaggggatatctatctcccataatagaggcaatactttggatgtaatcgcctaagtctaggaagggtgtgacatcccgggatccacaaacacc

SEQ ID NO: 98358 - DNA, 453 bp, Zea Mays
gcgattgcggggttctagtcgtgtagattggaagccggatcgtctgtatgacatctccaccaaatcgatagttaccttcacctgacggaagatcgggcacccccgttcctatcaagtggtattcaaagactcaggtattaccgtcaggcttaccctagtttagtttaggtttttcatcctataactccagataattaccgtacaaaaaaattccgctgtcctaggacccttgtttagcctttgcaattttgttttcagtttggctttgttcagttcgtgtccgtggtcgagtcgtgttgctggtttagggtgtatcttcgtcgtagatcaactgccctcgctagccgctatcacatccacaattacccagatcacaagtcgatccacccattaatcgacttgccctcgctagccgccgccgtgccagccctacatagattgtagatacgccgc

SEQ ID NO: 98359 - DNA, 798 bp, Zea Mays
agaggccgaagcgaccaggctggaagatgtcgatgtactcgaagaagagcggctgaatgcaataattcaagcggcacggtaccagcagactctgagacgctatcacgacaaggccgtgcgacaacgatccttttcagtaggagatctcgtcctccgccgaattctaatgggggagggacgacacaagttatcacccttatgggaaggaccattcatagtagcagaagtcactcggccgggatcatatcgtctcactcaaatggacggcatagaaattgggaactcctggaatatagaacacctcaggaagttttatccttagccgtatttcaaaagctatcgggacaacgatgtactctgtaaaacaggaaacatgtcatcaataaaaaagggcttcaaagatactcagtttgttcatgattgacttgcattcttacttagctcgggtgaccactatgccctgctaacggagcaatcggcttaagtcggcaacgacttaaggcggtgcaacatgctcgcgcttactcggggtgaccactatgccctgctaacggagcaatcagcttaagtcggcaacgacttaaggcggtgcaacatgctcgcgcttacttaactcggggtgaccactatgccctgctaacggagcaatcgacttaagtcagcaatgacttaaggcggtgcaacatgctcgcgcttacttaactcggggtgaccactatgcccgacctaacggagcaatcggcttaagtcggcaacgacttaaggcggtgcaacatgctcgcgcttacttaactcggg

SEQ ID NO: 98360 - DNA, 618 bp, Zea Mays
agaaggtcgacgagggtgatctggccgcaggagaacgggacctcgtgtatcaggcacctgaggaagttcttaaggaaatcctcactggagactccgattccggtgaggatgacgaccgctgcaagaggctgtacgtgatgtacggcggaagctggagctcacctcccgcagaaatgtgaagtccctgtgtcgcgaggtcctatcggtgaccctaggggtcccgaaagcagctccacatcagtgatggcagagtaccactatctccttcggggcatccgactgccccgataacatggcaggggccggtatactaccgctcatcactgcctctatcatcagcaacatgcggctgcatcatgtcctgattgacggtcgggctgggctcaatgtcatctgccacgctgcattcaagcagctgcagatcccagggtcccgactgggaccctctcgtccattctccggagtgggcccacaaccggtgtatccccttgggagcattgcactctcggttacattcgggaccgaggagaacttccgcactgagaacgtccaattcgatgttgtggaggttaacctcccttttaatgccattattggcaggccggccctgtaccgatt

SEQ ID NO: 98361 - DNA, 276 bp, Zea Mays
gtcggagcaataggtactcgaagcaaccattaaaatattctcatgcctattgtattgccatggggcaccaatgaacacccaccatgcaaaatggatcccactatgacaaaaaggcggaggaatgggagtaaccctaccaatgacggcacaccatcgactcttcgacatgaccctggtctggcgtgggagtggtcagtggagcaggccatccttgacaagttgctgataaagtgagtacgcacgaatttgtgtgtttggtagcctgacaattcgagc

SEQ ID NO: 98362 - DNA, 370 bp, Zea Mays
gggaaatgccgaaggagaccatcactaactctagcgaaggtggtttggtccagctgaagtatacattcaggtttggggataagtttgatgaaccaaatgacgactgcttgaagtgtatcgaacctacaagtgatgaactgcttggagcgtattccaaaaccgaggacaatgccttgtccgcagccttcaggggtcggaataagaaaagattgaacatggtatttgatgctattggttttgtataccctgactattgttacccgctgtgaggacaaggggtaaaaagaaagattgctgtttctggaaaggttgccgcttcggccatcacagctgagccgaagggcaagaagttgaaggttctaactcaccg

SEQ ID NO: 98363 - DNA, 523 bp, Zea Mays
cttctaggagcataggttggctcagctgcctcgaaaaccgaaaaggagtaaaaaaaatacaactccattctcgcttgtaagttcgaaacacatttttctaaaaactataggcactgagtgtgttcacatatttctaatgcatttttgcccgtaacaacattgtgcctactactacagtgtacagtactaccctccagaaaaggtttattcagcatcgttatttaggatattctgctctcaaacaatattttgacacacctccgcgtattgcacgggattgcccacggtgcctcggaatttccatccgcatatgtaagcatccactctgacacacctgccgggtttgttgtttctgcgccatgcggaaactgcacactccatctgcgtcagcgtcagctctctataaagttcctggccatgacgttacaagcaggcgtcgtctcttgccattgtctccttcgtcgcgccaaatgggcgcctgcttatataaggccgtcgcgagctgagcactggtggattcctc

SEQ ID NO: 98364 - DNA, 580 bp, Zea Mays
atatgcttcatgtaaggtacctgaaggtggtaagcaacatgatagtcaaactcccactcattattcgaggcctgcgacacttagagacactcgaggtggatgcagaagaagtcgctgttccactggatgttttcatcttgaagagcctgttgcatctccgacttccgagcaaggcttatcagcctgattcagatattcaaaggattgatttaacaaatacatttcctttaagatttctgcccttcgtcagagcgttgtcaatgctagggcggtttctcctctcccatggccatcggattcgccatttgacatcacttcaaagtcttggctactttgacctaagcacttgctccagatatactgtgtggcaacttggcaagctgaccaatttgagggatcttcatctaacctgctctgcagttcgttccaggcatcgaattagcaacatccaatgccttgcctctgttctggggaaatgcaccagcctcgaatctctaactatccgtggcgaagcatcttcaaaccagagcatttcttttgatggcttaagcagcttgtcttctccaccgtacaacctcgt

SEQ ID NO: 98365 - DNA, 683 bp, Zea Mays
tagtccttggttcaaggccaagcccagtatggttctgcaagtattgccactgctggaaagaccttcggagcaagttcaatttgttttgcagttttttgttgtcataatcaagaccagtctgctctatgaagctacgatacacttgttgccatccatatttagttaaccacatgctattgaagttattaaggtccttctgattgatgcataggtcaatgaatatttagttgtcatcggatcacaactggcacggtccgacgaactcatctgtgggcaagttgcacatacacataactatttggaacagaggacatgtagtaaatgaaacaagaacttgccatggtcaaagaaacaagataagaacttgttgtaggtcaatgaatacaaaggcgcatttaacaatttctgaaacagaggacataagaaacaagataagttatgcacaaaagaacttaaagtggaagtggttttggcacgcttcttgcataggttgtactgaataggtgcagttctcttttcacacgcaggtttgtccggggaacaagaatcagtgaatgaatgtgccagattgggcaaacttatgcaggaactgcgccgaaaaagaagagtaatttaatacattaaaatggaggcacgagggcagatagcaacagtaaaatggaggaactaagcagttcacctag

SEQ ID NO: 98366 - DNA, 304 bp, Zea Mays
tatgattacctgcgaaaggcaattggctgttgagatcgataggaggaatgaccgcagcagcagaattctgattcttccgcttggatgccatcgcaatctcgtcggcggactgagcagaagcgaaatcaaagggaaacagaggaggttcggaggcaaaaagtgaggctagggcttagaatgcagaggcgtgcgacgacgtgatacaaatggggttttcccaggtcagacattgtttctaataaagtgcttagtcatcactcggtcgttatttctaaaacgccaacgtggcctgatacgactcggc

SEQ ID NO: 98367 - DNA, 298 bp, Zea Mays
agagaattcaaatcggccgttagattctagttgaagggcagggattggatcgcaccttaataaaatcctagccatcggatcgtgatcccacggctcaggtttgatcataccccatcaccttggcatttattctaaagaccccctcggcttttctcaaatcaaccctccacccgagtcagtcttaagatcattacagagaagacctcggatttacaaaataaaccctgaactcctgttaaattgagcctgcagtacacttattcgctggaattaataaaatagacctagaaaatgattt

SEQ ID NO: 98368 - DNA, 1180 bp, Zea Mays
agacaaccttacagttcccacacggaagcttcttgccatggatgtgtgtccttatcgtcggggtgtcagtaatggtgagtaggtgctactaccagttgactgtgagttattgaggtacggcttgctcgagaggcttccgaggcaaggaacagatagctagcttatcttctggaatcactgtgtcaaggcgtgtgttgctcctgggaagaggagatagtttgctagcaagtgcaatgttacgaaggtgggatccttgtgcaaaagttgcattggagtagagtgttgacgttagtacttgagatggattaatttatagctagcgagaaaggaggtgaaatacttgtaaatagtttgcctagtcacttgtttactaacatcatgcgtgtaaaagttaatatatcaggatgattgcgaaataaaacaagattttacttagcggcgaaaatcagggtgttacaaacctaccccacttaggtcaaatctcgtcctcgagattcggctaattactaaagagattagggaactcggctcgtaatgcgtcttctctctcccacgttgcttctgcttcagaatgcctgctccactgaactcgacagattctgacttctgagttgcgggtccttctagtctgagtatccaaaatcttcactggcacctcctgatatctaagatcatcttgcagatcgatcatctctggggtcacttgttcttctggcattcgcagacatttcctgagttgggacacgtggaacacatcatgcacatctgacatgtctgctggcaattgaagcttgtaggctacgactcccactttcttgattatcggaaaaggtccaatgtaacgtggggccaacttcccacgcacctggaatctgcgtgtgccacgaattggggaaactttaaggtacacatagtctccaacttcaaagctgagggcacgccttctcttatcagcataacttttttggcgtgattgagctacctttagattatctctgatctctgctaccttgtcttctgccttcttaataaagtctgggccttcaacagttcggtcaccaacttcagaccacatcagaggtgtgcgacacttccttccgtagagggcttcaaacggcgacatcttcaggcttgactggtagctgttgttatacgagaattctgcataaggcaaactttc

SEQ ID NO: 98369 - DNA, 416 bp, Zea Mays
tcaatgtagaattctacctctctttccggaggcattcctggcaattcttccgagaacacatccatgacttctaccatagatatactttctgctgctaggctaaacaccattggatcttgggttggtggctgagccttacacaaaactaattttccttggtagtcaatgagaagaataatcttatctgcgcaacttatgatgccattgtgcttggtcaaccaatccatccctaggatcacatcaattccgtgggatgggagtacggctaagtccgccaagaatactaccccacttaaaagaattctgacttgggagcttttgaggtggcatagaaggtctgaccctggggttcaggtgaccaaaggaatttctaaagatgcagtgggaatgccatgcttttccacaaaactagttgc

SEQ ID NO: 98370 - DNA, 406 bp, Zea Mays
atggcagcgtgcacctaggtgacaacggtcttgtagagaggatcaaccttgtccagttggcccacatcagatcctggtaccgtcaacgacacagggcatggagcctaggatgaggtcatgcgcggcgtggaggaggcagtgcacgtagggcatggcgaggtcaagggcgcacaccttgtgggtgtcgatgtcggcgtggagcggctaaggaccttatggatatgtataccttttaataatataatgataggaatcaaagaatgcaagtagttaacctatgtgaacattcattggctgagcttgatttttactttgttaggagagggtcaacagtaaatatttcttcaaaatttagtcaaattcatcccctctgtctctgtaattgtgaataatgagcaacttcccc

SEQ ID NO: 98371 - DNA, 617 bp, Zea Mays
cagacgctgactacttctttaatatacatgaattatcttatcagatgaaggcaatgggaaaggaacaatatcataacaattttggtttttattgtttcgtataacgctctgatgcgagacgccctgtcccaacatttcagaagaaaaggccaggatcttggacgaggcaatggttttatgttaagaatgatttggttgagagggaggatataaaatatataattcaatgtctgattcagtcatgcttcgacatccgaaggccttcgatcgtgaatagtgatagggctcaagcttgcctggtagccttcaacaccgtgtgcagcaacattagcactagggacttggtccaagagcacatagctttcaaagtatgctcccttgttaatgaatgggaaatgccaaaggagaccactgacagttcaagcgaaggtggtctggtttatttgaaatatacataccgctattgaagtcagttcggggagccagatgacaaatagctataaaagtcagtttggggagccagatgacgaatggctcgaggctattgaggcgaccgctgatgacttgttgggggcttataaaaagctgaagacgaagccatgaatattgccttcggc

SEQ ID NO: 98372 - DNA, 407 bp, Zea Mays
ggggtcccaagcaaaagacacacctttctttgtgagttcgtgcaaaggggcagtgatggagctaaaatcacgcacaaaacggcggtaaaatcctggaagtccaagaaaactccaaatttgggtgaccgtcgttggtgtaggccagtcctgaatggcttcaaccttgctgctatccacctcaatgccctgtggagtaaccacataaccaagaaacgagacacgttgcgtgcaaaatgtgcacttttccatgttaccaaacaagcaagcagcacgcaaagcatcaaaaatagcacacaaatgttctaaatgctcctctatggacttgctgtaaataaggatatcatcgaaataaacaacaacaaacaaacatatgaaggcccatagaacttcgttcattaaacacataa

SEQ ID NO: 98373 - DNA, 307 bp, Zea Mays
gttacacatatatagacaaggttagccgaggatttgtagaaacagaaccaatctatggagatccctacctaataggaatctatctatctttcctagccatataggcaggattctatcaccaataaatagagatccttgaataatagagaacagcatatctatcatcaaagatgttttcctaatagagatcgatctatctatcctaaccatacaggcaggattctaacaccctctatagtcagagtgttccatgggacaatgaaactggtacaaagagaaaaacactcctcccacaatctaagcatca

SEQ ID NO: 98374 - DNA, 330 bp, Zea Mays
cattttaaacaacacgcaagaattgcatagaacattgtatatcatgttgtatgagctgatggttattatgcatgcacaagtattagaccagtatacagatggatgtacctcttcatcaagcaaaacaagattagtatgcaggagcctactgtcatcctgaggatcaaggaattcccaaagcctagagacacgcacacacaagctatgagagcagtctccaaccataaggctaggaatgagtatgtcccccatctgcagtaaagaagcagcggtcagtcatttccagcgaaataagcaaccaacaaacattacactcgatgctgataaggg

SEQ ID NO: 98375 - DNA, 539 bp, Zea Mays
gcaaaaatctggacctaatagattgtaatggtcttatgcctttggtggatggcgagttagttatggaattctgtgggggctcttttgaaagatggctatggcgaaggggtacacagagattctagccgtcggatgaaaaatctgggatccagattagatcgcatctcactgaactgacatgcgatcaaaaccgtccgatcgacgaccgacgcactggattttaaaatgctgggatctattccctaccagtcaaacctagatcgtcggtcgagatgaccccatgccaaaattgatacgcagatcaaatcttaggcgtacaccttcgatccaatggtccctgatcatcaacccatccatcccctacacacgatagaaccgtcgcccaaccaacggcggggccatcactggagggtcttaactaaggctctgatgctccaaactccaacccaatcggccctaaatgaagtggtgacaaaagcgagttcgggaaagcgaccattaccgagaatagagtggaggcgagactcacccacggtgtg

SEQ ID NO: 98376 - DNA, 646 bp, Zea Mays
tggggataaggacacattgtcaccacgattaaggttgtgtaccatcttccactgtgcagtgcatgccgatgtctctacaaccacacctaaacgtgttggcatgcccgtaagtatttttaaagtatatatagttacatcatttatcaactacatcgtactcaatggcatggactccagttcctaccactatgataggaagtttttgtcgttgtagcgttacatgttcgacgttataaaatgatcgaggcatggactccagttcctaccactatgaccagggctccacgactacgacaagttaggtgtagctggacctatattgggtagggcctattaactagcaaacatgtaactctctgcccccttgtgctataaaaaggagaagagtaacgtagataagggatttccgattgggttcaaaccgagcccatttgagaagtgtctccgactccattaggccaggatcaatgagtgtgaaccagaggccagtaggtctagaactctcaccataactaaaataaaagggagagctagtcggtcattgggctcagttgataattagacatgtaatcttctttctcctcagcattcatcaatccgtcatatatatagagaatgttggatgttacacatccatggtccaaac

SEQ ID NO: 98377 - DNA, 889 bp, Zea Mays
gatcacccactgcaaactccaagtcccgcctcctcacatcagcgtagctcttttgatggctctgagcggccaaaatattctgacaaatctcccgaactttctcagatgtctgctgaacccagtcaggaccaaccagagatctctctcccaaagtctcccagcacaaaggggagatacatcgcctgccatataaggcctcaaatggtgccatcttgatgctagcctgatagctgttgttataagcaaacttagccaaggcgagatgatcctcccagctacccttccaagatagaacacaagcacgcaacatgtcttccaaggtttggatagttcgctccgactgaccatcagtcttagggtgaaaagcaacactaagagaaagcttggtacccaaagcactgtgaagactcccagaatttggatacaaatttggagtctcaatctgaatcaatggactttagcaccccgtgaagcctgattacttctttcatatacaagggaaccaactctgaagctgaatttgtggtcttcatggggataaagtgcgtcgacttagttaagcgatccactacaacccatatagcatccctgcctcgaggagaccgaggtaagccaaccacgaaatccatagtgatatgctcccacttccactctggaatttccaatggcttcaataaacctgcaggcctcttatgttcggccttcacgcgctggcacacctcacaagctaccacatacttagaaatatcaaccttcattctcttccactagaagttttgcttcaaatccctgtacattttggtttcaccagggtggacagtgtaaggcattttatgagcttctctcaagatatccatcttcacctctgattcctgtggcacacaaagac

SEQ ID NO: 98378 - DNA, 1609 bp, Zea Mays
tgcttcttaccatgagcttgaagggcagggatgcgttctctagatgcgaatagttagaacccgttcatctatctatctaaccttggtaatgtgaatgggttaggggtgacgggcaagccaaagctggtaaataaaaagaagtgggacgtgtttttacctgtcctctggttagtatctttccagcatttatagctttgttagcgggtggttagttagtgtttgattgaggcctaagctcgtgtagcaatgcgggctcgctcattcaattaattatcaagttgggtttgcttttcaacaaatagcttcagactttagcttcttacttattgtgtgtagtcccgttctttgcttatttatggttatttgtgtagtcgagtcgagtagtacgtatcttactttgttttttgtttggtggtgtagcaaatatagacttcagagagtatatatagaaagtctgtctatctaggaggcatagttagatcgtttttccaatgcatggtaagtccaatgggctattattttcttcttaaagaaaggcaattacctaagtagaaatagcacaatccactctataagggcaatgcgcattaaattacgtcggctgtcaaggctttttccgctttttcactaaatagtcctcccttgctattattgccactctatatagcagtttgtaatcctaattttcaatctcgcgaattcaataaaaagaactcaaggctgcgacatccactttaagactagttaaaaagaaaaggttccacccttctagttagacaaccgatatgcgacatcatacttagtatgggagttgccgctgatctgcgacatcaatagataagcatggtatgcgaatatgtgttgttgatctctgcatcgcgatgctactttcgtaggggagagcagtcagtccccaccaaggtgggtctaagggctttttgggggggtaatttcgcttcgttcatcttcaagtgccgacagtttctattcccgagtgtgaaaagccagtactggatagacggtttagatacgtcactgagtgccccatgggtcatcttgtttcctatttattggaagctacataaagcatccctatattaagatgaagtaagaaagcatcagtcctctttttttctgtcttctatgaaagaatgtagctcggtctttcaaccctctgcggaactgtttgagttttagcattgaccccatttccttttgatcgtattacgcttgactcgctgcaaaacttacctaccttggcttaactcattaacttccacgactgggttatctataactccttatgaaggccttcattcttctcttatttcaactcgcctgtccctgtcaactagaaaggtagtaagcaagtactgaacagaaatccattagcttaacacatgcctacgttacaaacattaagggaagggtaaggttgattcattttcattttgtttttcattcacataggaacttagctttgaaagaggatgagcggtaaaatggattatatagcattcctctcttttcttgcatttctggatttcctatcctagtttagctcatggtggttcccctttgggaaagggggttctccttgatcccagtt

SEQ ID NO: 98379 - DNA, 935 bp, Zea Mays
ttcgtttctcaacctgataacctctgatcgaaggttattgagagctatagtgcaactctcatcttcagcgttcttttgcgcccttagggcgttgctaagtattaagccctgcaagacagaataaaggattaacataagaataaaaagactccaatacagagtccataagcttcaaaattcacaacttttgtaccttcaaactgttgtatgcaagactatccgcaagatcgtccttcatcatggcacaaaggccagcttcgagcttcggaaaacccaaacttctggccatctcccggtagacggataattctttgttgtccgggaggcagtacaagaaatcatcttcatccgtaccgttaaacactaaggcccccttcgggtacttcagttctcgggcatagtgtttagcttcaaaaatttcctcttcggataaccactttcccgaagcatgtcgaatgatataatcaatatcttcggagagtgcttcaggggcaagggatttagcttcttttgccgcactcttcccaaaaacctatattaatatctagagatattccttcggccttctgctcggtggcggcaagcttcatctcaataggcactgtgggctctgcttcgacttcagcctgggttattgtagtctcgacttctatttgcttagtatcagctttgggttgtgttttgtcagcttcggcaactttccctgtaggagcgggacttatggagtcggttgtttctaaaatatctaatacatttaccatcattcttctcttaggggttgtggcagaacttttttctgtcttcagcgctattgcttctattgaaggacttaaaatccctagcatctttgttatttcttcagtctttgacctttcagtcttatctttgtcaaccttcgtttcaactagctcaaccgaagatgccttcagcattgt

SEQ ID NO: 98380 - DNA, 537 bp, Zea Mays
tttggtatcttcatccttgcaagtctcctatattgtttcttcccatattaacttcagtcttcttccacctttctttccattgcagtcgcgccttaggatcctactacacaccgatgaccatctcaaatgatgttggacaaagttttctttaattggtgctaaccctagtctaccacgtatattatcgtttcggactcgatcccttcttgtacgatcataaatccaatggttagccatactatagctatgtccccgagccatctccatgcctcaactagaataccatcagggtccattgccttacctctttcattataacacactccctagatatcaatttgcaatccaagcatgctcgtttatcctctcttcttgcgaggacaaagtgaatataaggcaacaattctaactaaaggcaattcagctactcacccgactcacctgaactttgtgggttgggggaaaaaatgcacttgcaccctaattttggcagcatgaaatgaagccacagtgaaccaaaaatttcagttgcccaac

SEQ ID NO: 98381 - DNA, 581 bp, Zea Mays
gtcgtggtcgtggtcgaggtcatggtcgcggtctaggagctcgggtggctcatgggattgcagcctttttctccatgtgtcgggatatctctactgatgtgcatgagctggctaggcgctagcgggagactgatgacaatttgcgccgccagtcagtctccatgggtcaccaatttattccttgctcccctaatgtgtcccttcatgcaccaccttctgatataaatgaatggcaccaacaggcctatggtgtcccatttatgtctgccgatgatgaagaagttgaggaagattttcttgttgatgatgtggatcagtttgcccctcctccttaccaagctcagccgggtttggctctagtccacccacctacttagccggctactgaaccgaaaaatagattgggagaaaccggttcagtcggttttaggaccggctcagccggttttcagtcagaaaagtccaacggccaccagcttttggggatcctttatatacccctttgccctctctctcttcattcactcctgcccatccacgaattcttggctgacctacactcaaacaagagcattcacttc

SEQ ID NO: 98382 - DNA, 790 bp, Zea Mays
tttgggagttgccgcaagacctttttgtatcttcgacaccgttacttccgctgaagggcttaaaatttctaacatttttgttccttcagtttttggatcttcggccttatctttaccagtctttgactcagcttgctcggctgaggatgccttcggcatggtagctggttcttcagccttctgcgtaggagaatgggctcctttgggtcagcagctgaagaagtctccccgccaagctcaggtaccacgaccggctcaatataacgtggctggtgggtaaggactttcagttttttgctcttcggtgcaggctcatcgggggcggccgaagcaacaagtttggccgaagcagcagccttcctcttctttccccgtcctcgcagcgggtagcagtagtcggggtaaacaaaaccaatggcatcaaaaaatctgtttaatctcttttttccccggcccccgaaggatgtggataaggcattatcttccgctttggaatacggcccaagcagttcatcacttgtagcttcgatacatttcagctagtcatcattcggttcatcaaatttatctccgtatctgaaggtgtatttcagttgaaccagctcaccttcgccagacttggtgacagtctccttcggcatttcccagttctctacaagcggccacactctgaaagctatatgctcctgcattaaatctcttgtaccaataaaaaaagcaaacagtaccgaaagctttttggcatgcttcggcagcttcgtcaatctcaacctttggccttcgaaggccg

SEQ ID NO: 98383 - DNA, 479 bp, Zea Mays
gatgatcaacacatcagacaagacatttgtagactcattgaagacctataatatcattcaagtgttcaagacacgagatgaaagaaacccagacgaagagatgcaaagaaacagagaaaaatagactacttggtagcactatacgtgttcgatgaggcaccagataagataccagagagttgcattgtagtgaagaaatgacaacagaaatagagttcatcggacatattggtgtgcactagatggggctacacattataaggctatctctagcagtctccctatcacactccctatttcaaacctcactctgtaaacagtgcggtctacagtgcaaaatagtgttttgcacgcccatatacatgttccactagagatagcctaaggaaagcattgggctattggttgtcactatggtttgaccctccagcttcatcgttgatgttgaagatccactacttctaagatctaatgactcg

SEQ ID NO: 98384 - DNA, 291 bp, Zea Mays
atgtgatcctcgagccagtccatgcctagtatcatgtctttacccccaagtggtaggatcttgaagttagtcgaaaaagtgaaacccacacacaaccacttgcactcaggtactctatatttgctccacatggtacccccatctgctactcgaccctgaacaggcttgggcaaaagttgaactcctggcatcactcccataagatgatggctccccaaaaaactagccgagctgcctcaatccaccagaacaagcactcgctggcaatgaactaaaccctagagtctgatg

SEQ ID NO: 98385 - DNA, 601 bp, Zea Mays
tggactgggagtggtgaaggacgagcgatgggtgttgattgagggactagaaaagccaagtgtgcagttgtggtgggaaatacataggatcatcagtaggcacaaggacatagcagagcggaccgtcttgtcgacgtagttaagggccggcgagacacgagtctaggacatgggggatccatatggagtatgctacatgtagaggtttggtggttgagcctcaaaatcacccagcgatggtttgcatgggtctagcctcaaaccctggtagtgcagttgtagagagaattagaagcgacatgtggaactcgtagagagtgagtcaaggcgaagcatcttcatgaaggaagtatgtctatcagatcattagattaagagttggcctattttgccctcactgagcggataacctctatgcatatagaggtagtttaagaatgtgaaaaccccctctataaataaggagagagggatgaaccaaccaaccatctctctaactatatatctaggtttttgtttggggttttgctctctagtttcttttgtctaaagatccttaggtactatagacttgttgcatctatgtttttgtgaatcacga

SEQ ID NO: 98386 - DNA, 276 bp, Zea Mays
tctatgatgaggagtttgctgatttgggatggggaagaggcgaaaatgagattgaggatgtgtttatcgttgttttgtaggtgagaaatgcttatcaattgctatgagctactagcttaccacttctcgtagtttaggtgtttgataaaatgcatatttaaggacaaattagttattattcgattcttgggcaatggagtgccgttggttggtacctacatagcatggtattggttctgtagatctaaatgagtgttaagacagacaagattgacc

SEQ ID NO: 98387 - DNA, 418 bp, Zea Mays
ctcctaaaaacttcaaagccgaagctgtgtgcaggtccaggtcccagtccagtagtaggtagtctcaaactgtagagactacctcctaggggttggaccaccaattttatctttggtatactggtatccagcctcgacacgttaagcctacctcccaggggggccaagtaccagggggaagtcaatgacgctacacacagcaaggacaaataacatacagataagtttaagttccagtgctacctcattagcggttcttagaatatgttacaaaaccaaaagttattacagtcgccccctagtggaaccctcgccttgtttctacaggattgattatacggcgtcggcaggatcacgctgaaagtgagcggccaccgtctccacgtcatcttgtacactctcccgggcggcatcttct

SEQ ID NO: 98388 - DNA, 439 bp, Zea Mays
ggcctagagaattggggacgcttcaggtggtatcagagctgttaggttggccgcaggacataacccttagcctgattcaaaagtttttgagtccaaactattttcttaaaaaaattcttgctctcatcccttcatttcaaaaatgcttccccctttccttctctcagaagtcagatggaggtccgctgccaaaccagcttatgccagaatgaagatggtttccccaagttactgagagcatgcacagttcacctcggaatcaggagtcagccagagtatgatggtcgtgaattcgtcgagcatggcacagagaagtgtgtcatgactgtatacattggatccagtctgcaccatgtggaatggagtgtcactgctgctgggcacagattcaaagacacctgccaagtcgtcgcccgcaaggcattgagggccctgtgtc

SEQ ID NO: 98389 - DNA, 355 bp, Zea Mays
ctcttgcaactgctcctagaaacgtgctacgaacggtgctcctctgtctgacacgatagtccttggtattccatgcaaacgcactatctggtcaatatagatttctgcatacttctccgccctgtgggtggtatgtactggcaagaaatgagttgtcttggttaacctatccataatgacccaaatagaatcatggtgtcgggatgtgttgggtaaacccacaataaaatccatgctgaggtcctcccatttccaagatggtatgggaaggggctataaggtacctgctaccttcaaatgactagccttgattctttggcaagtatcgcattcagatacatacttagcaatttcc

SEQ ID NO: 98390 - DNA, 441 bp, Zea Mays
atttattttagaaattagcgaaacatgatttaaactaaattacaccccaatccacttcaatacatgtgcattcgggtgaatacgtgagtatccaaataagtcctaagggtgtgttttgcagtgcaaccattactgactcgtgttagacttgataaaggcttaggcactgcagaggtactgttttggcaatcacacctggcatgataaaatgccggtttctgtgcacggcgagttgattcctctgtcatgacgattggtggtactattttagtgacagctaggcttaccactagagcttgtatgcatgtttgcacgaagactttgcataggaatcctatatgtttgtactgttgtgttgccgtcatgtttggtgtcgatctctctgcctgctaatggccattctgtgaattggtgatttttgggggtacttgctcagcctcg

SEQ ID NO: 98391 - DNA, 650 bp, Zea Mays
ctccaaacgagatagaacaccaacaaactcattcaacacatttattgctttgtcatatcctgcttttgacatattagcatgcatggcgaacaaccttcattgtttttgttagcaacattttttgtctatatgatttggtaactccatccttctcccaacaacttttatcaattctttcaaacggcacatcttgtctagatgagacagcgtacctttgaaatatatatttttaggtatcttttctacctgtaggtgcatgaagacccttatcagatgcacacatagtagacctgcattaaccaagcagatttaatgtcttgttaatactatacattcctaatgataaaataataaaataaacgacgttaacgtatcaaaattatatcagcatcaaacatgtatgttcccaatgtttacactcgcatgtatactctccgacatttatgtctgctgcaaccttgaatttgtgctatccccacacaattttgttcgatccttttgtgtgttgtacgacccaatcattatcaccaccatctgggtcagcagctattctgtatgcagtggcatacttcattgacttctcaaatctattcatagtagctctagtgtatgcgcttgccaccctgatttcgaacctatataatgcgtcg

SEQ ID NO: 98392 - DNA, 354 bp, Zea Mays
aagaaccatttgttgttttcggtcatgtggcacgaataaccgaaatccatgagctatatattctctaggcctctgccctacatcccggttagaaaatggcacaacactcggttagggtactaagaataatactagtgttgtggcatctgtccataaaaggtgttaggaaaaacaccacccatcctcggtccagaagggaactgataaccacaataaggaaactgtggtccgctcggtaagtaagaaccaaagccactatcacggggtccatagcgatatggcacatgaccagcaccccgccgggcacgaccaccctgtggtctcactgcctgaggcctagcagcaaggaacaag

SEQ ID NO: 98393 - DNA, 314 bp, Zea Mays
atcatgatcaaatttatgagtgaagagtgtagagtcggctttgcctatttcaaagccatttttgagaagaaaacccttaacacattcataccaagctctaggggcctgtttgagcccatagagtgccttatggagctggtagacgtggttgggcttctttggatcttcaaatcctggtggttgctcagcaaagaccaattcttgaataggtccatttaagaaggcgctcttgatgtccatttggtagagcttgaaatcatggtgagtggcaaaagcaattagcattcctattgactgtaacctggctattggag

SEQ ID NO: 98394 - DNA, 306 bp, Zea Mays
caaaattttacaaataacccctcacagctgttgccattagatgcgagatggatatcacagatttaaaatgtgcatgtgagcaccgtgcctcttggagcaccagatatgttgccatataaattgccttcctattatatctgtcttttaaaccatagaactaagcttgatccctcaacaaacaattaagtggaattcctttccagcccgatgtttgaaacatagatgttctagttcaacaaaacaaaagatgcatgacatgaatgttatcaattacaataccatggactagtgtgtaacaatgtgatt

SEQ ID NO: 98395 - DNA, 285 bp, Zea Mays
gaaaatttctatttctcgatcacatctatctccattcatcaagttactcatgaatgtttcaccaaatttggaattattctatctcgggaacaaccaaatttggagcctgttaaaacgtttatttctcggagcaaatgcaaattcgagagtcaattacgtctcgtaactcctgtccagactcatttattcggactcttgacagttgtgatattatccgatctatgtccgaatccgctgtctcgatagtcggtctacgtccaaatacttaatctgaatccgcattct

SEQ ID NO: 98396 - DNA, 414 bp, Zea Mays
tgtcccatctgctgttaagggctctgttgactctacaaggaaacttgcccctctattcgttgtatcttttttcaattctagcccaaagcccctccctacgttggccagtgtgcacaacagggtcactgcttatttgcaaccaggttgtgcaaaggagaagatcttcagggccagtaaagttttgttccttagacttcttgggtttatgtataggaggtgcattcttttcaggactattgatgtcatgaacactgtgttcagcatctgagtccaagttcacaggtaatgaaggtatagtattggaaccctgcaatggtgtactagtattggaaggtggaatggaatcaggaaatggatttacttcagctgacccaagaggattcctgacaaagttcaagtaatgattccagtaca

SEQ ID NO: 98397 - DNA, 526 bp, Zea Mays
cgctcggaggatgagtgatgggtagagggtgattagctactcgagtaagcagccaccagtagccttccgcgtctggggttcgcgggaggccgtcagctatctaggccagcacccctccgacttcactcgacatgttcattgcacgagcaaagttggggtataggttccgagcaaagagagggttctctcggcgcagccttgcaccttgctcgacttgctctcgttctcggtcctgagcttgtcggcgatcgcgacggcgagagtttttcctttctcggtgtactcgctcgtctggagtttcccctacttctgaggcttcgtcctgggatatgggctgcgccagatcccattccctagcttcgtgatgtcgccgtatgtttcagcgtctgttcctccgtcgctgtgcttcacgttggggaggttgcatggtaggcttgtcgttggagatgggtgatgactccaatgtccctccgatgaagaggacgtcgaggtagaaaggagccggcgcgatggtgctctttcttcc

SEQ ID NO: 98398 - DNA, 371 bp, Zea Mays
gacgtgaggagatcgagaatcacctgaaccatgcctccatgaggaagatggcgagaacgtgtctttcgtttttgattttctgtctacaaccacctgcccgtcgctgcccttgttgttcacgggtttggtttgttcttggcccaatgggctgtcttctgatgggcccaataaaatgaactatgacacttgccgggcatgacattactgccccctaaaaattcaacttgtcctcaagttgacgtttataactttatatgtgcagcacttgtatagcatgagagtgctagagtaatcactagactggcttgtaaatataatgcaagagattgcttgccctcatataattgcaaagatgactgtaccttatgatc

SEQ ID NO: 98399 - DNA, 490 bp, Zea Mays
cgacgcggggtttaagtgctttctttttactattttttataattattgtttatttctaaaacaccttttgactaatgcatttcatcaagtagcaccgaaggcatgggttcaagtgctcgcttttcactactttttatataattattgtttatttctaaaacacctcttgactaatgcatttcgtcaaacggatagtataggcaagtgcaaagctgctgctctcatcagactcccagtagcactgacgacgcggggttcgactgctcgctttgcactatttttatataattattgtttatttataaaacacctcttgactaatgcatttcgtcaaacggatagtataggtaagtgcaaagctgctgctcttatcagactcccaatagcaccgactacgcggggttcgagtgctcgctttgcactattttttatataattattgtttatttctaaaacacctcttgactaatgcatttcgtcaaacggatag

SEQ ID NO: 98400 - DNA, 507 bp, Zea Mays
gtttgcttatcgtatgttggaatgcttgttatgatggacatgtaatgaagttgaatctttgtaatgattgtcaccaaggtgtgggtatcccctgcaacttggtgtagttattaataaagtcagttatttagttgggtaatccatttatttccactttactctttatctaagaagttgtcagtaaagatgatcaattgttcagtgctgtgaagatttccgtatatcttttcttatgctgaaagatggcagagtcagatctgatatgtgtgtaatttctagatatgtctgagaacaggcgcagaggtgcgaggcgtgctcagccagagcagcaggcaccccaagaggaggcagctccacagcagcattttccaccgccacccatgatgaccattgagcaaatgttcttgatgcagacccagatagtgcaggcaattggtcagacattagcagcaatgcagcaggtgcagcagcagccaacgccacctcagcctccagtgcaagtccaga

SEQ ID NO: 98401 - DNA, 362 bp, Zea Mays
cctctatccaaaatgatcttcttcggtacaccgtgtagagacacaatccgagccatatataactctgccaattaagatcccttataagtgaaatgagccactttggtcaatctatccgcaacaacccatatagaatcatatcctttcgaggtacgaggcaatccagtaatgaagtccataccaatttcttcccaccaccattcgggtatctttaatgggtataatagtccagctggtctttggtgttcggtcttaactctttgacacccatcgcacatagccacatgtgcagccacatctctctactctcttcagtccacaccactagtacttctgcttcaaatcctgatacatcttggtac

SEQ ID NO: 98402 - DNA, 368 bp, Zea Mays
gttcaggcagcagctgagggcagatgaggcagcacgaacccattttggggacgatgagtatgaggatgaacttaaagcggctatgcatcagtcacgtgtagagcacgaatttagtcagagggctggtgcaaggtatgacaggggtggtggatcctccagccagaggatatctcgagggccacttgataggatgatgggaaggagtagggaacaagtacctgagcgtgttagagactacaatcttgctcaagcctctcgaccaaggcaacagaggatagatactggtccctggacaagtaagggaaggagctcgaaaaagattcttggtagggcttaggcaaaggcttgtcatgctattggcatcccgg

SEQ ID NO: 98403 - DNA, 687 bp, Zea Mays
ggaggttggagaagaacgaaggaacccccaaatcgtggaaagtcagttgatagctcgatgaaggatcaccaaccggagcaatccgcaatgcatcagtggggaccaattcaatgtcatcagcagaaatcaaaactctgtcatcaggagcgccggcctctaaggcgacttgctgatccaaagctcgtgctgctgccatgcaaccagaatgcggaggagaagaccctacgtgaacatccatggaagtatgagagggagaaccaactcggacaccctcgagggctgggtcatagctcgcgctacccatccgagctggatcatctccggcaacaccctcaggggctgggtaaacgctagcgccatccttgaggaccgagccctctgtaacagccacctctaaggctgaaggaccttcaaccacttccatgggaacagagcaatccagaccagcctcctgactcttaagaccacgctccaaggtcgatgaggcacgagacgccgctcggaataactccaacccggcatcaggcatatcagcacaaatttccatcatcccaccatctgccggctccgacaacagatcttctggaaccatatcttcgagagtctgatcaaaatttgccagagacaattcttgcagaccaacgagggcagacaaagctggagaaggaacaccactactctccccgc

SEQ ID NO: 98404 - DNA, 432 bp, Zea Mays
ataattaatgctgacagaacacatgagtagaggcatatatgcggagcctgtcagattccctccgccttagtaacgcatgagtaatcagtgggagtcatgatgactgcagtctatgcagtattgataggaagtgacccttttcctggtaacgcgggagtaatggtgagtcattgtccttgctatggtaacctgtgagtaatagcacgacccacgcaacgtggaatgggcccaacgtctgtcactggaatggacaaacacacgtcttatatgtaataaatgcaaagatgcgcgtagcccagaggctttatgtcaggctccgcccattggcttacgccgcgtgaagtaggccacgtggcagcatcaggtcttcgactgggcgaggagcaggagtatatgtgataagctccagatcccaccagatcaggtctggac

SEQ ID NO: 98405 - DNA, 308 bp, Zea Mays
tgttactcaaggccctagctcaacacatgcacctgtgacctattatcacatgtgatttagattgagaaacaagcaccaaaattgagaagcaatgcattaatcaagtgttgatcatactataaggaatatcctagccttttcatgcacctccaattaggagaatgcttagaaccctagaccaccctccttaagccattagagccccaagattggattagtgggagagctatgtaaattaccaaatcatgacttaaaccttttacaaaagttgtagcacattgaaatacctacaagaaatagtaaggaag

SEQ ID NO: 98406 - DNA, 313 bp, Zea Mays
ggacctcattagtgcatagatagtagcaagtgtgcgcccactcttttcattagggttggttggattaggtgagagtttgttcttgttactcttagtgatcggtattacatagatgacttgttggtatttgtgagtttcgtgatcactcggtggagtttgtgggtgacccaactcatggtgtgagtggttatgggtgattcaccttatcagagcgaaaaggaatcaggaatattgagcactcagtccttgcatggatcatggcagagctacacctttgcgtgagtgcacaaatgaggacaagtagggactatcg

SEQ ID NO: 98407 - DNA, 572 bp, Zea Mays
tgacgtgactccttgactccacctcttaccggtctatataagttgaccggccccgtgaatacatcacaacatttactgctcgcaccaacttgctgccaccaatttctttgcctctgaagctcttttttacagctacaacccttccacaaggctttagaatccactgatggccagagtctgctttactgctaggttggccactccaactttgactgaggtgctacaagtggaaggggaggcaccgaacactattaccatggttccgatatttgaggcaataaaggtgacaactaaatcgaaggcatccgagaaagaggacaacgctctagagtgaagtgattctgacatcgaggtcagtgatgacaaagaagatgatagtgtgcttcgacctagcaagccaagccacattgaattttgacaatctactgtgaagtctgaagaccttgatgtcctgaaaagacttggttatattggtgaaaaggaagatgacatgatcagatttgttggtgatgaaaccatcccggagccaaagaacgatgagatagtcatactcaaaagcttattccaagccg

SEQ ID NO: 98408 - DNA, 272 bp, Zea Mays
tccgacgtcgaggatatgtccttagctagccttgacgaccttctcaagaaatttggggacactttagaaagggagtttggaagtaccttagaaagcgctcacgtgtagtgcgacttgtggtaactgtatgcttgtaatgaacttgtgtgatgaataaaataacttggttgaaaaaattggcatatgcatagtagtaattctctccccctggcagatggcttcggataaaaccacgcctaccgcctccgggattggagcagggtttcccctag

SEQ ID NO: 98409 - DNA, 412 bp, Zea Mays
tcccaattccattttgcagatctctatctttgttcatctgtgcgaggcctacctcggaattcttccccactttggtttatggaagtatttatatcactgtcatcctgggatggctgggggtcagcaccaactcgtgggtggtgcaagtctggagatgcggcacggaaggaaaacagagtatcttgatattccgcttaaggacatcattaaggggtggcgtcttgagtggtttattatggaaaaccatggcaagtccctccccctcgatcgggaagacagccagatgtgcgcactccaagttggattgagtctcctactgccttggaagtaacagaggctaaggttctgcttgctgaagtctgtctgctgaaggaaaaaggtttgaccaccgaagccgtggttgctgattttg

SEQ ID NO: 98410 - DNA, 889 bp, Zea Mays
gtagggttccccttgggatgcttcacgagcagggagtggtcctttagtgggttggccacaacgcactactggaccagactgtggctagacctgcttgatgaggatttaagtccgcctaccgatcctgaaaggaggaggtcatggaatgagtctcggacgggctctagcattcccacgatctcagtgaaggcgggtcgcagtgcgcagcgctgcctgccacctccttgaggagaaccaagctggaggctgtcgaggcttctagcaatgtcaagcaagttgctcgcctagggaactggggattctggggcctagatcatcgtccctctgtcgttgatgacgaagtcaagactcccaaaacgtatggtcgttctaggggtccaaactacgccactattgttgttggccatccggagcctgaagagttcgtcaagaacatgcaaggcccctacctagcgcgccaattgtcggtgttttgaacctctactccaacaagtaaatttctagatgtgtgttttgggctctggatggtgtgctcggtgggcacaaggtttatactagttcgagcagaacgtccgtacatccaatcctcggtggctcgcgctatcgacaccattgttgctcgatgctcgtagtaggggttacaactgggttacaagcaggctagagagggaggaagggctcccaagtatcttatgcgggggtggtcctaaagactatggaactggagtcatacgctaagtcttagctccaaactttaggacttcaggtctcttcgagtgtgtgtggttgccttctatcgagtgtcttctgtctcatgtcctctagggtttgtccctgtattcgtggctaacttcctccttttataggcaaaggtgggggtcggcggtcg

SEQ ID NO: 98411 - DNA, 338 bp, Zea Mays
ggacggtttgcgtggtaggtgcaagatttatactagattggacagaatgtccctacatccattcattggtgccttgcactaccggtaccattgatgatcaaagctcatagtaggagttacaagtaggagagagagggaggagaggctcccaagtctcttattcgtggtggatgtggttacaaggtacagtcctagctaagtcttggcttggtggcgaggctccaacctccgggtcctcctcctgttcgtcggtcttctgggcgtcgtctcatctggggttcatccttgtgtcgtccgtccaaaaggaaggaacctcctgtgtccgggggccgacctcc

SEQ ID NO: 98412 - DNA, 712 bp, Zea Mays
ccgggctcgacctcggtcgcaaactacactgtgaaccccacaggcagccactccacccaactgtagcgcatgttgagggacgactcggctaacgcctcgggaagacttctgcatcgaccaagcaggggctctgatctcgatgagtgttgtagggaatctagacgtcatcgcgcgccaagacgatgacgaaccccttaagcaacctttggcccatacccagcgctgttacaaccactacagcatgggtggcctctccctcgggggctcgggcgtacggacaacctctcggtcttggcctcagctctctacgggaagtcagcagacacgaatctactgcatagtacgtcgccacgtcagacgccatgcatctcttcttcgaatacaagatccagcttcactaaggatgctccccttggtgtataaatagggcagggtccctccacggacgggagatcgacatcgacaacatcaacacacacacacacaacacacatagacgaacgctcaccctctcactctattttagatattgacacttgcctcaatcatctctagggacttggggacttcctctctcccgttgtgcttgtaaacccctactataggcgccacggtgcgagtaatataagcctcattctctttgctggaagtagggccttgagtattttgaaccaggataatcatttgtgtctccttgcacaccatctagagt

SEQ ID NO: 98413 - DNA, 501 bp, Zea Mays
tgatttccgcaatttaaatagagcaactcctaaggatgaatatcctatgcctatagccgacatgttgattaataatgcatcaagaaagagaattattagctttctttatggtaatgtcgaatataatcagatctttatgacacaagaagatgcgtctaaaacgacctttatatgtccaggcttcattggtttatttgagtgggttgtcatgacatttggcctgaaaatgctggcactacttatgaaagggctatgaatttaatctttcacgatttgttgggcaacattgtgaagtttacatcaacgatattgtagtcaaatcggctgagtttagttctcataaggctgatttgcgcaaagcctttataaaatgcatcggtacaatctaaaaatgaacacgcgcaaatgtgcttttggagtgtcgggtggtaagttcttaggatttatcattcatgaacatggtatagagatagatcatgaccaaattaagtccattcggaa

SEQ ID NO: 98414 - DNA, 1017 bp, Zea Mays
acgcaaagaccgacactctccatctactggcacctaattcaagccttaaccgaagtttcccctcaactaatttcactaatggcgcactaacacgcactgaccacggtgaccgtatggacaacggccaactgaacgtgttcccagcgatctagggtgacttagctcaattgagttggtcgaggagcatcaggggaacacaagaatgttgaaacaagatagcagggagcatgaacagacctagaagtcgttgaccacggtgagggctcaaggcacggtgttcttggttgatttgggggaaatcccaaattggggaaatctagtggacgattcgagtcacgggttgctgcactggttgcataattacctagcagagtggatgggggcggcaatttatagcctccaacggcggtggcgtccaattttcacgaggatgtgctagcggccggaggggaaaaggggtactggcgctcgggatgagtggctttcaccgtggcagtcctccggcgatcaccggatatgcataccatgattcaccgtgtcgtgggctagtgcttaagcacgtggcacacaacgttgagcgatcaacgacggtgaagtctatcccgaccgcacgacgagcaagtgggtacggtgaatctcatccgcgcccgagcccgagctgatcctgtgccaagatttttacttcgtcgtggttatcccctcaccagcgagcacgaatcacggcgacgatgtaaatcacgacgtaaaaatcaccggcggcgagggcaatgcatctgcaatctatttcagtcactgtaccatcgcaatcttcttcagtcagcctgacagtcgatgtttagggcagattttctcccaattttccatggcaacacaaccaatgctctgcagcaaagttgtagccctacaaaccattttcacttttgctatagcatccctagtcaaattcccattggatcatgattgaattcgagccctaagttcatgcaattccactgtcagtctgaattcagactccaa

SEQ ID NO: 98415 - DNA, 623 bp, Zea Mays
gcaaggtgagaccatggagcagtaggacaatactatcatagaggcgcatctgagagggtagttttcctttataacttatcatgcatgtgtgcggaccaacaggccgggtttatgggggcaaaccccaccgggttggcatacacgtatgcgctacttagttacaaaagggaaacaactcgacccctcagacctgctttatagatagaacttacagagatgttccagcaccgggggaggtactccttcagtcgtagctagacagttgccctcgggtcggagtattctcgttaccttgaagggtccttcccagctggggagtgttgcggagccctgatttggtttggtacttccgtaagattaggtctcgaccctgggcttccatctgcgtttgacgaaggagcccccgtccttggccttggtcactcctggataaatctgtcagaagtctggacccgtgggggacccagaatggtttccggaggaaggcaggcttcagctccgtaggccgggggacatggggtcccgccggtggttcacctagtcgccatcggagtgggagtctctagtgaagacgtcctttaggtccccctcgggtgactggtatctgaggtcttgctcagccg

SEQ ID NO: 98416 - DNA, 286 bp, Zea Mays
aggtacccataggaatgcataccattgcctagtcaggtagaccatgaacgcatgtgatgtcacgaagccgacaaacttggagaagtagggttgtaggccactcccgtcctcctgtgaagccgacgatcatagagagacgatgaagaaggaaggggcacctgggttgcataccacctcccatcctcctgtgaagctagtgatcggctggtcgtagagagacgatgaagaaggacaggcacctccatggacgtcaacatgtcatgctgaggaattgtagaactgtcac

SEQ ID NO: 98417 - DNA, 774 bp, Zea Mays
gtggaaacttgtcagggtgtaggatatttggtgatgcttcaacacgattgagtttaggcccaaaccaaggtggatttgttgggataacatctctagaccagcaagtaagacacatacaaggggaatggcattagggactcattatccctcgataaggttttgacgggtacctagaaataggggtacccaaagaaagcccttaacttatggcaagcccatccggtacaaaggtcgaccaactcctgtcgaacaaccccgcgaggtgggctggacgaccaactcccgctgggcaactcagcgaggcggacaagtcgaccaactctgacgagcagctctgcgaagtggaggagcgaaggcccataataggggcagaacacccgaggaccccaatgacataatcctgtcatgcgcacgcctatacctgcctgacatagagatgtggtcggcactctagccccacgccaaccatgatataggcacgtcaccaccaaacaccgtcttggcagatgcacgacatggtagaggagtgacgggggggggggtatccgtcaatggaaaagggtgtcatcgcatacaattcctaatgtcccctgactctacctcgtggggccaaccaagctctgccaccaggatcctcagcaccagagactctacaatgacccacatacatgataggacggggcaatctgccatatcgggtgtatgcctatgcatgtaccggaggacgatgttagggagattacatcagaagggctcccgtaaacaacgaaccac

SEQ ID NO: 98418 - DNA, 575 bp, Zea Mays
tatagatttcttcatctttctccgcatgtagtcctcacaatacttagattctcctcacaaaagctgaaacaaagacagatcgaaccagtgctgccagcgatcccagtgctgtgcatgaatttttcattgttggcttcctcggtgaacggttaaaggtcagattacttgttgaaattttgtcttggccagtggccacacgtgtgaatttacattaaacttggagctagaggctagagcatgtcgtgcactactgcatacatatatatattatccaaaccaaaaacaaaaacatttggatactaatgttgggtagctgtagcaatgtaggtcagtcgtttcttgctgtacgtccaggatatgttcttcccttgccttgctaccgaagcatctgatgcagttcgcgtttatcgaggtaaagtatcaagtgagttctacgcttttcatgcatctgacatgcttgcctcgtccttcgtctaaaagtaaaatgagtcaagtctatttaacctttttttcaaggactcgcactttttaactggaatacacttcaaaatatgttctcacatggttttgctggc

SEQ ID NO: 98419 - DNA, 1227 bp, Zea Mays
ggtttgctgtttatttattcattctcagttttggaggccgaaaattcgatcttggcgctggtctcagtgtttcgaggcctcgaggggttgctgtgaagaaccagaggaagataaaaaggtggttttctcgccggttttccttggttttggggtactgaattctgagattgttctgaggcaggggtctgtcttgctggagaatgaagatgtggaggtttgtgtgctctgcgcgtttgttttggtgaagacaactagctggagtaaaaggaagaaaaaaaagttccgcttcctttcttttgcgtgttctgatccttctgagatatcccttcctgccgcttcagagtttcatttgtttccgactcggcatcggcatctcgtataaaccgaggagacacggcaatttcaagggccttcgtttgggaccaacagaataacctgttcctgcctgcaattttttggttctgaagactcaaagattggattgagtgatctttgaaaccaaatcttccttcggtgttttttggcattttgggcactatctgtgaagtgtagcaggaccgcctctgcttttatgctcggtagacttctgtgatcaagtattcaagtactggtaaaaggtacttgccaaaaaccatgccctttggatgctccgaattgttatatttatctaattttagttggtgattatagttcttatgacttcttgtctcatatatttacacaaaggaaaatcatgcaggtagaacgtactttgagtacaaatgcttctggcatgagtatgtcgaaattggcatttgcataagtggggtccaactgttttcttgtctcctccctgtttgttttcttcttagacaactgtacttttgtgaaactagagtttgaaactgttcatcagagtttggaagatatgagcaaatatgagtagtggggacttgtgagtgcagaaaatgggaagcttttctgtgtttgtatttctaatctggatcctactacaacattattcttactcgcttcatgcatttcttgctttcagattataagcttgtctaaagcaagcccttagaaggaaagttatctgaccatgttctcagctatcatggcaaagaagaattacaaacagcattccaaatctgagaaaattcaggggggttgtatgtctgggctgattcgcatgcttgatttccgtcgcagtccaaaacttctttcagacgggagaggtgaggtttt

SEQ ID NO: 98420 - DNA, 283 bp, Zea Mays
tatctttaatagataaggcagcttcggtttgcgccaaggattttacatgttcgcaacctatcttctccaaaatagccgcaattcccctagcacctgagaaggcgcagacatctccacggccacgcaatacttcctcaaaggcttcagcttcgccgttgatccagtcgattggaccttcaggatcgcccaatacgaagttgtcatcatttgaatatgcgccaatattggcgaagctagattttatcttttgcacacattctatggatttttcgtagcatttctc

SEQ ID NO: 98421 - DNA, 348 bp, Zea Mays
gattttcttgtcaaagagcttaaagcttaaccttgtaacgaggataggctacctttgtctcaaaggtggaagttccttaagtctctttgaaacctcaagggtaaatgcatcaaatatctataacatgctttcataagtgcatagtctgtcgtgagcatcacacttttattatgacataatgcacttcacattgtctatgatatagatatgttctcattaacctcattatgtgcatttggcatttaaggccaaaatatgtattcctctcaaggcacatatttagggggagcaatctatattatatagaactatgataaagcttaattgacatatcttttgatcatatct

SEQ ID NO: 98422 - DNA, 415 bp, Zea Mays
gatattttgatttattcaaagaccgaggccgagcatgagcagcatatctgtctcgttctaggtgccctaaggaagaatcaattctatggcaagttgaagaagtgtgccttttggctatccgaagtggctttgctggggcacgtgattaatcagcagggtattgcggttaatcccaagaatgttgtggctgtggtggagtggaagagaccttctagtgtctctgaaatccggtgtttcttggggcttgctgggtattatcggcgcttcgtaccaaatttttccagcattgctaagcctttgactaggctcttggagaagggtgttcccttcgtctggtccggcgattgtgaggtcagttatcagtcattgaagagcaagttggtggacgcccctatcctagctttgcctgagagcg

SEQ ID NO: 98423 - DNA, 355 bp, Zea Mays
tcgtcggcacttcagttgaggacgaaaccttcggtttactcgtttcacgtgtgatccagctaagcactagagtgaagtcgtagaaacattggccctttcgttcgttctcttgggagagttccagtggcgatgaagctcttcagttttcacagctcctgcactgcatacctgctacgttttgaacatttctgatgaagcattcttttctcccccctttgtttaagatagactgcttatcacaaaactaatcgtccaaaccaaacatatggccccatattcgttccaatcacctagattccagaaacacctggccgaaacgggcaacgaacaatccgagcgcatcctctgtcggttg

SEQ ID NO: 98424 - DNA, 493 bp, Zea Mays
tcgaaacagagaattgtgtaaaattgaagcctgggatatcagattggcgtgaaatttggcgaatatgttactggaggtatggtgaaggtgcctgaaaaatttgggatcgattggagcatttttggctggtttgggaatttcaccaagcacgtgacgtgcggagttctagggttttggagaattgcccagtttaggtggtgaaaccctccctaaggagctcaagacctgcagggggatacaatggaacacaaggacacacatccaacactttggttcacaggaatttcacagatttgatataaggaatcaaaggtgggggagaggggtgttcactgggcttggaacagagagagaagagaggagtagagagagctgagacttctcaccagagaggagggggccgagcaccagcttgagcagatccaccagagcacggccgccggcgaggggagtgtcaccggagggaaagaatcgccagaggagcagagtgcac

SEQ ID NO: 98425 - DNA, 346 bp, Zea Mays
catgacctatgccacccctcgacttatagcgcactaggacctacataaccctttggtcaagcggtgcactcatgacctacaatcccatcggcctacgaagcactcataacctatcaagcctaggcctaagagcgcgaaccatccacagggcctgcaacacgatgagccacaccgagacctgggctacggaggctaggggttgcgtggcacaaaggtagtaatgatggtgccaagaccccgtgccatccgctgtaatgagcacaaatagagacgataaggcacatacggacataagacactcgacggaaggtgaccacacacacggtgagacctaaagaactagagg

SEQ ID NO: 98426 - DNA, 807 bp, Zea Mays
atcttatatatagagcggaagacaaaaataatagtaatctggaccgtgccatgatgggtcgatttcgtcgcctcttaaacgaccttgaacttaaagagctagagttgcttggtagaagatacacttggtccaatgaaagggcttcacctactctggttaggctggacaggttgttctacaccactgattgggagatctacttccctaactgtatcctccagagttcggccaccatgttctcagatcattgccctcttctcctcggcctacatgagtttactcaaggtaaaagaagatttcacttcgaaagtttctggacaaagttggatggatttgatgacgaagtacaacgttcatggtctcaacatttggaggggtcctgccctctaaatctgctagcagataaattggctaggctcgctcgggagttgcagtcgtggggacagaagaaggtcgggaatgtcagacagcagctgttattcgctcgggaaattatctttcagctggaaaaagcccaagatcttagatgcctcactcctcatgaaagttggttgcggcagaagctcaagcacctgtctttagggcttgcgtctctggaaagaacgatagccagaactaggtcgcgcctgaattggttaaaggagggagatgcgaatacctcttatttccacctgcatgcgaaatacagaaagagaaaaaattatatggctaaagtgaaagtggacgacagactcgtgatggaccaagaaaggaaaaaggaggtagtgtgggagttctttaataatctgttgggaacggccagagaac

SEQ ID NO: 98427 - DNA, 418 bp, Zea Mays
ctaatttacaacaaatcttttaatgaacatgtgaaacacatttggcaagtcttagatgagcttagaaaggagaaattatttgctaatcttgagaagtgtagtttttgcacagaccctgttgtgtttcttggctttgatgtttcagggaagggaattgaagtggatgaatccaaggtgaaagcaatcaaggattggtcagctccaacaaatgaaagaacctctatggaagcctctaagcgtgctgcatatataaaaaagatacatgaggagaccaatgaagcaattgagctcaaagtagtgcgcaaggctgcaaacatgaacaagcataggaagaaagtgttatttgaaccgggggacgtggtttggattcacttgcgcaaagagtgtttttctgatcagcgcaaatccaaattgatgc

SEQ ID NO: 98428 - DNA, 790 bp, Zea Mays
cttacagttggtttgtctggtcctaaactcatttggtttgcttggttcctacttctggctgccatgtgtggcgtgccgaggcagcgtcgtgaacattggcatgtgtgccatgaactatgaccttaccacatgtgttgttggttctactatgtgccgtcatgagtaacccgaacttatgcctccctattgtgtcatggaacgttcgtggtttaggcgattcagataagtgcaccgttcctgctcaccccgttttcgtttccatctaggaatcaaaattgtgtgatctttacactttcgctaattgtgctttccttcccccaaacattcatgattttgaatatgtccctgttgatagctctcgtggtggtattatcactgcttgagactcctctcgcttctccattatctcttgcacccgaaaaacctactcactaaccacaatcctctcctcgtctatctttgacgccttgataaccattacaaatgcctatgcccctgcttaccaccctatccgccccaccttcgttgtcgagctatctgagctcttcatctcaatgcaagggccttggctccttcttggtgatatcaatcttgtttgttccccctctaaaataaacattgatcacatgaacaacagactctgctcatccttcaataccaccctcaataacatgtgtgatgaagctcccctgcttggctactcctttaccaggtccaaccatcgcgctaaccccactcttgctaggttggaccatgccttcctcaacacccagatgttagcctattttcc

SEQ ID NO: 98429 - DNA, 355 bp, Zea Mays
aaatgatttggaattgagccgatacttcacgaataggtttatatggataaatatgagtgaagtgtgcgcttggtttgatttgaggcgaagaaaatggaatttgggcactcggctcggaatcgatcgctaaaaacggggatttgtgtaaaattgaagcatgggatatcggattggcgtgagattttgcgactatgttactagaggtattttgaaggtgcctcacaaatttgggatcgattggagcatttttggctggtttgggcatttcatcgagcacgtggcgtgcggtgttctagggtttggatgaaatgtctattttaggttgtgaaaccctcccaaagggagctcaagacct

SEQ ID NO: 98430 - DNA, 593 bp, Zea Mays
gatttagtgttgttcggttgtgctagcacgggtgctatcgtcagatgctgcattagagcatgaaacgcatcctcacacttctgactccattcaaattttactcccttcttcaacaattccgtcattggtttagcaatcctagagaaatccggaatgaatcgctgataatatcctgccaatcccagaaaactctgaatctgtcgtacggtggtaggaggcttccaatccatcacctcttatactttctcaggatcaactgatatcccattctgagaaatggtgtgacccaagaacttaatctcccttagccagaaatcacatttggacaatttagcatataagtgatgatcccgcagtcgctgaagtacgatgtgcaaatgctcggtatgctcatcttcattcttcgaatagaccaagatatcatcaatgaagaccactacatatttttccagctctggcatttttccagctctagcataaacactaaattcattaaatacatgaaatatgcaggggcgttggtcagcccgaacgacattaccaagtactcataaagtccgtatctggtagagaaagccgtcttcggaatatcg

SEQ ID NO: 98431 - DNA, 446 bp, Zea Mays
ggctacaaaaaccgagggtcgacgtaggcagagacagacagacggagtaatgatgacgctcggactcccgtcgtcggcacacttcaccaacggtcttgaagaggcacgatgatagaattatacgggacggataacgacacacgaggagacatttaccgagggataactattttgttttgcaacgcaacaatcacttccaagagaagcgattcgtaaccgatcccccagtctatcaaaggaggagggtcgacccgacgagaatgggagaccaacccgagaaccaacactcgatacgtagatcctctagtagagcaacccttaaagacccaaaatcttttcctctttcgcccgcgtgtaaccctactacgagcaatcaagtgctggtagcgcatgccaccaaggactgaaagtagagacgttcaaccttaacctatccagatccaaac

SEQ ID NO: 98432 - DNA, 755 bp, Zea Mays
aaagcaaataagcagcaaacctattataccaagctttgggggtctgcttcagaccacagagggacttcaaaagcttcttcagggcagacttcggttcccactttatgagatgatcggtgaagtttttaagaagttcgaaatctacctacatcaactgaccctcaatgctattgttagacttagcgtgtatatttgggctcttcgaagccaaggaaaaagcgccaatgccgaagggttctaccgagtgcacgaactccattatcaaacgaaggccagagccgatggcctgcacaagaacttcggctgctacaattttgcataccaaaaggaaactaaagccctcgtgattggctatcacactaaatggccgaccgggtgaacgaatgagtggttttacgtgaaggctgatgagaaaaagagggagaagctcatgagcttggtaatgagttctttgaggctgagcttcggtatgacccgacccttgtgcaacatgcagctggggtctccttgccaactggccgaagtggagtttagggtcgtggctgagcacatcaagactagagacttggtgcaagaatacttagcaaataggacatttccaacctctagtggttggggaatgccgaagaaaaaggaggaaggcaaaaagtatgaacttgttcgactcccttaccggtttaagtttcagaaaagatttagcaaaccatgcaatgaatggttggagctaatagaaacaatgtgtgatgaaattctcg

SEQ ID NO: 98433 - DNA, 309 bp, Zea Mays
ccttgtacactctctgttgggaagcagataaatgcccaggcttagaacgtaagcttcaggtacacgagcaaacggcccttgagcataagcaaaagtttcatgatatgtaggaccaccgccctctctttttttcctttgttgtgaaaatgactgcgctatttctgcatcaatcaattcaacagcctgacaagagcatgttagtcatgaggatcaggggaagaacaatagcttcagctgcttatccattaccaaaggtagaagtggtagtgaatttggataatcaaagtccaaatggactctagttgcttt

SEQ ID NO: 98434 - DNA, 619 bp, Zea Mays
gtgagataggcctatcagtataggataatagaagaacagacggggtaaagatagtccattagtagactgaacacctgcttgatggtctaaaaatatctcaggggaaaggatctctctccactagagtttctggaggtttattggcaaaagggtggtagaaatagagtttcactggggggtttcacctagtatagctccaccatattgaagaaaaagttgaagacttgaagacttatctagaagtgactcagctgcttcactattggtatgttgtccaacatgagtgaacatgtgttcatgggtttactgtgttttactttgacaaggtgaccatgcagggaataagtggaacatgttggccctcttttatccattgcatatggtcccaaagaagctacaaccaggttgcagcagatatgccttgttatggcatatgaaaacacaaactgagatccaccgagccctagttgattccatactttctccaccatgccacaccattcacatacatccagggtaagccctcaaaccttgtccacccctctgtttcactgagaaggccagaacaccgagcaggcaatggctgtggtgaccacgcctactgaattccccacctccc

SEQ ID NO: 98435 - DNA, 427 bp, Zea Mays
agcgagtagaagaaggacacgcatacccagtgcaacatcctgtctatttcatcagtgaagtcctaggtccttcgaagaagaaataccctcaagtttagaaattattatatgcagtactcctaactgcacgcaagctccatcactacttcgacgatcacaaagtcatagtaatcactggatttccgataggggatattctccacaataaagaagccatcggaagaatagccaagtgggcctgtgaactgggagctcatgacattgagttttgacctcgcactgcaatcaagactcaagcactagttgactttgtatcagaatggaccgagcaacaagtgcccgataacccggaaactgcagaagtatggcgaatgtatttcgatggctcgttgaagctgcagggggcaggtgcagggatcctcttcat

SEQ ID NO: 98436 - DNA, 452 bp, Zea Mays
cctggtcgagggaacttatattagggatcatggtcgagggtacttaaaccaaggtgttttccctaaaccctaaaaccaaactttctacttggggtaaagctacgtgtgatcatgggccccagggtcgcatggttgtctcgtatttataatgcggatggcgtggtatgtgggtcccaggcaccatctttcaggctatgctgacccctggccttcgtagcctggggctcaacgcggcttggcgtgttgtgccttgccatcgacctgcgcactctgtcctattcgtgataggtcatgagtgcatcgtaggccaaggggcgggcaggccataaatgcgtcgcgacccgaggggttcgtaggtcatgagtgagagacggaccgacgcctctgttatagcttgatgctaggcatagttaatgcgaccgatcatttatgatgggttagtcttggaccgg

SEQ ID NO: 98437 - DNA, 710 bp, Zea Mays
atttcgattttcatctttgtccaccagtaatgttgttttagatcatgatacatcttagtgcttccaggatgaatataataacgactaagatgtgcttcatctaagatttgctggcggagctcttcattcttcggcaccactatgcggttattgaaccataccacaccttgatcgtcttctttgaaacatttggttgttccagcccttatcttttctcgtatgtgtttcataccctcatcatctttttgtgcgtcaattatcctttgtaagatgactgactccagcttcaaatgatttgaagtcccatgttgaatcattcccaggtttaatttctccatctcctggcataatgtaatgtcagaagtcctcactgttagacaatggcaggaagccttgcgactgagcgcatctgccactacatttgctttccctgggtgataatggatttctaattcataatccttgatcagctcgagccatcgcctttgtctcatattcaattctgactgggtgaagatatacttcaaacttttatggtctgtataaatatgacagacattacccagcaaataatgacgtcagatctttagggcatgaaccaccgcagctaactccagatcatgagtaggataatgttcctcatgtcggcgcaactgtcttgaagcatatgcaattactcggccttcttgcattagcacacaaccgaggcc

SEQ ID NO: 98438 - DNA, 663 bp, Zea Mays
cccacctccattaaattcatgacctccacaaagagcacttcttcatgcctccaaagaagactacaaccactggtttcgttctcactcccatagagcagaatcaagttgaagatgcacttcttcacgaagcatgaaaccaaaagggagaagtcatcgtcccccaccatagaatgatcaggactatcttgactaggagatccacaatctcgaagccatataacaagttgagaagcataaagagaagatgctttaggtttcccaaattcagaagcaaattgacaaagcttaagagcaaatgtatcatataacacaacaaattgagcaaccacaagaaaaacactatcagagggacctttggcatgatggccacaatgatgatgacttattgtatgatgatgcttttccattagctacagaactataggctatgtcgtggccaccactgtatgggccacctcaactgccaatgtatgacgacctatcagatacgaagtaattcttgatgagctacaaagccacaatatcatgctatggtgaaaatgtggcaataatggcaaaaccatttgtcatggaagtccagagtgtggcccaaacctgatattcttcccttcggtcaggcaatgtgtctgcatggcagaatcttaaggacatgcctaccacaag

SEQ ID NO: 98439 - DNA, 410 bp, Zea Mays
cgaacgtggagactgagacagaaggtttatactagttcgatctcgagcccttatccagtgcagtactgatcgtagtattaccttgggacgtgttacaaccggtgcgtgtgtgggaagaaggagaactttcccttttatagctcaaggttttatagctcaaggtgtaggaccttacagaggagacttgttctctactggtaagagaacaatatgttgccctaggttgacgtaatgctcatgatgtgtccgtagggtcgtgtgtagccgtacttccggtatggtgtattgtcccgctcattcgtcatacgtgtccctgcagcgagtgtacaactaatgtcttcgtagtagtgcgcgatgggttcgtgggtcagtctcatggtgcggccgtgcatagcgcgactttgcttgtc

SEQ ID NO: 98440 - DNA, 476 bp, Zea Mays
gctttttcgtcgtggtgttttttatgggcaaaccgcattgttaaagcaaagcgcgcggggctagctagctaatcacgttctgccgcccggcctgatgcgtgatgactcgaaaaggagggtgagggctcgggcgtccagctgcatgcatgcatgcgtcgcgacaacacaatatgagagcaggtatttattcatcagtattctctgctagctgtatttatcgttttgcctccaagaatggttaaaaccgcgactgtagatgtactgctgtacagtgctgcactgttactagtacacaagtatattttacgctgggaggagagagagagagagagagtgagagtgagggatggtttgactgggccttgtatatatgcaggggataagctggcgacgtggacaggtcgaaaagaccacgtgatccggagcgagatcctccactgaggtacgcgcaggcgcagcgcagcactcgctccccg

SEQ ID NO: 98441 - DNA, 298 bp, Zea Mays
gtggtcaccctaagttgagtaagcgtgttgattccaagtccaatcgaatcgaagtcaagtgatagttaacagtttgaatgcccttgaaaatgaaacctttattgacgatgtattatcccattatagagtacaatgttgctccgatagctttcgaggttttgctaagggtaaaactttctaagatgctctatgttccatgaattccctactgccgtaccatccatttgagtaagctggtatgatcctggccgagtgacctccgatacaatgaatggcccttcccatagtggtgacaact

SEQ ID NO: 98442 - DNA, 416 bp, Zea Mays
gtgaaaggcatcttcgcacttttggctccaatcatacttgactcccttcttcaatagttcagtcattggcttggcaatcctggagaaatccggaataaatcgtcgataataccctgccaatcccagaaaactccgaatctgcctcactgtagtcgggggtttccaatccatcacctcttgtaccttctcaggatcaacagatatcccatcctgagaaattgtgtgacctaagaatttaatctccttcagccagaactcacatttagataatttggcatacaattgatggtcacgcagcctctgaagtacagtatgcaaatgcttggtgtgctcggcttcattcttggaatacaccagaatattgtcaatgaaaacgaccacgaatttatccagctctggcatgaatactgagttca

SEQ ID NO: 98443 - DNA, 306 bp, Zea Mays
gtttgaatagatggaagaacagggactcttttgcatttgtttgcgaccgaaggggtacgttgcattatgagccatcagatcatcaatctagagctcagattagatcaggactcaattgaacaggtacgcaaccatcgccgatggagacagatccaacggcgtggatttcatcctgccctatctaacaacaaccgcccgatcgagatttaacagtcgcgggcaaaatgttacccagatctaatctccatcgcctaccaccaaatcaatggccccaggactctctcctacctcccgacacctaccgtg

SEQ ID NO: 98444 - DNA, 334 bp, Zea Mays
gtcaccctaagttagtaagcgtgagcatgttgcaccgtcttaagtcactgccgacttaagccgattgctccgttagtagggtatagtggtcaccctaagttaagtaagcatgagcatgttgcaccgtcttaagtcactgccgacttaagctgattgctccgttagtagggtatagtggtcaccctaagtcgagtaagtatgcagattgataataaatagttcgagtgcctttgagaatgaagtctttttattgatgatgtattttccgattacagaatacaatgttgccccgatatcctttgaaatctggctaggggtaaaacttcctgagatg

SEQ ID NO: 98445 - DNA, 936 bp, Zea Mays
gggggaatgaccaccggaccatgggacccttcggtcagtgagcgcgctgaggaaagagcccctgatcggtggggcctgttagtcagccgcaagaggcaggcacgctagccctggaaggactatcccccagtcaaaccccatggcaccgagactagggtagggtggtggagcctgacaagggaggatgggcgtgtcagaagggaaccactcgagtggatcccgcgcccggccgcagactgacctgccataaatgactgaccgcgttaaccacacctggcaccgagctacagtgtgggtgtcgatccgcttccacctcatgacctacggacccctcaggctgcataacactcatgacctacgagcccccgtactatggcgcattaatggcccacgcgcctctcagcctacgacgcacttatggtctatcgagactagtcttgagtgcgcaaacctccgacaggacactaaagaatgggccgcgtagagctctagactacgaaagccaagggtcggcgtagcccaaatgatggcgcacgggaccaatgtcacccccacgtcacccaccacaataaatacacgacatccaggcagccccgagccccacgagtacgcgtggcctcacccaaggtaaaacactagttttacccctgtcttatggctccttcctagacaagccacagctggtcgacccctctccaggccagctggcctataaaagagaaagggtcaccttagggcaggagaaagggtcaccttagggtagggggatcaagagggattggacttggagacaactgaacacctccagacagagacgaacccataaggacgaacaggaggaggagcgtcgatgaggaccaggaggccgaagcctcgccaagacaagacttagctatgactccaccttgcagcttctaagctccacttccaccctaa

SEQ ID NO: 98446 - DNA, 429 bp, Zea Mays
ccactttacacattttttgcgcaatttagcatccccaactacaatgctttagttaaaaataaaaggcacaattgcaaaattgctaaagtaccaaaattaatctacagatacggtttgcaccgcatgtaaacgttacaagcattctagttactctatgcatacggctgcaacacatggtaatcgttgctatgatcgtatttactctacgcatacagtttgcaacgcatgttaaatgttgccagtaccattgtaactcaacagatataagttgcaacacataacaagcgttggaacataatcacttccaacacatatcattgtacgttgctaggtatacgatgctataggggggtttattttgtagtgtaggtattaagaagtccataaaggcacatgcaataatggcaagaaaaattcagtagacccgtg

SEQ ID NO: 98447 - DNA, 376 bp, Zea Mays
attggtggaatggtggcatggctggacaaaataatcacggctcgtggttggctcggatcgattcgattgatttttttttcacaaactgtctgaaatcctattttggtttgttaacgagccagctcaacgtgctatcgcatttcaacaaaatacatttatgcatgaattgatgaacatgttcagggtcggacccaacaccttaggtggtggcatgggctacctcgcgagttctaatagatagaagcaagtatagggcaaaagtataggcacgaagcatcgcagtgtaatatcgtctaggttatctctaaatcctgggtccaccactaaaaatgttatatgtatgtgcggtgtctatgacctgtaagttaaattggtg

SEQ ID NO: 98448 - DNA, 630 bp, Zea Mays
ctgataactaaaggcagtctgtcgtcgattagagatggtggaaatggagaattacgcccgtactagatggaggtttacaaataggattgtgttgtaaccaaaccacctatccttttgtttcgttgttggtagagtggaaggtttgttcctcctcttcggagcagacggatgtgctacggatcttataataatttagctctattctcttggcgaggtgaaagccggatatattatacactatctaaaaaagaggaaccaaatgcccccgtgtgtaagtacatgcatgctgcaaaacgggttggtgaccggtgagtatggccattgtgtgaatgaagcagtatttttttcgctgaccccaaggtgtctcggagctcgtgtcgagatgcgcgcgtacgtcttgcatttttccccacgcaaacatgcctcagcagtccccaccaccccggcaccccctccgtgaaagtcgatcccatcagtctgtgggcctgcaatcctgcacacactcgctgcaacattccaaaaaccctcatcttgttccattttgtccctcggttctcgtagctagacgactgcagaaacgccaacggccggttactgaaggaaaagaagaagaagaaagagagcagtata

SEQ ID NO: 98449 - DNA, 400 bp, Zea Mays
gtgagaagaatagtcttatctgagtagtttatgatgccattgtgcttggtcaaccaatccattcctaggatcacatcaattctgtgggacggtagtacgactaagtccgccagaaatactaccccacttaaaagaattctgacttgggagcatttgaggtggcatagaaggtctgaccctggggttcgggtgaccaaggggatttctaaagatgcagtggggaggccatgcttttccacaaaactagtggcgatcaaagaatgggatgccccataatcaaaaagtacagcagcgggggtaaattcgactaggaactcaccgatcactactccaggggcttgctgagcttcttgggcgtcgacgtggttcactcgagccctgctgtggaactgggtcttgc

SEQ ID NO: 98450 - DNA, 749 bp, Zea Mays
aactggtcagataggaccacacttctctctctttctctgtcttcaggcatcaaagattgcagctacctcccttttattttgccagagctcctctttttgctaaactgatttcattggtcgttcaaatagtccttgtctatgtcttttttttaccggttcatctgattattatctgtttctgttgttccttaatgacttgtagaccggtcgtcgaagcggagtagtgtggacagaatccgaggagggaaaaacgacttggatgcggcacgcctcacagaacttcagaattataggtaaagtgtgtgtttttactcttcatgttcttctttgccttgtgagcttagaagccaagtggaatgcccagacgaactgatccgttgtgtgctagtggtaatatggtagtgtgcatctcagattcatattgcttgtagttacttctcgcagtttgatttcactgcagtaatttgacgaatctctcttttgtttccctgctttcgtagaatctttgcctccacatggaatgtcggcggtaaatccccaccaaggggattgaatcttgatgactggctccattcttcacttccagctgatatctatgtgttagggtgtgtagcgcccagagggcttcctaaaatttaaacgatatttgacttcaccatatgctctttagttattccctttcaacttctttttattgttgtcagatttcaagaaattgttcctttgaatgctggaaatgttcttggcac

SEQ ID NO: 98451 - DNA, 500 bp, Zea Mays
ttaacaagtggttcgttcaggtggaacagctgcacaaggttttcaagctgtgtgggactccgtcggaggattactgggagaagatgaagctcgctcatcctacgttcgggccgtacgaacggtgcctggctgagaaattcaaagatgtggcaccatctaccctgtcacttctcgagactctcctgtcgattgacccggacatgagaggcactgcgactgatgctctaaacagcgaggttaataaaagtttgaataaataaagaaaaagataaattatgggcagacattatgcaaaaaagaatgatctgcatctggtcatgattgcacggattcggggtagttggcattcgtgtatcgtagagactagagatcggattttttttaaagttggaaacagataggtggtcctttgttcagctgtatgtgcttaccaagccccattgttttctgtggattcagttcttcaggacagaaccatatgcctgcgagccatctagcct

SEQ ID NO: 98452 - DNA, 381 bp, Zea Mays
cttcggtgaggtcaagggtgccgatcaagtttgggaacaccttcggtgtagagatcaagggtgccggccccgtcatcttcacgccgcgtatggtgagcacatgctgctcactggagtctactacatcctcgcattgaggaactccatcattagcctaggaccgctggatgagaacggttcgcgtgtggaggttcatcacggagtcatgaggatctaggacccctctcgtcgtcttcttgccaaggtacctaggagccctaattgactctacattgtcaacatacatgcggcaccacctatctttctagttgctcatcgagatgacgaggcgtggaagtggcatgagcacttcggtcaccttgattttgaggccctgaagca

SEQ ID NO: 98453 - DNA, 429 bp, Zea Mays
gaccaggtaggattactcatatgggatgtaggaatagtaaatgtagaaggatgggttgggtctaaaccttggccctgccacatctgaggatcccacatgggtgggggaaagactggttacctgaattggggctggcaccagtaggtcgaaaaggtgtgtttgtgttgttgtcagccattctggaatgaaatacaggaatacattaatttggacaacacataacaaacttgtactataaagtataaactttaatgcattgcacataaggttcatacaaaaggaacacaatgatgaagcattccacataaaggttcatacgaaagcaacataaggattaagcattccacataaggttcatagagatggaacttaaggatgaaccattgcacataaggttcatacaaaataaacataaggttcgagcattcg

SEQ ID NO: 98454 - DNA, 481 bp, Zea Mays
acgggaaagagaacgagcacgatacgtggagatgagtgatgaaaaaaatgaattgaagaaacatcgtgcgtcacgcaacaaagaaaatgttgtacaccatgagtattcaaaagtgttagaggtaaaggaacgtaagagaatccgagaaagagctcgatgtgcaactcaaactagggaacaaaggacgttgcgtaatatgaaaccatgtcaaaagagtgcaaggcaaaactatagaataagacaacaagagatgctaagtcaggactcaatcgccattgagaaccctaattttaccccagagcttgtgtggagttccgcagatgctcaagcacctactgggtctctatttagctccgagcacatggctattcctgaattgatcccaacaccatttgttcctactccattggtgactgaggatgttgagacaaacaacctgacaacgtcttctagacgaaaaagacataaatgtcatgtgtcg

SEQ ID NO: 98455 - DNA, 396 bp, Zea Mays
ttcgtcgagtgtctagcttggatcaggatgtcggtccttctgttcctgctgctgaggaagtgccagtgcctgaatttgctgaagctgaccccaatgtgtgtgacccgactgctgtggatcccaatgggtgtgacctggatgacattgaacccgataggtgtgatctggccaaaattgaccccaatgggtgtactgtccacgttgttgatgaaggtgaggaagaggaggatgaaatccctctaattcggaagaacagccagcgttacctagccagcggggaaagcagtggtgttccttctccagctttatctgccctcattggtctgcaagaattatctctggcgaactttgatcaaactcttgaagacatggtcccagaagatctgttgtcggagc

SEQ ID NO: 98456 - DNA, 670 bp, Zea Mays
taatgtcctagaagaatgcatggatacgtctcatcttcgatcatatagtatttttgggcggggctccaagaaactgttgtcttttattccgtacttgaactatttgcgtgtgttggacatagaaggctgccccacacttgaagacgatgatctgacgaacattggaaggctctaccagctaaggtacctgaatgttagtaaaacaggtataacttcatttccgacagacatggaaggtttgcagcacctagatacacttaatgcaagatattgtcgtcgtcttaggaacctgccaaaagctttcatctggtttaagcaattggtgcgcttgatcgtcacatatggcactagactaccagacgggattggaaatttgaagaacttacaagagcttggtgatgtttacgtgcccaagtgttcgctcaactttccgcaggaactaggtgagctaacaaatctgaggagtctgagtattgggttggacacgatacaaggcgacaaagcatgttacatggagaagctggtgtcctctctctgtaaactggacgcatgcaacctcagtgatctgtctcttgtattagccctgcacggagacggacacggcgatgacattgtgtcgttccctgctctaagtagcatccgaaaggtttggctctcgagtccaggaatc

SEQ ID NO: 98457 - DNA, 307 bp, Zea Mays
gattagacttgcacttcagcagctatatttgtctttcctctgatctccatcgatatctttcttctgtcttgatacattcattgcgtatactgtatggatgtgattgcttgggaaaatctattgaaaattcctcgacgtccccccaatgggtgtaaccaagggacgacttggtacgccgagcgtttagcaaactgcccttgagtagtaacttgacgtgaccgcggggtgtaatcatatcgtccaagtagttgacctcagtccaaatggtgtcgtgttacgtgaaacggtgtctgccgcctgacttgtt

SEQ ID NO: 98458 - DNA, 318 bp, Zea Mays
cgagacaccacctgggttacctcttgcccagcagagtcaggcagcgaaagtccaccatctgggaccttagaacagatggttggaatgtcagcctcaggaggctctgataaaatgtcttcaggaacgatcttttctagtgcctgatcaaagtctgatatcgaaagtccctgaaggctgacgagtgccgacagggcttgggagggaatatcgctacccccgtcgctacctctatagtgacagctgttcttgcggatcagcggaatctcctcttcttcttcctcttcatcctcatcaaatgtgccgccagcagcctgcgca

SEQ ID NO: 98459 - DNA, 351 bp, Zea Mays
attattgcaccacaagttaggagcacacactttgtgtccttggtgataatgtttgaggctcaacaagttgcaatgatttcttcctatttatgttactgtattgcaatcatagaactgccaacaaaattttgttcccttttctgaaaaaaatgtgttgcattgactgccaagtatgaaactattgagttataaatctgctaccaatgagcttcgttgtgtgcttgtttagacagatactggttttcttcagtaatcatcagttcaaatgtgtccatgctgtacaactagtgaacagttagtagagctgtagaggagatggtgagaaagcataaattcggcacagttcattct

SEQ ID NO: 98460 - DNA, 550 bp, Zea Mays
agagaagtttgcatagggtaaactcttatcccaactgccaccatgtttaagagcacaagctcttaacatttcttctagtacttggttggttctctcggtctgcccatcagcttgaggatggtaggccgagctgaaattcaactttgtgtccaagcactcatgcaacttctgccaaaaccgagaagtggactgggatccacggtctgacatgatcttcttagacactccatgtagacaaactatccgtgccatgtacaactctgctagcctggcacccgaacatgtggtcttcactgggataaagtaggcaaccttagttagtctgtccacaataacccaaatggagtcatacccagtagatgtatagggtagacccacatgaagtccataccaatttcttcccacttccattcaagtatcttaagctggtgtagcaaactggcaggtctctgatattcagctttcaccctcttccaaacatcacacaatgctacatgtgaagcaacatctctctttagaccattccaccaatacttctgcttcagatcct

SEQ ID NO: 98461 - DNA, 558 bp, Zea Mays
ttgttgtcaaaataccgtgttgcatgtattgttatgattgtatccataattgtaatggagtcacatcgtatgagtgagtttaagctgggatgtggtgtatgcatgggatgttctagtagatgtataaatctagtatcagtaaattggtttgatttggataggtggatgtatatgcagggtgcttaaattagttcttcatttgtgatagcttatgtatttttaacgtctagccgataggtgttagtattgattatgatgaatatcgtttgtttgtttgtttagggctgatgccttacttaaatagttactatattctagattccttgattggtgaaatgtcttgtagagtcgagatttgcttatgattcatttgtggtttgtcactctgatttcatcatgccatgtcatgccttgtggtttaagtgttctctcttcaaatagttagtagagggtggtattgcagatttgcagatttttagactttctcctagagttgtttcgggtgtgggatgttcacgtagacgtggatcatttaactcaactaattggtagtatccc

SEQ ID NO: 98462 - DNA, 512 bp, Zea Mays
caaaacatgaagacttttttttgcagaatcaacaacctctaggaagaaataacattgtccaatcaagaaagcacacaggcttagtacaacactttggaaacacaccaatgctacgaggaagagaaggacgaggacttcacggtggccataaaagtcatggaagaggaagacgctgagtcatgccatattgtttcatatgtggcaaatatacatggtatgtcaccagaggctagatatagcaagttagcaaaggtttttaaagaaaaggatgacacgtccaaagcaaataatccatcaaaataggtctttcgcaacattacacgtgaaaatgcttatgcatagccatatagtcaaacataccatccaacaagtatcaacaccattcattaggcaattgtcacacaaggcttcacccaactacctttcttatgcccacaccttttgaacatatagttcatgtcgccctcgacttatatccaccaccttagctaatccgcaatagtgaattcacc

SEQ ID NO: 98463 - DNA, 307 bp, Zea Mays
agggctacctagttcatgtgagttccaaggggtgatgtggtcgggttagagagatatggggtgggaatttgtctttgtcctaactgtccaaaccgagacaaatcttgtgccaagtcatgtcaaacgacttagggttgggttcaaacttttccagggtgttctagaggtattttggtgccactttgtcaattgggccaagtggttttgagtttgggattaaggtgaacatgtttgatctttgcaaaaggtttggtttttggacttagaaaattctgattttccttttatgctcaactctttggtgaac

SEQ ID NO: 98464 - DNA, 846 bp, Zea Mays
gtcaacttagaacaagaaagctaccttcaaactaatatcctcattggtgtctttatcagagacagcatcttctttctgcaatttcatactggttttatgttgcttcttctcagattctccttcagcagccttggttgatgaagacttcgcagcatctttattcaggtgccgtgtagctctccctccagaatcagtgataggatcaagttttgcagattttaggtctgatgcatgtttctttccagcaggctttttctcctgagactttgctgctggaggtcggcctctctttggcttaaccacagcaggcttagtatcacttggttttgatgattcctcagtagttatattgccggtctctgttatctgctttttatcaacatcatttgtccctggggataactcctcagatgctactatactctcattgtctttaacaacctttgattgttcagccatctcagatccaatggaagaacaaagcttgtgatctttctttgaattgacatcagatagcttttcagtttcaacagtcactggttctcgtacttcttggtcacaagatatcaattgctcagaacttttggtctgcttgtcaagagaagtcagttctggcttctgtttagaagaatctggtgtctgctcatcaccagaagtcagttcttgcttctgtttagaagaatctggtgtctgctcgtcaccagaagtcagttcttgcttctgttttgaagaatctggtccatctggagatttgacattgtcaactggagcagcaccattgctaatggcggttgtcggagtactgtttggactactaccttcttggcctaggcaattgacattttg

SEQ ID NO: 98465 - DNA, 393 bp, Zea Mays
ctgctaacttggttccttgattttatttaattgcacagctgtcaaatatacatatgattctttccatttgcttacgctcttggtgtaaagtaatctgttaatcgatgctctattcccaatgtattggagatttggagtcaccacacaatcatggcatttctatgattctcccatagaaaatcaaaatcagacagagctctaccaaattggctagtttcaccaacctttcttttcaacaccaactaattatcttgtcactagttctaacagagggaaaaggacttgtcagtagaggactagtaggtatttaattcgttgcctgaacattctacccccaaagaagattgtagaatcttctatgaactcacacacggcacaacaacaaaacctttt

SEQ ID NO: 98466 - DNA, 385 bp, Zea Mays
cgatcagttagttatggtgggtcagccttggaccaggtgcggaatccactcgagtggtttcctctcgattcgctcgatcccccttctagctgccttgctcgatcccgggctcagttctctcgggactattctggggcaggtccttccgaggtgtactcttctcccatcctccttctaactcgtgggctccggggctcagggatcttatccccgacggaggcaactagatgtgaataatgctttccttcatggatatctagaggaagaggttcatatgtggcaaccccctgactatgaggacaaatatgtgcctaactatgtttgtacattggacaaagccctatatggtgtgaacacgcacctagagcatggtactccagactta

SEQ ID NO: 98467 - DNA, 312 bp, Zea Mays
gcgatgaagatgacaaaccatgccatcaggaacaagatacataggaggtggttgcatgtagagttcctcatggtgttcacaattaaaaaaggcattttacatcaaattgagagatggaccatgcataaataaagactacaacaacgatatgtaaacaatggtcatgtgatccacatgtgcaatggtatcatcatattcatgaccatgctcctactaaaaaccacaagcaacaaggctagccttataacagtcgagagagccacctgagcgagccttaattttataaacacacttgcatgtgatgggttgagc

SEQ ID NO: 98468 - DNA, 282 bp, Zea Mays
ctacaaggcgatgactaagggcacgagaggcaattcactgccctcgtcgacgtctaccagaagacgttctagtccgatggtgtcaccggggtacatgtgagtgctccctattttttcattgcagtcgtgtgactcgttacctatggtgggtgattccattcatgcatgtgtgtttggcataggtatttgcatctggtgtagaacatgttgtcgctattcccgcatgcgaagaacaacaaggtagagtcgaagcatagcaaggggaattgctgaatgagctac

SEQ ID NO: 98469 - DNA, 917 bp, Zea Mays
ggcggcggcattactcgttccgcgtccctcctggggctggcgctggacgagctgccttatccacgcagttacatggacatcaatttttactgatcgactgcgcgtgtctcgatggaggacgaaaggagccagccaagccaaggtttgtgttctattctatactgctggagtagcagcattgtttaagcctcgttgctctgaattccatgtgaaagcattccttctgcttgtcataatccataaccccccatgtggtggtgttcgctgcagggttcaccttctgatggctggctctggctgggtgaagttcatttctcccaaggttccatcggtcggcatgttttgtactagctaacaggtgggtgactcctcttgccatgtgtttctgtgcccctggtggtgcctgggacactgcttctgttgttctgcatacgcgtgttttctcaaatagttttttttttgtgtggaaaatttgctgcgactgacgccccgattcctaatcctaccgtcttcaacgtgcagatagatattcgaggaggtgctttctgactgtaagattaggtatgatccgctgaacggcaaagaccatcagtgctaggttagattttcaaacaagtagaggatctctttaccaattaagtaccatgaatggacagttttttttttttttttgcgcagttttgaatgtaaacgtcgagtcccggttttcgggagagagaaaaaagggagtgttttgtgtcccaggcaccaccttggaagaaggccgtcctggtttcacctttctgtttgttttttttcttctttttggcgtcctgatgtagcaatagtaatgtaacaagagcagccagagccgcgccatgaaaatatttttcttactagtcggaatgaaatggcggcttgttgtacagcgagcaaac

SEQ ID NO: 98470 - DNA, 332 bp, Zea Mays
ttgtaattcagttttttttaatctctaattggttcaaaaaaattcagagtctcatttttttatggtcgatagtgggtgattaggagagcatgggtatccatatgtatagtcattttattatgttggatgaaaatgggtaggttagggcaagaatagcgtaaggtaagaaagtttatggtgggaaagaatttcgtgttgagtgataatgcatctgaagattaagtttgacttctctccttccttgacgaggttgatcttttcttctccagtcttagtctcatcgattcatggttagtgtatatcatcggttggggaatatggttaagatagat

SEQ ID NO: 98471 - DNA, 278 bp, Zea Mays
atgaggatgaggacgatgatgaggaagaggagatccatctagctcgcaccaagcctttgcacttcacttcttcaacttatcgtggtggtcgtgctattatctctgatgacactgatgctggcggtggtgatattccataggatgatattgctcgagaggatggctagtctcttttgtcttactcttctcactttttggtgcttgttgccaaagggggagaagttttggcattagagaggggtcaattttttcataaccatggatgtcggttgcttttc

SEQ ID NO: 98472 - DNA, 894 bp, Zea Mays
tttcttcatggtctatggttcggaggcagtgctacctgctgatctcaggtttggggcaccaaggttggtctttgaaagcatagctggagcagaggctaccagattagaggacgttgacatattggaggaagagcgattgaatacagtgattgagtcagctagataccagcaaaccctgaggcgctatcatgacaaggccatacgacatcgatcctttgtagtgggagacttggtccttcgctgaattctaacggggaaggacggcacaaattgtcaccactatgggaagggccatttgtagtagcagaggtcactcggccaggatcatataggcttactcaaatggatggcacggaaatagggaattcatggaatatagaacatctcaggaaattttacccttagcaagacttcaaaagctatcgggggagcattgtattctgtaattggtaaatacctcatcaataaaagatttcgctctcaaggacactcgaactgtttattatcaatcagcacgcttactcgacttagagtgaccactataccctactaacggagcaatcggcttaaatcggtagtgacttaagacggtgcaacatgctcacgcttactcgacttagggtgaccactataccctactaacggagcaatcggcttaagtcggcagtgacttaagacggtgcaacatgctcacgcttacttgacttagggtgaccactataccctactaacggagcaatcggcttaagtaggcagtgacttaagacagtgcaacatgctcacgcttactcgacttagggtgaccactatgccctactaacggtgcaattggcttaagtcggcagtaccttaagacggtgcaacatgctcacgcttactcgacttaggatgacc

SEQ ID NO: 98473 - DNA, 571 bp, Zea Mays
cttgctaaggtcagtgagctaaagtttgaaagaaccctacaaacaagccattaacactggcatctggaaaattcacaaagacataggtcgcaatgagctaaatgaactccaacaaataagtcaagatacttagaatgaccctacatgtggtaagtatgagctaaagtacaaaataactcaactggcaaaatgaagactgttgaaggagggtcacgtttacatcagcagcagtgatgatagcaagcactgcaaagtttcataggctacgtgaacaaacaagagataactgaaatatcattatctgaacaatagcagtgacatcacatgcccaagtaaaaacaaaaatgcctccatgtccagttccatcaaagaaaattcaggacctccagctgtgtgaagggtacttctttttttactctaacgtgcatccgttaatgagaagatagaattataggaaaaacaagaggcatgtcggaaccttccaattatcatcaaaactctcagtttaaatgtgaactgagaaaactcaagtaaaaaaatctaacatctaaaaattccaccgaaaagaaaa

SEQ ID NO: 98474 - DNA, 809 bp, Zea Mays
caagctggccttgttttgttgatgaagcagcctggaggtttgttggaccagcatgaaattgtcttgaatgaatctcccttttattaatgcactctgattaggtgacaccatcacattgagcttgctggccaatctattagcaagcattccggtgaccaacttggcaaaactatgcaccaaactgacaggcctgaaatctttaatactatcatctccatttttttggggatcaaggtgatataggctgtattaaggagcccaaaattggcaaatttcctgccccaaacagcagagatggcagccataatatcaggcttaataattgtccagcaaaccttgtagaaccttcatgtgttaccatcagggtgttaccatcagggcctggagccttatctgaaggaaggcatttgatggcatcccagacttcttgttttgaaaagggggcttccagatcggctagatcataactaggcattccaagagcctccaactcaatcgcccgttccctatccatactgttccccaacagatcgatgtagaattggtccacacaggcagctttctcctcatgactggttaggacttgttcctcatcaaccagccttgccacatttttttctattatggtgacgggcatgaaggtggaatagctttgtattagcatccccatctttgagccatgaaattcttgctctcagccttgctatagttcgcttgaaagaggataataataatgcctgtttcttgagtctgaatttgagccagagttcagcagggctgagcactctaccatcctgggctatttccag

SEQ ID NO: 98475 - DNA, 784 bp, Zea Mays
gaacgaacaaagacctagtagatcatagataaagacaccagtgcgccttaggtactagaggaaggactcctaggggaacgagaagtgagtcctctcacagtagagtatacctactagataataacatcataaccctaatgacacgtgggttctatagaggtttgggaagcagaatgcgtactaccctatgtcttcttttgaattgtggatttatgtataaaatgagtgtacaagattacaaaacacaagccagaggggaaatgggaagaactactttgacatagtagtgtaggataaggtaagctaaactaacttttcttgatgcttggcttggatgggtaactttcaagtctcttgtcttgagtttggtcttgtgaatctaaaattgaatgttgttttgccatcccttttatagtcgaataaagtggtcttgtgaccctaaaatcatgttgttctgctctcgatgtattaatgttcattatagtttttactactaacacggtcctatgtattgtcctatgctagcgagaaggatcctcttgatcttccaaacaggcgagagatcttgtttgcatggcacaatatattttactttatgtgtatgttgtagctctattcctagcgcgtgtgttagagttatgctgtgtgtttatcaccacataaaaatgtggccattgtcggagttatatcttggtgagataactcgctatgtcgactgctaaggtaggctggtaggcatttaaagcctacgccatgaacatttctgttgtatgaagcaccccag

SEQ ID NO: 98476 - DNA, 275 bp, Zea Mays
gagaatttgagtgaacatcagtcccaggattgtgtgtttcattttaaaatagtgatatttttcttatttgcatagaagcaatgtgtgttgtggacttgtttgaaagaacttttgtgctttgcacacctttcttctctcgtgttgacaagttgcaatggtttttcccgctcattttcttaattcttgcgttcatccccaatgaacttctatggcctctatctttttatagcctggtgggcaatctcttcccacgcccacacacacagttatgcaaa

SEQ ID NO: 98477 - DNA, 339 bp, Zea Mays
tgacttaagatggtacgacgagtggctgatttcgcgaacctgcagataagacgagtggctaaaaacactatcggatattgctttctatcattctacgcgttttaaaatataagtatgaaaaacatagcttttctagcttttacaacactagcccaccgtacaaggcataacatatattttgatggaaaatggaattccttaatgatatgttgatgaaatggtcttttgctctttgatgtgcttcattttggcttgtaaataaatgaaacaaactatttgcctagatcaactattggtgtctctacatgctctaaattatctttattatttgtattttgc

SEQ ID NO: 98478 - DNA, 376 bp, Zea Mays
gccttcacagtctccagcacatctagtacactagccatcctttttctcttggggtcgccgcaggacctttttgtgccttcagcattgtcatttctgccgaagggcttaaaacttctaacgtttttgttccctcgattcttggctcttcagctttatcagtcttcggctcagctaacttggctgagggtgcctttggcaaggtggccggttcctcagctttctgtgtagaaggaattggttcctttggagtagcagatgaagaagtttccccgccaaactcaggcactatggccggttcaatgtagcgcggtcggtgggtaaggaccttcaactttttcctcttcggcgcaggctcacttggagcagccgaagcagc

SEQ ID NO: 98479 - DNA, 463 bp, Zea Mays
gcacgctctgcaatgcgtgcgtttcccatcttcagcgccttgaggacaaatcataccgcatacgtgcgcgtcactcattttctgtcgtgtggtcgtgaaagggcttctcacacttcccaggttcgcacgccggttcggcatgcctcatgcctgccccgcgtaatgcaaagataagagatgctgtggccgtctgctactctgatatcggccgttctgatctgtgaccgacaccgacgaggaagaagagcacagcagccagcgtcctctacgggctacagccagtttcttggcacgcttgttacgtccacacaatccctatccggcgtgggtttctggccgctgcgctgtcgcgtttccggcaacgggattcttgccggaaatacagcaatgaatagggaatgattcgagccggctgataagaactagatagcagcatggcgttgtaccgagcaatgtgtcgcta

SEQ ID NO: 98480 - DNA, 482 bp, Zea Mays
atgggcatgcgccaccgccgtctctggctggaggtgggggaagacacagcgtggccgctgatcttgaaacgggcggctgtgattaaaacctgtaacccccatcaccggtgtattatgtgccgtggatctcagatccgtgggtcaggatgggatctcgttcgcgttaaatcctgagtgtaggatcttgatccaacagccagggctgcgtaccggttcgataaagtgacgatttaatctgggccacgtgtttcggatctaacggctcatatttgtgcgtacccccttcactgcggtgtttttgttaagagccccttggcttattccaaatcaacccgccgtccatagtcactatgcgctgtgtctcgggtttcttgtcccgagccccctggacttttattgatttgacgcccagtccagaaccttataaaaccagagaaaataatttataaatgggtttttaataggaaaataattgctagaac

SEQ ID NO: 98481 - DNA, 430 bp, Zea Mays
gaacgcacttccgcataccaggccaggaaaacaattgcttcagtctgtggtatgttactgggaacccagagtgacctcccactgcagagcaatgcatggctgtcatcacagtgtgatgcaatgtgacattgttgcctaaccatattttccctttgtacctgagcaaaccatcatgcaattcgaagtcaggcacggccacagggttgagagataacttggccaaaagttccttggactcagtgtcttccaaatacccatccaggactgcttggcaccactgtggttttagtactgaaattgcacaacgctggccattatccggggcccttcgagataaagcatcagccaccctattatctgaccctggtttgtacacaatcttatactgcatgccaagtaacttggtaaacactttttgttgccaaggcgt

SEQ ID NO: 98482 - DNA, 852 bp, Zea Mays
ccaccgagcaaccccacgagacggaacgaacaaccaagtctctgctgagcaaccctgtgaggtggggcaaacgaccaggtcccgtgccaagataatcggtgaaagcgaagggccgatgcaacgttgctgacccacatcagcatgaaaagacacgccaccaccaaaacatatcccgaccacgagtacggtgtcaagaagtccctgtcgaacacaacaatacgtcgccatgtacagtctcatgcgagccccccacttacgtatgggaccactcaacccctgtcgtagggacctcaacgttggagtctctaaagtgacccacatacaggaaacgacaggaaggtataccatgccgggttcatgcctacgtatgctggaaggtgacacaagggtcatgacagaagatgaagctatcgttaacacgaccctgaaccccaccgagagtctattctgtaggacccaccaggtgccgctacgttgacatcaaaatagctacagggactcgtatgccagacgaacaagatggaatgccataccaagggtacgacagcgcacgaccctacggacaatgttaggagggctatgccacctagagcaaaaggtcgagctccctcctagtagaatacgagttcccaatgtaaagtccacccttgagctataaaagggcaggaccaccttctttctacacacaagcacaccagtgtaacacgccccaaggaatactacgatcatcactacactggagtaggatgcgaacccgaaccagtataacccagtgtcttagatttctcgtggagtcccagtgattcaccatttgaagtgagtccacgctagcacctctaccgaacacaaatc

SEQ ID NO: 98483 - DNA, 1773 bp, Zea Mays
gctcaccgcggcttgcaagacgccgcattcaagtattcaactaatgcgatatccttcctgcatgactgcatccaggtccaggccatcagggtctcaacctgcagggttatttcaccgctcacgagtagtgcgggagttcagtttgttgttcatatatatgtaaatgttccgaaatgccccaatttcgtcaaggtgacaaggtgtcaatgctgcagataaccaaaaggccaatctgtcatagcctgagctgatcacgtcatgggacatgaacaaacaccagatcagcaagctttccactgctgcagtactgattcatgtcagatgatttcatctctaccgtaatcaactacatgcagtaatgagtgttcatggccatttttagggtagctttgcaatgctgcatgctggactttaatccaactagaacctgccatcttgctcaatcctctcaacctcatctccttcctcaggctatcagcactactccagttgccctcagcagcaaaaatatgtgacaacaaaacgctgtaaccagcatggccatacttcttctcaatgcagatcaatctctctgtcaccaaattcaccaattcctgcttgtcctgtgctttgcaggacgcgagcagtgttccccaaatagaaacgaagtcaccctcctcccccagttcctgcacaaattcataagcttcctccactctgccggctttagctaacatgtccacaatgcagcaacggtgctgaggagtaactacgaccccaaaagtttccattgatctgtacagagcaagcccttcatcaaccagcccagagtaattacatgctgaaattgctgccaagaaggtcacaccatcaggttttagccccttctcttgcattgagtagaaaagggacaatgcacttttgccaaaaccatgctgaccaagaccagaaatcatggttgtataggagacagtgctcttctcagtcatatcagcaaagacatgttctgcagtagaaatctcaccgcacttggagtacatgtcaacaagagcagtacctacgaagacattggtgtccaaacagcggcgcaaagcaaaacaatggatctgcttccccgcacacaaacctcctcctagaggatcacatgcagggagcaccgaggcaagtgtcactgaagtaggttcaagacatgcctcaatcattgcccggaatgccaagattgcttgttcaggatgcccagtctgtgtgtaccctgctatcatggcattccaggtgacttcatctcttttggcgttaccatagtcatcaaatactctctgagctatttctatgcgaccggacttggcatacatgtcgatcagatagctctccaatccctcaccctcaatgccatgccttataagataactgtgggcttgtttaccaatatgaaggtctcctgtatttgacgcagcagagagaactgcagtcaatgtcactaaatcagctgcaaaacctgatttttgcatctgataaacgagcaacaggccttccagatcaaaatcgttctgcacaaaagcagtgatcatggtgttccaagaaacaatgtccttctcatgtaaccgatcaaagagctcaaaggcagtttggacattgccacatctcgagtacattacaacaagtgcattaccaagtatcactggcaaagtggtgtgcattcctttgatcaagtagccatgcagttgctgacccaacctgccatcctgggactgtgatgctgccgtgagtgctgacaagaaggtcacgacatccaat

SEQ ID NO: 98484 - DNA, 507 bp, Zea Mays
aagtattcttccaagaggggtagaatcataaaaggacattggtgcacggaataatgagttgagtaacttagaaaataaggatcttgatgtcttgaccccaagaacaacaactgctaatgatctaaatagcaagaagaacaccgagaagattccaattgcaatgtacacagaagtcaacttaagagtactaacatcaggattctcgacattagtagccatccatgaattctgtgatatttggccacatacgaaaattatatgggaaataatacccagagaagcatagaagaagcctttattctgacgcaggtagagaatataaggcttgagaccagtatcacccatttctctttcttctgtcttaatcagttgatctgttggtgatggtttcaaagactctttgtatctgcttccatgaacatcaattgtcttcttgatcaatatttcattttctctatggggaggcaccctgttaagatctgaaacaccaatagtgtctttatgggc

SEQ ID NO: 98485 - DNA, 281 bp, Zea Mays
cccgaagccaaagctcgtgctcctgtggcagagcttagtgcggccctcgacagcttgcaggtgtactacaatactttacacgaggaagtacatgtactatatgcgcgactccacccggacgtgcctgctgaccctattgcaatgggagccggaccatcagggacatcaggtgaaggacccgatggggagatggacctttttaggcctcctccttccatgaacttggctgacgattggtctcctacagcaggaaatgaagaaaccaaggacgacgaagacta

SEQ ID NO: 98486 - DNA, 722 bp, Zea Mays
ttttcatcatgtgcgatgtctctggcaagttcaggcactccttcctctcccgcgatcacctccaatgaccactccctctctagcctctatagggtgtggctcttatctcgagcatgtgtggctccatcctttgcactagtgacgggcatggccttggcaaccgcgcggggcctcgatcgccatgtaggcgagtgtgggacaacgatcgctgatgagcatgggtccatcatcgttgataagtgcgacatcgcttggggattcatctagaggaaaaagatgagattgatgggcatgatctatttatcactaagagaaaccgacaacatttttctaaaagccacagttgtggaaccaaacaacttttagttttttcacaacctttaaatcataactggttttccatagctcatagcttatagtatttaaaaaaaccatatctcaaccaaacaaatctttaactaccaagttgtggtgaggttgacccaggtgatgggttcaacaatgactaagtgtactatgatacttttgaaaagttgtagcacctgagcttgtgtgttgtccatcacctgaaccagcctatcaaatcaatccacttaaccacccctacgcctcgcttgcgagttccttctcactagtaaatcctctgctcagccaccattggaggcaccactatccgtctacaaatcaacaacacttctctgattaggtacaacccaccaccg

SEQ ID NO: 98487 - DNA, 383 bp, Zea Mays
ttggagcctaagaactcaacctagccgagctctgcatggaaacactcctttcttcatggtctatgggtcagaggcagtattacccgctgatctcaagtctggggcgccaaggttggtctttgaaagcatatcagaagccgaagctactaggctggaggatatggatgtactcgaagaagaacggctgaacgcagtaattcaatcggcacgataccagcagactctgagacgctatcacgacaaagtcgtacgacgatgatccttttcggtgggagatctcgtcctccgccgaattctaacgggggagggacggcacaagttgtcacccttatgggaaggaccattcatagtagcagaagtcactcggccgggatcatatcgtc

SEQ ID NO: 98488 - DNA, 498 bp, Zea Mays
gtggaaagagccaatgggatgatacttgatgcacttaggaaaaaggtgtttgacaagagcgagaagctcgtaggaaaatggatcagggaactaccatatgtagtctggagcctgcgaacccagctgagccaagctttacacggaaacaccaccgttcttcatggtgtatgggtcggaggcagtgttaccagtagatctgatctttggagcacccagattaacattcgaaagcatagccgaagcagaagcaactagactggaggacatcgatgtactagaggaagaacggctaaatgtggtcatttagtcagccaaataccagcagaccctgaggcgctatcacaacaaagcaatacggcatcgagccttcgcagtgggagatttggtcctccgcagagtgctgatgggggagcgatgacacaaattgtcaccaccatgggaaggaccattcatcgttgcagaggttacacgacctcactacaggaattctaaagattc

SEQ ID NO: 98489 - DNA, 532 bp, Zea Mays
gtgagaagtaagaatcagataaatggagcatgctaaaacgttccagttctaactaggcttgcgtcctacagtcaacattgttctgataccactttgtcgcacccggatttaaggacaaatccagatgcacatcatatgtgagcccaggatatcaaatctcacatatagtcacaaatatgataatatcaaaagacgctttataataacatacgtaatataatcagagtataaccttatatagcaatcagcggatagacaacttcgttcctcaggtgtagacaccaactccacagggacaattgaatggttgatcacaagccttgactatcgtagttgaaatagcaagagtgagcacgtacatactcaacaaatataacatggggctatgaggctcaaaaggatagacactggtttactgcatcagcttttaatagtaagtcaaactttttagcaattaaatataataacaacaagttatgcttaaccccattaacccatatagttattattataagttctcatcacaatccat

SEQ ID NO: 98490 - DNA, 1136 bp, Zea Mays
tgcacccttaggcgacttttgcacggagagtcttttggaaaagactttgattttgcgcacttgttgtgctgttccggctgcacccttaggagacttttgcacggagagtcttttggaaaagacttcgattttgcgcacttgttgtgttgttccggctgcacccttaggagacttttgcgcgaagtgtcgcacgcgagggtagtcagcgctacccctcgcggtgacttcggtgtggtcgaatgccgaagaccgtcgatgcggtctttttcgacatattgtgtcttagtttttgcgggggatttttgcaggtatattacaaggctcctcctcattaaaaacctcaccccccgggaggaaaagagtgtgggccagaatgatactgtttggtgaattacaagggcgtgttggccctgaggattcaaacaaaaaatttgcggagattatcgatattccaggaatgctctaggtcctcgccagatggcgttgttagcctgtacgcgctgggggacgccttcgtcttgacgatgaatggaccctcccactttggctccagtttgccccgtgactctgtctgggttgtccggacgagtacgaggtccccttcgtcgaattctcttgggacgactgcgtggtcgcgctaggccttcgtttgggcttggtatttgttgagggcctgcagggcaaagacacggtctccgtcgatgaggtctttggaggttggttcgtttatgtcggggacggctgaagcgcttgtccgtggtgacccatgttttatttcctgcggggtcatagccttcgatccgtatggcaggcgaaagggagtgaatccagtcgcccgacactcattcgtgttcagcgcccagactgcttcaggtagtaggtcggcccatttacccttcttgtcgtcgagaagcattttcttgatggcagtgaaaatcttgttgttggcgcgctccacgacgccgttagattgtgggtgatatactgaggcgaaggcaagcttggtgccaatggagaagcagaagtccctgaagtcctagctgtcaaactgtttgccattgtcgactgtgagcatggacgggactccgaatcagcaaacaatgttttgccagaataatttctgggcagtcttcaac

SEQ ID NO: 98491 - DNA, 465 bp, Zea Mays
gtagaatcttgtctttttctgtggcctcatttctcagcctgataacctctgatcgaaggttattgagagctatagtgcaactctcatcttcatcattcttttgcgcccttagggcattgctaagtatcaagccctgcaagacagaataaaaggattaacataagaataaaaacactccattacagagtccataagcttcaaaattcacaacttttgtactttcaggctgttgtatgcaagactatctgcgagatcatccttcgtcatggcacaaaggccagcttcgagcttcagaaaacccatacttctggccatctcctggcagacggataattctttattgtctgggaggcagtacaagaaatcatcttcatccgtaccgttaaacactaaggccccctttgggtacttcagttctcgggcatagtgtttagcttcaaaaatttcttcttcggataatctctt

SEQ ID NO: 98492 - DNA, 434 bp, Zea Mays
cttccctgaggagctctgggcacaccacgtgtctggcctcccacgccgtggttggtcaagtagtaggtggagtcggaaagtttctgtgcctatatagggcaggcataattgcgtcccacaacctgcaccacattggttgtcaagcccttacaccataggtatggcaccagtacaccactatgggtacacgcatggacacaaccaccataactagtgattacatccaccatgacgtgtaggcgacaatgccataggactaagatgaacttacaccttctatagcaacagtaggcgaggtatgtctaacaggatggtaccacataacttgtgatactctcttccttggactataaaagggataggggtacccctctataagaggggttcaaacgtccaaacccatccccaaaccaaattcaagccaacaactcaaa

SEQ ID NO: 98493 - DNA, 569 bp, Zea Mays
catactatagtatatatgaccaaaatacatgaacatttgcattccatacacattcacttcttttgttgccccttgcctgcacacgtcttgtcacagcattccttagagcgtaagagctaatatagttcgctggcacattgtctttcttgttgtttgtgtctggagtacaaacattgttttcacttcttggtgttggtgcaagaggatcagctgggatgagttcaggagtttcagttgggatcactaaaggaggatcgactagagtgatgctttctcggttggcctgcattaaacaattgatcaaacaatttatgttgaagaagtttccaatagcaatggtggtaaaagatacaaatatcaaattttatacctgttgtgctgcagtaagggcaacaaccatttcgttcctcatttcttctctaagtacttgcctttttctttcttcttcttgtagtgcttgcattttttcttgcactattctttcccattctgcaacctcactcgcaagtttttcatttaatagttggacctgggtttcgagttcaatgttcttttggttggttgcagcc

SEQ ID NO: 98494 - DNA, 296 bp, Zea Mays
cgacgtcatgagtgtaatctccttcgggtcgaaagtctcggatttgggttgatttgatcaatcgcatgtgattttcagtggaatttccatacatacgatgcatggaatcatgtgccgccgtggctatttgttgtagtggtgaacatatagaagcatgtttgtctaacttgttttgtaggacatcttgtgatcggtatggctattgtgtgtatatgatgcatattagtgaattattcatgacatgcgtgtcgtgaccagggcaatacggctggagccatatgtattgtccaaattta

SEQ ID NO: 98495 - DNA, 521 bp, Zea Mays
aaccattccttcatccaagaacctggccgcttcttccgaaacatgggcatagggtaattcgcctcagaccgaggcacgaagctataacaaccaaaattgttatgataatgtgcatttccggttgccttcgtctgataagacagctcatgaatattgcagaagcatctcacatctggctctagtccttggcttctcatggcccatataaaaactcacactctaataagagcttcgggggtaatctgatgaaggtatatctcaaacataaaacttcgaccatcatcttgtggagcggaaagcgaagcctagctttcatgaagctcctgaagactaccacttcatcaccttctggcaggggaacggtgtcttctcctccagccctcactatagacacatcatgaaagtatttgcctttcatcacttcaatttgaccttgtctaattgtggattttccaaagacaacgtggcttggtctccacggtcgatcttcaacattttcattctcactctcaacatcgaag

SEQ ID NO: 98496 - DNA, 681 bp, Zea Mays
agagcgatatggtagatgaggactagcaaaattaataaatttagtgatacatttataccttacggagggagccctgctcaagttattgatgactctattcatacgagtcgatatcatgtgcaggatgaagtagagaaccacaatcgatgaatgaagatgttcacattgtcgtccctcatgtatccactaagaagaagaggaagaaagcaatcttctgatctgaatagtgagtagtcatgatgacactcttggaaaacctgatcacccgcatacctgagtaggtattgtagatgcaggtgatggctctaaaggcaatgctttcccgacaccctgtgcgactagagaattaaacaaaaaagactcagatgtaaatcaattgtttcactgaggggtaattatgtgttgtcatggtcttatactgttttttgtctaagaaaaagaatctaatagcgggagcttgggagagatagaaagaacaagtaaccactctaatctatgcatgttactttatatgttacatgtttatttcactttcattaatctagtcgttttcttcatcaaccgattcaagtggcaaatagtcccactcccacctccatgacacggtcataccacgacacgtcacaagatgctatagaaggcccagatggctccgagatctccatatgacccgacgtactt

SEQ ID NO: 98497 - DNA, 393 bp, Zea Mays
cgaaaggatcaaacgagcaggctcgtaacatggttgttttatgtcatgttctaaacctttatagctaactgttaactggttttagctgggttgtggcatctaacaactaatacttatttgaggaatataactaacaattagttgatccattctaaacctctcgactaattttagcaactagttattagttttagagatttagaacaagactctatactatctaaaactttgatttttttctacacttaatacaaataatcattagatataaaaggatgtacaaaattgagggggggccatggcctactttgcccccctatggatccgcctctgagtaagggtgggaagcaacacacaaatccgcagcaatacgcacacacacaagccaagact

SEQ ID NO: 98498 - DNA, 728 bp, Zea Mays
ccgcgtaggcaatgttgggccgggtgaaggtgaggtactagagagccccattgagtctctagtaggtcgttgcgtcactgaccgggtcgacaacgctcgtcggagaccttcgtctgagcatcaacaggcatggagtagggcttgtagtatgacatgttggcccactccagaacgttgatggcatactggcgctggtgaaggaagattccgtgggagcggcgctcaacagtgaccctgaggaagtggtggagagggcccaagtccttcatcacgaactcacgctccaatgcagcaatcgtgtgctcgaggagtatgacattggacaccatgagcacggtgtcgttgacatagagcaagaggtagacagtgttgtcgtcgacatagagcaagaggtagacagtgttgtcgtcgagccgaaagatgaatagggacgtgtcgacaaccagcttggaagtcaaagagggtcgaaggaggccatagtcgagagtgtcatggaggtagtgaagaatctacttcgcatcggtgaggtgtggcttccgcggggtgtgcgtgtgaaggcacacctgctggaccgcgtaggcgatgttgggccaggcgaaggtgaggtactagagagccccggcgagtctccggtaggccgtcgcgtcactgacggggcatcgtcgtcgtcggagaccttcgtctgagtgtcaacagccatggagtagggcttgtagtctaacatgttg

SEQ ID NO: 98499 - DNA, 372 bp, Zea Mays
gaagcttcagttctgctaactcggtgggagccatgcggtatggtctcttcgcgatgggtgccgtcccagggatcagatctatgtagaactccacttctctttctggtggcattcctggtaactcttctggaaacacatccatgaattcttctaccacttatacacttcctgttgctagactgaacatcattggatcattggcgggtggctgggcctgacaagagactgactttccttggtggtctgtgaggaggactgtcttgtctgcgcaactgatgatgcctatgtgtttagctaaccaatccatccctaagatcacatcaattcctttggatggcaagacggttaagtctgccaagaatattaccccac

SEQ ID NO: 98500 - DNA, 385 bp, Zea Mays
ctcgacccccgaagcccgctgtcatagcatcatcttcggcccttgaataagcaccaagcaattcatcactggttgcttcaatggcatctagccagtcgtcatttggctcatcaaattggctcatgtatttgaacatatacttcaagtaaattaagccaccttggctagacccagcagtagcctccttcggcatctcccacccacttccgagtggccacactttgtaagcaatatgctcctggactaagtccctggtacctatgtaagtgcatactgtgttaaaagcagcttggcacgcttgtatgtcgtttccaagggcaagggatggtctcctaatgccgaagtgagaccatataggacattggattatccccttgatgtcttc

SEQ ID NO: 98501 - DNA, 460 bp, Zea Mays
gtaagttcaagaggggaactggcggaccggggttaggttttgctactaaggatggaagtgtcgctcgctttgggaaggttggtgagtgcagtggtttgacaccttcaaagaaaccttcacccactcccaagcttatcaaaaccacccctgctaagcctatcacccatgtgagagatggtgtgattaatgaacctttgagagctcctcctcagaaacaagtgtggcttccaaaacctaaccatcttagtaacacacttgatgcctttcttgacatctctatcgatccccttcctagagcccctcacccatccaaaaagaaagccccctcccacaaacaaaatccacccaagagagaggttaggtaccattgtgagtattatgagagggatgggcatctagattctttttgctttaggaggaagagagatgagtggcaagtttctgggtcgagcaggaagga

SEQ ID NO: 98502 - DNA, 379 bp, Zea Mays
agctgaagaggccccttcgccaaattcaggtatcacggccggttcaatgtaacgcggccggtgagtcagaaccttcatcttcttgcccttcggctcagctgtgatggccaaagcggcaacctttccagaagcagcaatctttctttttaccccttgccatcacagcgggtaacaatagtcagggtatatgaagccaatagcatcaaataccctgttcaaccttttcttatttcgacccccgaaggctgcggacaaggcattgtcctcggttttggaatacgccccaagtaactcgtcgctagtagcttcaatgcacttcagctagtcatcatttggttcatcaaacttatccccaaacctgaatgtatacatcagccgg

SEQ ID NO: 98503 - DNA, 1026 bp, Zea Mays
ggttcgcattcggtttgccttccaaaaccaggtgtgacagtgtcacttagcacgctaataattcccctacctggcgcatcaaatgtcgtggttttgaaaaccagggggacaatacaattttgtgttaaggaggggacgctagcacggactcacaccgaatggtgaaccactagggattcgaacaaaggatctgtacggagtgtttatactggtgcaggctttcgccctagtccagtgtagtgttgatcgtagtattgctatgagaaacgtgttacagttggtgtgtgtgaacgaggggtcctccccttttatagcttaagggtaagaccttacagtggagacttgtttcctactagtaaggatatgatctattgtagtgtcgccttcagtagtcccgtcgatgtagccttccggaactcgtctccgggatcatgcgtagttgtttgccaagcatggtgtaacgtcttatccgttcggtatacggatccctatagcgagtctgacgttgaggtccctgtagcgtcgcctagtgggtcccacggggcagagtaaaggcatgtctcggggtcatgcgtggtgcggccttgccttttgtcaggaaccctatgtcatcctcgtagcattcgtagcatgcataagtgtacactcgacatggtgttgcaccatcctactcgagacgtgagttactgtggcaactttgaggtttaggttctccacgactgaggttgaccgatccaacaaggcagagaccgtatgcggtgtcgtactgtcacgttgatagagacttctcggcactccttcgatatgacacgccactgatcctgacgtagtttgacaacgcatcctgtcatggctgatgtagggcaatagtactggattggggcctccgtctcgctaagttactctacaaggacttagtcatcgactcagcctcgttgagttgctcgacaagggcttgatcggtcgctccgcctcacagggttactcaacagagacttggtcggccgcttcacttcgcagggtggc

SEQ ID NO: 98504 - DNA, 431 bp, Zea Mays
gccgagtgactgaggacgatgtcggcgttttagaggtaactgccgagtgacttgaagacgacgtcggagttttagagataactgccgagcgactgaagacgacgtcggcgttttagagataactgccgagtgaatgatggtaacgtcggcgttttagaaataacagccgagttagaacgggctgcgtcggccactttgaggataatagtcgagtgatgatgtggcataccggtgccttagaagtagccgccgggtgatgacatggtacgctagtgttttagaagtaattgtcgggtgatgactgggcgctttttggaaacggtatctgacccgggaatatcccatatatattgcgctttcagctgcctctactttccgtgccctagttcttgctttcctgcctctagatcttttctgtccttttgcaattc

SEQ ID NO: 98505 - DNA, 464 bp, Zea Mays
ttgtgttgcatgttgctcgtgggttaccgctggcggacctggtgctccggcctaggtaaactcttgctccctaaccctaacttctcgagtcgatgctctagtagtccctaacaagtgttgtatttttggatttgttgagcagctcgtgaggaatcggttcaccaatgatagagtcggtttgatccgaccttcgttaaccacaagctcatgctcatgtgtctaacgcgtgggcgatgtgtatgatgttggtctgggcgatcttttgggctctagcgtcattcatgaggctccgattgacctcgatgatgataatgttgtggggaatggtgatgctaatggaagcataggcgatgacgatttagccgttactggtggtgggaggtggaataggaaatgcacttctgatgtctgggacgacatggagaaagtccacgccaatgaaaatgacgcgatgataagagtag

SEQ ID NO: 98506 - DNA, 511 bp, Zea Mays
aactgttggtaacacgcctaaccataatttggaaagggccgcctactttagagagcggtacaaaaacttaactcccgtcgagagggagtttaggcgtgaacaccttaggttgtataataatacaccaaagtggaaagggtcaaagatagagtacataagaaaacgtagaccattcttggctgacacattgagttaggagtccatgaccatggagtccccaacatatacccctgaggttgtacaccctacaacagatgcaattgaacatgatggatccacagttaccccctgcgactgggttatccctggaatcgccagtaacccgttcctgccagcttcaacacagactgaggatgccgattcactgcatatatctactggaccagtaagacgtaaacaacatgtgccacgtagtgaaagacaagctatcttagcccgtcgaaaccggcaatttgaagcatccatttcaaggaacatggctactgggactgaggatactatcagtgacgct

SEQ ID NO: 98507 - DNA, 629 bp, Zea Mays
gattactatgatacgtgggcgcgtaatttatggatcttgcatgggaagtaatggcggaaggtaaaaaaacgtagcataagatggtgaaagctatggcataaaaccgaaacggcataatagttgcataaatagtatataccgtttggcgtaaaacgttgagtcattgtgcgtaaatattttattatggattttagtttgacattggcatcgccataatatcgggacggtttcggaaataatggggagaccctgtaaacgtggatgcggttacttttatagtatccgagattaactttcattcgaaaaaaagaccactaagcctgcataactaattggagttggagatggccggctctagagagtcgccggcgatggaaggagatggcgtttgtcttgatccagagacagagggaggagttggtggtaactcactggtgacaccacctcctgctctactgggtcctaagatcgccgagatgagcataggggaagaagaagaacaaagggttcgacctcctatgtccaatattagctccagggagatggatacaccacaaatactgcattcacatgtaagtccaatcgctgtatttgattattgattgaatatattgttgtgaacatattcc

SEQ ID NO: 98508 - DNA, 529 bp, Zea Mays
ttagactgctcccgaaggtcgcattgctactgaggccgaagatgcccttctggatgctgatcatgacttggggcaggcgccagtggtggtggtggtaactgagcccagaaagcttgagagtgacttgccgaagaggcagaagccgtaggctgttgattgcctacgtactccgggatatacgaagagtagcatgaagcagtatggaggacctacttcagctgattctgatgtgcttcacctttcagcaatttccttctgcttctgggtcatgacctggcacgtccttgttgtgtgtcccttgtcctcgccatagaacaggcacaacaatttcctaggttgataaccgtaccttcctccgccaaagcttctcccccctctgcctctcagggctggtggtctgtaggaagtttgctgcatgcccgaagactatgagctgtgctaactgctctgagcgttactggccctgtcattgttagcattgggattgtggattatcctgacatgcctgggatgtagtcttcctccgaag

SEQ ID NO: 98509 - DNA, 581 bp, Zea Mays
aaaatttcttaagactcattttccccccgcactggacggcgggttgattcatatattccacagggtctcttgtgcaaaatgccacagcgaaggggtaaagagccatcagaaccgttggatcggcgcccgatggctcagattagactaagcgcattataaacccgcgaatgacgcaaaccgcacgatcgcgatctaacgcacaggatccctaccccgaggcagtaggagccgatcaaatcacagtcgtccagattcgatcggatggcccaaagcaattaaacctgaaacatcccggttacttagatcctcaccgttcactctcagatcaacgatcaagaggttatcttccaccccagactgcggccagccaaggcaccgacgagccacagcggcggcgccatgaactgcaatctaatccgcagcccacgccccgatcgcacaatccgagagcacctacgcgtttccgagtgaaaagagaacctaggagagggattcttaccaggggtcgcggcacgaatagctccggccacggaactaggcggtcgggtgttgttgaaggagctccgacgagcaattgccgg

SEQ ID NO: 98510 - DNA, 428 bp, Zea Mays
ttttgagagaagctcatgattcggcttactctattcaccctgggagtacaaagatgtaccagaatttgaaggaaaagtattggtggtacggtttgaaaagagatgttgctactcatgttgcattgtgtgacgtgtgtcagcattttaaagccgaacaccaaagaccagcaggattactacaacttctcaaggtacctgaatggaaatgggaagaaatcggtatggatttcatagttagactaccccatactcgggatggctatgattcaatatgggtcatagtagacaggttgaataaagtggcacactttatacctgtgaagacaacttactccggagcccagttagcagagttatatatgtcgaggattggttgtctacttggagtaccgaagaagatcgtatcagatctaggaacccagtttacc

SEQ ID NO: 98511 - DNA, 603 bp, Zea Mays
gttgaagctaccacaggggaaactgaccgtgcggcgactgcgtgccattgatgggaatcaagggcttgcgcgtgtgcatgtggaaggcatccgtggcatcactaggttgggggggagcctcgctgtcgccgaaattattcgtcgccgcatacactgtcgtcgtggggtgttgtggatcatagccagctcgttcgcatgcttcattgtaggtaagcctctgcccatgctgctaggttctccctccgctttgtgtggctcgggtaagcgtagatgttgaggcactgggggtctggagcacctggctctagcgggtgcgccgctggggtggaagcgcgccgccgcctcattgcggctcggggcaggggtgatgcgccaaaccgttgatcagtgatcttagggcttggggtaggtaccggcgttgggccgttgatgccccagtgggtggttcagattagagttaagacatacctcctcgtgaattaaatctgggacgttgagtttgatcgaagggatgtgggttgagcagagagtggaagcatccggaccgttgatccatcgtttggcgctcgagtattgatctagggtgttttaaatcctggctat

SEQ ID NO: 98512 - DNA, 485 bp, Zea Mays
gtcaaactaaaattaagcagtaggtatacacacaccattaattaattgaaaaacacatcgatttaatttgttttccgttcgtcggctgtaattatccaatttgtacacgatggtttctttgtttgtttctgaaaccttctcgcgcgcgcggtggtataatatcaacgtcacgatcagagtacgcgtgtacacgtactgcgctctcgatatgcacaagaccacactaacaaagctagccaagcgtccgtcgcttggacgagctttttgccaatctaaaaagaagagtaaaattaacttgaatcatttggagttcatctaaattcaccgcgaggaacgacaaccctctgctatatggtatatctctcgatttgtttaagccggtgaagccgtcctgctgcctgccaaatagctagactctagcaactactgagctttaaaaagagaaacaaaattaaagaatggcaacctttttacggccaacccct

SEQ ID NO: 98513 - DNA, 955 bp, Zea Mays
gaaactcatgagggtgctcatgaattacacgactcagatgtttagcagcattgagataaatgtgccacaaacaaagtcgatgccttgtatttagaaatacataagcaattgctcgtgccatagctgcgtcttgatcagtgaaaattgtatttggatgcttttctgccattgctgtcaaaaaggtttcaaagagccatataaatgacggaatagtttcattatataataatgcagctccaaaaataattgtctgcttgtgatggttggttccaagaattggagcaaaaggcatttcaaacttatttatctgaaatgtggtgtaaaacgatatagcatcaccaaaacattcgtaatccatgatagactgaccatcaacccaaaagaaattagttatacgaccagttggcttatctatttgaatagcataaaaaatgcaggatcctcaatttgcttgttcttcaagtattccaacagagtctgcgcatcattggattctaaatatttctttcgctctcgaccaatctcatatttgagcaattagtagtctgtcggcttctataacacgtcgttgagatcttagcttgcacgccttatttggactagctagataatggttgtgctcgggtacaatcttttggactgtccaaaccccttctccgctgacaccaaactgaatgctagcattacaacctgtccttgtagtaccaaatcctcgtttgctacaaacaaggagttttgaatatatggtcttatctgctcaacgctttgtatcgctccttctaacactgaatccaaccttaccagcatagatattatacatctcataagcatcttcctcggactcaaacgttattccaacttcaggtataacaacacgatgcaattatttttcatcaacctatcgtaacatgtgtttgaatgaaatcacattactagagtataaagaattattttc

SEQ ID NO: 98514 - DNA, 273 bp, Zea Mays
gggtatttccggggcttatgtgctactcgctgcggatggccgagagcaaggagacgtggtgacaggtatgatttcagttgattcatttgtggcccatgctctttttgactctggcgctagctattcgtttgtttcggaggattttgtgtcgcgggctggtctttcggtgcagaggttgggtcacccaattttggttagttctgctaatggctccattagtagctgttcagtttgtcaggggtgttccgtcattcttgctgatgaggtcttttc

SEQ ID NO: 98515 - DNA, 297 bp, Zea Mays
tgctctccatggcgtttgtatgtacgtggtccttgagttggtgtgcctgtttcccgcgtgtttggatccgtgaaatatgggcttaattgtatagatctatgagagtggcggtggattgaggcagcgctagcggaggatcaagatcgggacgtttgtgtgattcaaagccaagttattgtgcatgtgcttgggaagcggagcgagcgatacacatgagctaatctaagaatgctagtaaaggcttggttgtgcttgtgcgtagataactaagacattgtttatttatctaaagttatt

SEQ ID NO: 98516 - DNA, 418 bp, Zea Mays
gtttaatttgcaaatcttctcacatgtgaaccatatgagttaaggtaccctaattccttggtttttgcacttaggtccaaaaagtgtgcacattttgcatagaaccccttagggttttagtccagggttttctaggggtctatttaaggtttttgacacttctagggtttggatgctacttaagtccatccatggtgacattttatgattattacaactaagttttgaagttttctcttagttagactttggttactcttttgagcccagtctagggttaagtactatatcctagggtttcacccatgaaatgtcacatcaatacaacttatttgaaatttttgcctagtgaatgcgctctaggtgtgataaacacatgatatgccaatgcttatgatgttatgctcaaattttagtg

SEQ ID NO: 98517 - DNA, 435 bp, Zea Mays
gctgccgcagttgaggctaggtcctccaccacggcatggaagcttagtctcgatagctatggcgcgatggtcctcctcccccgtatgatggtcctcctgctgtctcgactacgcggtgtcgtaggtatgggtgccgctgcaggctcaactgcatggacgttgctcggagatgaggacacccatgcacaccaatggatagagggtgaacaacaaaactcttagcggtggtcagacagatgctatattttagcggattgtttaccatttctagcaaacgacgaaaaatgaaatatatagggtagtggacgctttagcatctcttgctagagacagccttagggttagggtttagggttcgaggttagggttagagttagggttagggattacggtttgggttaggcttcaaggtacgcacccagtctaagaagggta

SEQ ID NO: 98518 - DNA, 478 bp, Zea Mays
cgattggcaaggattttagtgatgagcttagcaacactatgaaccaaacttataggcctaaaatccttaacctgggcagcaccctcctttttagggatcagagtgatgtatgctgaattgagtttgccaaagttgttgaattttctgccccaaactgctgacaccactttcatgaaatcatgtttgattatgtgccaacagactctgtagaatcgtccagtaaaaccatcaggtccaggtgccttttcagggggcagacttacaatagtgtcccatacctctttttcagaaaaaggtgcatccaactcagagagatcatgactgggaatatcaagagcatctaaatcaatgattctatctctgcccacatttgtaccaatcaggttgaagaagaaatgatccactgctgcagccttctcatcatgcctagttaaggtgacatccccttccctctgagaggttacaatgttcttccttt

SEQ ID NO: 98519 - DNA, 423 bp, Zea Mays
tgccgctagctgttgttcgcagttactttggatgatggctaccttatgggattttgacttggattttcatcatgtgcctctgctttgtgatagaacgagtgccataagtgttgccaagaatcatgtgctacattcgaggaccaagcacattgatgttcgctttcactttcttcgtgatcattatgagaaaggcgacatcgaattgcgctatattgataccactcgccagcttgcagacattttgaccaaaccccttgatcaaaaaacttttgttcatttgcgaggagaattgggtgtttgtttccctttttgattagagggctcccttttggtcttttcttcttattttctgctttcactttcttttgtattatatctgcatgtcatattgagcttcacttgtataactgctagaatgtgatt

SEQ ID NO: 98520 - DNA, 642 bp, Zea Mays
ggccgaagcgccgaagcgtcctgacgaagccaaagaaaaatcggccgaagaaccagagctagaggagcccgccactagagtcgaagttgccgaaggtgtccaaaggtcctgcaataactcccaagaggaggaggatggctagcatgttggacgctgtcttggagtcgacaagggcaccaactcctgcctctgcaaaggaggccgccgaagctgctacaactcatgttgaagtcgaagatgggccctcagttcccaccaaaacagggcccgttgaaactattgagaaggattctgaacaaagacctttggatgccgctctggtcttggaaaaagaaagcgcacctaagaaggttaaatcgcctactcccgaagcgtctactgaagagttagactttatcatttgacatgcttcgggtaaacagttatcggaagaggagattgccgaagctaaacactatgccagggaactgaagtatccgaaaggatccttggtgtataatggcgctgatgaagatgactttctgtaatgccttctagacaacaaggaaatatctatttgccgggagatggcaaggaacatagggtttccgaagctcgaagttggcctctcgctatgttgaaggatgaccttgcagacagcct

SEQ ID NO: 98521 - DNA, 288 bp, Zea Mays
atatgtgttatgcctctaatgcaccctctcgagctatgaagtgcataaacaatagggaacttgtggtaataactggtgctctcatggccatacaggtaaaaggcaaaggtatggaaaatggaactatgcaatttcattaaatatcttgaagttccattgattgtgatcatagctatgttcttgcatttcattggtagtatcttggcttaggtgacttatgccttaaaatgttgtttctcttggtgtacctaagaaaatttttcttaatcttgatgtgattagacattg

SEQ ID NO: 98522 - DNA, 275 bp, Zea Mays
taagatgacaaactacattgcaagtgctatcatccaacttaaaaaaccaagtaagatcacaaaaagcctctattggatctgtatacagtatggagacaagcaacaaatatgcacatccgttgcatgtaagccaatcctgataccttctctgtcattaatcgttggaagtcaagaatgtttgctagactcagtattgaatgctaattgtaatgtactgtacatcagggattagcaacaacaagctatgtgatcttttttattagatgaacacaaac

SEQ ID NO: 98523 - DNA, 673 bp, Zea Mays
atatggcagaaaatgcaggactccactgtattgggatcaaactggagaaagacagttctttggacctgaacttattcaagaggcagaagaacaagttcgaatgataagagaaaatttgagaattgcacaatctaggcaaaagagttatgctgataatagaaggagactactggagtttaaggagggtgatcatgtgtatctgaaggtgtcaccaatccggggtatgaggagatttaaagttaaaggaaagttgtcccctcgcttcattggacctttcttgatcttaaagtgagtgggagaagttgcatatcaactgaagctacccgatcacctgtcaggtgtacatgaagtatttcatgtgtctcagctaaagaagtgcctcagggtacctgaggagcaactaccaatggaggaccttagtgttcaagaggatttgacttatgctgagtaccccatcaagattctggatactttgattcgagttacgagaaataaggttataaagatgtgcaaagttcaatggagtcaccacggtgaagatgaagcaatgtgggaaagagaagaagagcttcgtataggttttccccaccttttccctaaatcttcttaaatctcgaggacgagattccttttaaggggggtagtatttgtaatacccaaaattgtaaaagca

SEQ ID NO: 98524 - DNA, 374 bp, Zea Mays
ccctgacgtaaagaccactcctgacgaatggcagcaagataagtagatgtccagcacacacaacaatcacgaagaagggtccacatctgatgagaactgtcactcaacaaactctgtagaaaagcgagcctccacactagcggtgagaatagaaccagctcaagcatcctcatccatccatatccgatatgcactctactgagcctcatatgatgccagctgatcatcataatctgcaagtagagtgcatcagctgctccctatactgctccattactcgtcttattaagaaaatggctttcatggttgaccttctagagttctaggcacgaaaccaaattggttaaaagagattctcattattcctctcaggc

SEQ ID NO: 98525 - DNA, 780 bp, Zea Mays
cggaccgtgagcgagaacgcaggaggaggccgccaccatgaagtagagagaggaagagagcaaatcacgttaccggttgattcgtgatgtcaagtccccggtgggcgacggggggatcaacaatattattcgcacgtggttgtggcctttccaagcggggagatccaccagtgattccccaattgctcgtcggagtactttcaacaccgtgatgtcgcgggtcgtcgtgggccggctccccggaactcgattgccggtaaaatcatctccacatctttcaccttgtgcttctcgtagcgtagcgcccgttggtttgcgtattagagcatcggggcgccggtcgtggccacaccgacaggctgcgccgctgggggattgtttggcgctgccgctttggtggctggaggtgaagggagatgcgacagccactgatcagaaaatcgacgacaaggattaagtcttgcgtaccgattcgtatggattccatctgagtcgtaggattctgatcgggcgcaggtgatcagatcatgattatttaaatcatggcatttgtttacagatccgacgatcggtgatgcgtaccggttcgtatgggggttcgatttaatctgggccgtccgcgttggatcgggcgaccatgacttaataccggttcagaggggactggatttaatctcatgcgtccaactctgatccaacggtccagatttgcacataccccttcacccggattattatgcaaaagagaccccataatatttacaaattaatccgtcgtcc

SEQ ID NO: 98526 - DNA, 613 bp, Zea Mays
gtgtgccctcgcgtgcctgcgcctgcgagggcgctgtgtactttgtctggtatggttgattatgctgtgccggtgtgattacagttggtcttgctgtcgtttctgctttcgttgtactaggtcggctgcgcccttgggcggctcttgtgcggagtctttgcgatagacatcggaatttttcgcgcttgttgtgctaagtccggctgcacccttaggcgacttctgcgcggatagtcttcgcgatagacatcggaatttctcgcacttgttgtgctaagtccggctgcacccttaggcgacttctgcgcggattagtcgcacgcgagggtggctagcgcttagcctcgcggtgacttcgaattggtcgaatgccgaagaccgttgtcacggtctttttttgacacatgtttttgcgggggatttttctcacatgtattacatggctccgcctcgttaaaaacctcaccccccgggaggaaaagagtgcgggccggtacaagattgtttgcggtgacttacaagggcgaactcagccctaaatggattaaacaaaaaatttgcgaaggttgtcgatgttccaggagtgctccaggtcctcgccatttggcgttgt

SEQ ID NO: 98527 - DNA, 434 bp, Zea Mays
tgaatgtagcacatgattcttggcaacacttatggcactcgtgctatcacaaagcagaggcacatgatgaaaatccaagtcaaagtctcataaggtagccatcatccaaagtaactgcgaacaactagcggtagtaatatactcggcctctgtggtagacagggcaacactagactgtttttgggaagaccatgaaaccaacgaagtacccaaaaactgacaagtcctagaagtagacctgcgctccaaaaggcaacccgcaaaatcagcatcagaataaccgcacaaggacagaacggacaatgaggagtaccacaaaccaaactcgggagtgaaacgtaggtacctcataatccgtttcacagccgttctgtgagatgtgcgtggggaagcctagaaacgagcgcacaaacatactgcgaagtgtatgtccg

SEQ ID NO: 98528 - DNA, 376 bp, Zea Mays
gatcctttggaaatacatctggaaactcggacacacccttgataatctcaggtagatctgcttcactgctatcaatagccatctgataacaacttcccttctttggctcaggtgggactaactcggtcaccacttcctctcctagtgggggcatcaacttgattgtcctcttatcacaactgataactgcctgatacttatctagccaattcatccctaggatgacatctattccctgagtacccattactatgaggttagcgggaaacgctatcccccttatttccacacttacattcaagcaaatgttatcggttcgaattctaccaccggctgaatcaatttgaatgggggttgacatggtagtaattggaag

SEQ ID NO: 98529 - DNA, 554 bp, Zea Mays
gccatctcaaggtacaagagatataattcaactcctacaagctagagcaacacctcatagagatcatatagcttctcaagtgccattagtgagaattgttcaagtgatagccattctagaacaccttgtgctagtgccttgagtgagtgcattgtgttgttgcgatattgtgctcttgcgcttgttgttccattgctgtaaatgctagcaagaggctccaagtttgtggagtgccttgtagagactctatatctcatcttagaatatctagagggatcaagcttgattgttggaatcagttgatagggtttaagcataccccatccttagggacacctcaatggaaacataggttctttagaaccgaactcttataaatcaaatcatcatgtctctatgtgtgtttgcttttgttgtgatttgttcttccctcttcctctctaacttctcttgcatgaactttgattcaaatcttaagtgttgttctcgaagttaattccataatcatttgagcacaattggcaagaactctcccctactttgattctatttcc

SEQ ID NO: 98530 - DNA, 751 bp, Zea Mays
tcctcaaataggcttttctccaaaaccctaaatccccgcacgccacgtgctcggtgaaatgcccaaaccactcaaaattgctccgattgaacccaaacttttcaggcaccttcacaacaccttcagtaacatattcgcgcaatttcacgccaatccgatataccaggcttcaatttcacccaattccctgtttcgagcgatcctttccgagcctagtgcctaaatttcatcttctttgcctaaattcaaaccaagcacacacttcactcatattcacccatataaacctattcgtgaagtatcggctcaattccatgtcatttcatacctcaattcgaattccaaacctcctatgacactatttctcgttcaaacgctgttttcgcgtcgtttgacctctcgatcgccatatctctcgttttctgtgccatatttctctgtgtatgtatttattcacatttcatatacttatgactatgtgactaatacgtgctcacctcttctatcatttcagcgaccttgcctgcccgtgagtcatctcctgtgctgcctggattttcacctctcgtgtgagctttccatgtagacatccactcttctgatattctatcggcaattatcgacttgtgcttagcttctctctctcatttgcagtcgtcaggtcaggatgccacgcacgaagaatgtgtcggcgccaggggaggagatgacgaggaccctcctcgcccctttaggcaggtcaagggaaaga

SEQ ID NO: 98531 - DNA, 341 bp, Zea Mays
aagttttcttccccagggttagctgggggaggatagctgccagaaggatcctggggaggaggataggatgaagatggacccggatccccttggtggggaggcgggacatactgctctctgtcatcaaaaaattcttcatcttcaccttcttcatcttctgctgacatgaatggaaccccataggtttgctgatgccattcattaatctcttgtggaggaggatggaggggcacgtcaggcgagcggggagcaaaagggatacccatagatgtggcctaacgatgaaggttgtcgtaagtctcccactgtcgcctagctagctcatgaacatcagaagagat

SEQ ID NO: 98532 - DNA, 407 bp, Zea Mays
tgaggttacattcgatgagacacaccatctttatggaggaggagcatgacaatgctgattggggtgatcccgagccgaccccactagctatgtatcaacagatgtcccgctttgctcactcagcttttgttgcctcttttgagccctgatatgttggacacgctttgtctgatcctaactgggtcaatgctatgcttgaggagcatgaaaattttgagagaaatcaggtttgggttttgatgccacctccttcaaactaccatcccctaggtacaaaatgggttttcaaaaacaaagagagtgaggatgggttgatagtgagaaacaaggtgaggttggtagcccaagggttttgccagaaatagggtattgactatgaggagacctttgcccctgttgcccattta

SEQ ID NO: 98533 - DNA, 318 bp, Zea Mays
gttctgcttcctatcactaaatgctgcagatgaaactctcttgttttttgaataatggtgttacgtccaggctaaaggaaatgtagagagtacctgtcgtttctccttatattctgtgtatgcagtcaagttctattgactcccaacaagaaatggagttaatataaggagtgctttgcttacaaatatcctgtaaatagtgttctgcttcctattgttcaaccatgatgtgtgcattttcatttaaactttctttaattggtaaaggtacatcaccattgtcggcttctcctgctcactactcctcttgtgcacgtc

SEQ ID NO: 98534 - DNA, 579 bp, Zea Mays
gaaaaaataaatatgggacatttgtacaagagcgccactgaaataatcagtaaattgttagtgttttaattgatgtttgtgtccattcaaggcacatattatggttaggggctggcagtactaattttaatgaaaagacaggagctctgccactcaattaaagaagttcatacaacaacacactgtactcttacaaccgcacaacagccgatccagtagcccttaagacacaaatcgttgccaagatttcgtgcaaaagcaacaaaacagagtgaacacaaaccgttgccaagactccgtgcaaaagaacaaaacagagtggattcttcatgacaaaccttagcccctgctaccaagacacagccacctgcacacaactggattcaccaaacacacctagaaagaggctaccacatgtcatcgtcaccaagcttcatcatgcccccaacgaaacaggccggactccatatcaacagggcgccaagagaaagaagcagcaccaagaaggcatacctgtccgctcggctttaatccgtactggcttctgctgagtgtttttgtctctatagattaaagccg

SEQ ID NO: 98535 - DNA, 385 bp, Zea Mays
tgaaatagctattttatttatgtaacattgtattcatgttttttacgtttctagactatttctcggattcacaaccaccacaatcatctatggcgagatatccacgaataacaggttcatcccccaacatattagtgtcgttcccgaaattctgtaaaatttacaatattcttattgtgcataatcaaaacaaaataatttcatatcataatattcataaatatacactccatcatgcataaattcttaccttctctacacttattaaagttgttgatgcaccccacacacacctagtggcaacccccacatttccatttgaaaccaactgcactacagactaatacaaacccaaaaatcaatgacaaaagttgtacaatcaaat

SEQ ID NO: 98536 - DNA, 358 bp, Zea Mays
gaaggcttagctggtagtatactttgagttcggtgcacttgcatccgttcacaattctctttgtcatctacttgttttcatgttcttttccgaatataccattcaacacaaaggcaaacaccctttagtgcttgccgtcatattcttttccagttacatcggttgctctgtgagacaaccactcacttgcatttcttaagaagcattggtagttacctatagcagtcccatagtacctctcgcgtcaacaaacatgaaacaagttcttcttacccaatgatgaacaaagatatataacaacctagggagactgtctgcataagctcacttgaaatcagaacctcaatgacgacatgat

SEQ ID NO: 98537 - DNA, 711 bp, Zea Mays
aactttctctttgttagtaacgattctatcctcctttgtcataaatcaccacaaagcgtgtaaaggataatgttgggggcctctatagccaaagggccttgaaacattgtactaatagttaaacatgctcccattattactaacatgtagcaaagataaccttcatctgcagcggtgtacaaggaagggacgaagctagggagcttcggcctcgtcggatttaccggtgaacaggaacaaggggagaagaagcttcggctctgaggcgctaacacacaaagcagaaggggatgagaagaatctagaagattggttggcacaatacgagagaggaaaagtgatgaggacatcctccactattacctgttggcaaagacgcaattggcccagttggcccaattgtagtcggacggtgaccgtgtgagcctgagaattatcccaccttgcttaacttgggaggaggaagccactttaaaagggagagccacccttcccccattggactagtcttttagggcgattgggcctttccctgagttgggtgtgcataatgaactgttgggctccgggcaatcctaatttgttgggcctcggccaaccccacctgggctgggtgtatcaaaaagacaacattagccttataagacttgtagctcatatgtatagtatttatggatatttttgtaatttcatatgaagatatatctcacc

SEQ ID NO: 98538 - DNA, 433 bp, Zea Mays
cgtgccgaaggacgaacaaagaggtgtcggacttggcttcaatgaaacctagggactgtaggtgagcggcgaagcaactgtaccatgcccggggagcctgcttcattctgtaaagtgacttgttgagccgacaaatgtggtcgggccgagccgggtcaacaaagccaaagggctgagtgcagtagactgtctcagagagggtgccatgtaagaacgcattcttgacgtcgaactgatggatcggccagtcactggagagagccaagctaaggacggtgcagatggtggcggttttgacaacgtgacagaatgtctcatcgtagtcaatgccagaacgatgagtgaagccgtggagaacccaacgagccttgtatcgatccagagtaccattagacaacagtttgtgcttgaagatccatttgccggtgacgac

SEQ ID NO: 98539 - DNA, 326 bp, Zea Mays
cttttttctgcgtttcccattgacaatcatatggaagtattttgtgttgttatctcctaggagaacatcctttgtttttgcccattgaaaatatttgatctcttcctctctgagaagtttggtcagatggtcacgcgagtgagtcaagaagacgagcttagactcattcagatctctggtttcggcttcagtatccaacgtgcaaatgatattttggaggtctgatttctttttcttataatccccatttgtttgagccgcccaaccttggaggaacctccataacgcgctcagcttgttattccatctttgtaccgagttccgac

SEQ ID NO: 98540 - DNA, 352 bp, Zea Mays
gttctagtatataatttcatattaaaaaaccattttccaattaaattattcaatttaaaatagctctggactgggcctcaattaaataggaacacagggggttcgtggtaataatttccagacacagtgcacaacggccatggactgcgggttggtttctataaactctagggacttatttacaatttgtgccagccgaaagggtacataacaatccttgccgctcgatcaactacgcacgacatagattaaatctgatctcctctgaaccggtattcaatgtggagccttggatctagatcctacgacccacaattgatctgcaaacataaacgccagagcatgatctcac

SEQ ID NO: 98541 - DNA, 305 bp, Zea Mays
ctggttctcagtaacctcctcaaaatgcaaccagaccttggaggtgggacccctcctcctagagcgcttaccagggacaacaacagatgtgctagcatcggacgttgggctggtggatcggttgtgcgtctccgtcgtgcccggtgtccccgctgttcctgtctccgtacctatccccgcattggagccatcaacatcgatagcagcagcagaactgctaccgaggaggaaacatcgagcatcgtcttcctcattttgagcttcaagtagccgctcctcggcctcaacagctcgaacgaactcgt

SEQ ID NO: 98542 - DNA, 938 bp, Zea Mays
agcatatgagtgacagttacatggatgatattgcatccactagtggccaatatgatcagcaagatagagatcggagctggttcctatcatcacttcatcagatttttagtagaaggtaaatagttctttttaccgtctggtaaatattggaacttcttagtttatgattttcgaaggaaaagaatttttttctcgaacactgtgtatcattatattaagaagagaaaccagagaggagttaatcgaaatgtttttagtttttagatcatctgttacctgctcatatatttctacattatagagttgagtagttaacactaaccacttggctctctttgtgccacactgatttaaatgaattactgcagatatctactacgtcaaagtgctttggaattatttatggtagacaggtcaaactttttatttgatttcgaggtacatccttgatgagactctaatccaagttgtttgaacctcatgcatgttataggtgaataaccttgtttgaaattgtatcttaactttatttaggatataggatcacgtacacatgcttatcgggcccttgttcacaccaaacctccttatttgaacaccgtttccgttgctacccaagtaagtgctcagtgcagttctgaaaccagtaggttttttgtcctttcagagccactaatctgttagattctttttagaggcctgaacaaatcttcaagcagacacagttgatggagcgctgggctaaatgggaggtacatgaacacagtgatttcatttttgcagcagcacatccctatgtgttagatatcaagatctgaatatactttgcttgtgcagattagcaattttgaatatttgatggaactgaacactctcgctggccgcacttacaatgacattactcaggcatctttttttactacatgatcctaagtcca

SEQ ID NO: 98543 - DNA, 688 bp, Zea Mays
gagcacatgcctctatataagcgtcgtaggatgtaataggaagaacaccaaagaaatacaaatctcccagaggggcgaatccttcgacaccctagcgaagtctcacgctagagcagctgacaaagggatccaaccctctgttcggccaccgtattctctacgttctctcacacaatcatctatattgttctattcttccctgtacacacctcctagaaagaccaaaatacatcataagatgtctctcttatagcacgctagccccttcttaaatatagacctctgcaaatagactttaccctaaaggcccattagcgttctcatgaatcataattgccctttagacatatgttcaactgattcaggatcaaattcgttcataactttggattggtttgatcttcatatggtttacagtttggggttccctcgaaggagaaggctaacagatgaagacataattggaggctaacagatgaagacagaataggaagcacatgttagacgaattaaaactaaacaaacccaatccttttaccggcatgtggcatatgcggcggcatatggacttgcgagtgcacaccggagtaagaagcgatgaacgaaaaaaatggggtggagagaaattttggctctttggtattaggtatagatatagatatagatttgtaagtatttctaaaaaaca

SEQ ID NO: 98544 - DNA, 510 bp, Zea Mays
agccgtcgtctccagaatcgtcgactaaaaaagcaccagacatttatgtttgaatctaaccagaaaacgaactggcagccatttattgtttttctttttttttttggtccaactgagtaagtatgctgtacttggcaatgatgaggtattggtactagaaagtagaaatacggatacggcgtaccctacgtgtggtcggccgagcatccagcccggaccctttcaggaggaaagttgcaggctatcagcttgacagctgcaagccaacccactattcaacactgctccacatggcgcttgccaagaccacgctttctctcaaatcaaaactccaaaagagatcctccatgttcttctttcctgtgacgagaggaggccagggatacccccatgctttgccgaacataagaaaatggaaaagctggccaaagctacaaaagctagggcttgtcctatcccactaccaaccacttactacctgggtctgacgtgtcatggcctggatatgca

SEQ ID NO: 98545 - DNA, 1371 bp, Zea Mays
tttatttggctctaaaagtaatatttatgaccctattaagtagcagaatcaagtttttgcggtaacaagacaaaataacacagacaaaaacattataaaacggaaggagcacatctctaggtctgaccgtcttagtgaccgagtctggtcaatttattttagtttccggtcccatataggaattgaatatatcgtaatgcacactagtgggtgaagcaacagcatcatcgcttccatattattgcatcttccgactccctcgattcaccagtcaacggcttcatttcttcgctgcaccattaggctccgttctacttctacctaataacaggtgcgttagtttttttttctgcttgcagtaggcggtacttgcaataattatttttggttacagcatttgttcataataagtcagctaggtttctcctagtctgattctgttgacttttctgaggtgtagtggggatctctgatacacagtgcttgtgtatctaggtcaaaccgaggtcaagatctgatcattttctcagcatttcaggctatatctagatgctagtttctagagggtttttttgggggttctcagcgtttgtgctgaagaaatcacttccctttcgaatgaaatcgtgcatctattcggggaatatgcacacaccgttggaacaaagggaaatagtgtttactgtcagatttcaaccatctcattggggggtgtgaagcacttttgctgtttatcatagttcttcagtctgacactctgactcatcgcttattatggacgttcttgcacatgatgtaatggcaagagcaaacgtctgtgctgctatagtggcaaatttcttgtgctctacactctgactcttgctgtttatcatagttcttcgcggccagagcaaacgtcagtgctgctaaagtggcaagtttcttgtgcatatattggggttcctgttttccttgtgctatagtgccaaagctgaactttaattgcaagttatcaggccaaatgtttgtagatactgctgataatcacgcactgcgggtcagctaagcttcaggaaacgataggcgaaacactggccacgagtccagaccatgttcctctcttccctgtaatggtcgccctttcctacacagggcggctagaatgcgcagcaagggtcgagaggcctgtcggcagtgcgccccttgcgaccgcgtgtgacagtgctgagccatcactacttgttctgatccgtatctatccttgtcactacagttctgcaaataatctttcatggttctgtctttcctggtcaaggaaatttactggttctggctttactaatgtattgtgcaactagtttgaagggtgtagttgtttaatttgaaatg

SEQ ID NO: 98546 - DNA, 491 bp, Zea Mays
tatcagttttatagtgcccgcacatggcaaaattgggagagtggcgtctgcccgaccgattcttgccggatgccgggtggtgattccttctggtgggctcccgtcagtggacagtggcatctgcccgctccgtctgtgatccttggtcccctaaacactgctttctctctctcgtttttttccgcatgattttgattatcgaaaatgatcgcgcttatactagagggtaaatgagcggggacatattttggtatttagtttcgtttctttctgatttcgaggagggaagtgtctgcatgtaaaaaaacctgtaatttctgaagttaggagggctttatctttaggacgcgcagtaaactcttgtgaggtgttctttgcagcgaacagtgatctagatggattcagatctgtagctgttgttcgaattctttttttatatggtttggtttttattcgcaccctttcaatccacggacgggacgactttattc

SEQ ID NO: 98547 - DNA, 559 bp, Zea Mays
acggatatttctttgttgtccgggagacagtagtgtcattaaacactaaagctcccttcggatatttcaaatttcgcgcataatgtctggcttccagaacttcttcttcggacaactttttcaccgaagcatgacgataaatataatcagcatcctcgacaatggcttcgggggcaggagattttgccctttctgtcgcttcttgcccttcttccatgccagcaactaaagcctgttgatcagttttatcttcaggcacgacgaccttcgtctcaataggtgctgcaggcttagcttcggccttggcttggactttagcagcttcagcaactttcttaataggaccagagctcaaggcctctgcggtctccaagacagcgtctagcacattggccatccttctcctcttgggagttgcggtaggagctttctgcactttcagcaattttacctctgccggaggactcagaatttcttgcagttccaatacctttttcgctatcggctctttgactgcaccatctttggcttcggtaggcgtgactgtgggcaccttcgg

SEQ ID NO: 98548 - DNA, 443 bp, Zea Mays
cgcagcatccagaactctggttgggaaagtttttaggtctggtttctattggccaacgacgaagagtgatgtcgctgagttagtacagaggtgtgaagcttgccaattcttgtcaaagcaacaacatttaccggcacagcagctgcagaccatccctataacatggccatttgcatgctgggggctggacatgattggacccttcaagaaagctcagggaggctatactcacgtgttggttgccattgacaagttcaccaaatggacagagtacaagcctattacttctttaacctcagccaaggcagtggagttcatacaagacataatattcaggtttgggataccaaatagcatcataaccgacctgggatccaacttcaccagctctgaattcttcgatttctgtgaacaatggagtatccagatcaagtatgcatcag

SEQ ID NO: 98549 - DNA, 789 bp, Zea Mays
ctcagatgatcctcatgtgcttcttcattctgagagtatactagtatgtcgtcgatgaataccaccacaaactggtcaaggtattccatgaatactttattcatcaagtttataaagtaagctggtgcattagtcagtccaaaagacatgactaaaaactcatatagtccatatcttgtagtgaaggccgttttaggtatatcttcagtctgtatcttcaactgatgatagcctgatcttatatctatttttgagaatattgtagctcctctcatctgatcaaacagattttcaatctgaggtaacgggtacttattcttaattgttacttcgttcaagcttctaaagtccacacacattcttcttgaaccatctttcttattcacaaatagaactcgggctccccatggtgatgaactggggcgaataaaaatatttttctagtaattcttctatttgtttctttagatcaattaaatctttgacatccattcggtaagctcttttcgaaattggtgcggttccgggtaatagttcaatagaaaactctatatcacgatcaggtggcatacctggtaattcttccagaaatacgtatgggtattcacacactatcctgatgcgctccaaagatttctcttccaactgatttatcattgcctctgcttttgctggcatactgacattgacttcaattctttctccttgcagactggttaatgtaaccatcctcttggcacaagatattactccatcatacttggtcaagtagtttattccaagtatcac

SEQ ID NO: 98550 - DNA, 748 bp, Zea Mays
cactgttttactgattcctggactgcgcgcattaatacataaacggccaggggatagactgcaaacttcccaagacacagattactgccgcacggacggcaggtttattttataaaaacagaggggctcttaagtaagtttggcactgcgaaggggtacaggacgttttaagccgtccgatcaagtgagggtggtccagattagaacgacgagacgcccaaccagtacctgatcacaacggttggtttacgaccctacgctccgaggttcaatgaagtggtgatcaccatccatccgttcggcgttgaatccaacgatcacgactcacaagactacacgatgcacgattattcaatcccaagcattactttgggatccaatggtgccaaacaacctactccctcatctatttgtggccacaaatcacgagatcgacggccccggggtatcgtctctcctctaatacttctacacggcggcgccgcccacccacggtcgcacaactcgccagaatcccacgccccatcacccggttacaaaccccagctctaattagcgcaaaatgaaatgacggcgattgggaactacatggatggcttcgtagggcacgattcgtagtagggagccccagccacggaaggacgatttcatggcgaattcaccacaccggcgagcaatttcagaggccacacgagtcaaattcggatgtggtatgaacatatactaaccaagggttgtgtctcggtta

SEQ ID NO: 98551 - DNA, 766 bp, Zea Mays
catatttctatcacaaattaccaacaccaacaacttagtggtcaagaattatggatctttcggtgccaagggccagtgacagattaatgcccaattttgcttcaagctctatggtgatgtgggatttcatggctattttctactcttcttacttctggtagatcagagatagattacggtaagcatgtcaaagagtagaatccattgtagttctactacaaaaccccagttatatgtccattcaggactgaccgttaccatttgacttataatgtataccatactcgtgaagggactatctcgagtcaattcagcgaccatgagtatttacaattctgagagatgtatgcaacataagcataaaggtcctagacaggatgagcaaagtggttcgacgggaacacacaatagttttcacaccaacatagtgaaaatcttctcagaataacctctcggtatactcgcaacttcgtgttgctagccactacatgtccttttatctcatagtttgcttcatgtcattcagcgacaaagagagcaatgtgctaacatctggttgagcaatgtatgactgagatttctggtcataaattatttggtaaggtcatattgcttactaataaaatcctaatttgtgatgtcttatgccaaaaaggctttcatgtattatattatatatcttcgggttacttcgggtaaaactttatgcatgaggagagagcagagaattatttatttgtgtttcataggtatttcattaacttcc

SEQ ID NO: 98552 - DNA, 477 bp, Zea Mays
ctgccctagatcaccgggaacacgtttgttcatccattgtatgcgttgtctccgtggactggacgaattagagctccgctagtgaaattgattgaggggaaacggttgttaagggttgaattaggtgtcagccatgtgggagcatcggtcatcgcgtatcctggccaatgcaagctcgccggagccattgctccgccgcccatggtcggggacctcaattcgcgaaagaatacaaggtgagggtccttgacgcaaatgtcagtgacacatagaaatagtgcgcagaactattaactagtttttcaaatgaccaggggtctctgtgcaaacctggcaacgcgcgggcgtgcgcgggcacacattcgtctcggtacgggccaccttgggccagtttcggcccagaactattggcactttttctttttcaaccagagttagagattttctagaaaataacagaaaaatgctaaaaatacc

SEQ ID NO: 98553 - DNA, 786 bp, Zea Mays
tcaagcgcttacaccagttgtaaactgagattacaatgcatattaagtagcattaaagtagcgtatgtcaagagttaattagaggggtcgcatgaacatatacagaggtagaaaggcatcagcagttgggttatatgtatacaaaagcattcttgattcaaaagtgacgatgtccttcataggtatgcaaaaacagctacctgtacacaaataaaaagagaagatccgttgcacttaaagtgtgtgtcagttattttattgttgtgtaatgggtacaatggagggcgaaggacaatgtgcaaactatattgtaaataagctctgtgcgattaaggagcatagatggtgtcataccttcatgcaattcatgacgatctaaccgttgttctttttgggatatgcgggtaggagtttgtgaagttggctaggtttgatcatgtatatatcatgtatgtgctttgttgcatcattatgaagtataagttatagctataaaatatcaagctatttgctatttgtatttttcccaaataatctcctatgtaatatgtacttcgtcctgtttaagctgacttgtatattgctcatcaccctgtgattaagtggataagagctgtcaaatcatttttgctggtttaaagtagaagtttagtagttctctcatttttcctttacaaaaagatgtatatgggggaatagattataatatatgctattattacaaaagttaaatacactattataccaaatttacctttgtactctgatgcgcaccggaatcaggct

SEQ ID NO: 98554 - DNA, 328 bp, Zea Mays
tgtcgctctatttcatccttgatagcgggtgggtaacggtaaggcctgacatgcacggccgttgcaccctgaaccagaggaattgcatgatcacactcccgtgccggaggtaaacctactggaggggcaaacactgaagcaaactcggagagcaactcaaccaatagagggggcagattcatatctgaaaaggaaggaccaccagtgtctatccttgctacctccaccacagcacctggcagtaatgctgctgtgaccccatgcagcaaaacagatgactgaccatagggaatcaacatccatttgtgcaaccaatggaccttcatgg

SEQ ID NO: 98555 - DNA, 452 bp, Zea Mays
acacccttggggtagatatcatcctagggatgaattggttaatgaagtatgaggcgaatgttagttgtgacaagaggaccgtaacattgaagtccccgtcaggagaagaggtagtggccgagctatggatgcctaaatcagcggagggagcctatcatcagatttcagttgatagtaaggagcccaacccgctcgaggctatcaaggttgtgtcagactttccggatgtgtttcccgaggagctaacgggcatgccacccgagagaaaggttgaatttgccatagagcttgtccctggtaccgcccccatttccaaaagagcctatcgagtgtctggaccagaactggtagaactcaagaagcagatagatgagatgttagagaaaggttacatcaggccaagtacctcgccttgggccgctccagtgttgtttgtagagaagaaagatggt

SEQ ID NO: 98556 - DNA, 416 bp, Zea Mays
attcgtaaaggacaagagtctgatgagaaaatcaaagaaattaagacacaaattagtttgggtaaagccccagatttcacggaagatgatcaaggcacagtatggtttaaaaagagaatctgtgtaccgaaaatcgaacacctacgccaacttattttgagagaagctcatgatttggcttactctattcaccctggaagtacaaagatgtaccaggatctaaagtaaaagtattggtggtatggtttgaaaagagatgttgctactcatgttgcattgtgtgacgtgtgtcagcgagttaaagccaaacaccaaagaccggcaggattactacaacctctcaaggtaccggaatggaaatgggaagaaatcagtatggacttcatagttggactaccccatactcgggatggcta

SEQ ID NO: 98557 - DNA, 375 bp, Zea Mays
gccgtggtgagccgcggccaagcagcgcatgatggaggacgacatacagtatatactgccgacatacacagagtgtcaatgtttcgggaagaagaaaaaagttctctagcacaacattgtgacgtagcatcatccgatcgcgtcactgtaagggaactgcaagctcatgaggagtgcccctaccgcaaaggaatacaaatttgcttcacttgcactgactgttggaattgtattaggatttgggtacatttactcttttgcccctctataatgggccaggctcaactcatggttattaatatactgtcccaccctatcctagggttagggtttcctcacttctacatggtaccagagcctcccagccggcagttt

SEQ ID NO: 98558 - DNA, 891 bp, Zea Mays
gtcaaagcaactcaggtttacctatcaaggtactagagtgtccttgcaaggggttcaagataacatcacgagctgtcagagtatctcaggacataagttccagggattacttaatcatggagctgtctatcattgcatacagttgcttctgataaatcaggacaatgatttgcctacacaaggtcctgcctctcgagtatgtgagattcagaatattgagcaacagccaatacctctcagaattcagcagctcattgattcttttgctcacctcttcagttcacccacaggacttccaccacatcgcttagctgatcatcgaattcctctaatgcctggtgctcaaccggtgaaagtgagatcttaccgatactctcctgctcaaaaatctgaaatcgagaagcaattgaaggaaatgttgactcaagggataattcgtccgagcactagcccctttgcttctccggtaattttggtcaaaaagaaagatgggagttggcgattttgtgttgattatcgacacttaaatgcaatcacaatcaagaataaacatcccatgccaatagtggatgagctgctagatgagttggccggagcttgttggtttactaaattggattttagcgctggataccatcaggtctgcatggctattggagaggagtacaagacagcatttagaactcataatggcctgtatgaattcatggttatgccttttggccttacaaatgctcctgcaacatttcaaggacttatgaatcacatttttgctgatttactaaggcatggagtgctggtattcatggatgacattttgatttacagccacacattacatgagcatgagctgttgttgcaacaggtgtttcagactttgaatcaacacaa

SEQ ID NO: 98559 - DNA, 297 bp, Zea Mays
taccaggttcaccgactaaccctgccgctccatatgaaagttgcaaggcacaatgttggtgatgtcatgacctgaggatagtgttgacgatttgagtagaaaaaccaaaaggaaggagaggagtacagttcatactaccatgtgaccctgggggaagtcactatgggcaccatttgagtgggactcccactcaacatgacccgtggttgactaagtcttggcacatatcctggaggaccaaccacgatgacacttcgtacccaatgcatcctccctaggagcattatgggtactaag

SEQ ID NO: 98560 - DNA, 327 bp, Zea Mays
gatctatggacctaaatctatccgggttctgcagtctagggtaccatagtcgaagcgaccatggggcggtgaacggtaagggtgctgaatcccaacagtggtgggggaaccaccatcaagatagtggtgtgccgtgcattcagcacgcaattccgcaacctccacccaaaccttgcccaactcgtcaagggcgtggtaaactctgtgttgagcacgacgaccaagttgaccatgctgctcagcctaggatttccctcaccaattggcgagacaatcacacctccagcactaccggtcgaacagcgaggggtagtacttcaggtcaag

SEQ ID NO: 98561 - DNA, 1077 bp, Zea Mays
gcgccaacagactacctcccctatagatctcccagtggctggtgttccagcggctggtgcctctggtgcttctttgttgttgactgagtttgcacccataccatcgccaactctaggtcttcctctcggcgccattcctacaccagtggtgatcaacgatcatccaatgaccacccgggccaaggttggctttcatgtgtcggttgcgttcactgctatagctatctcccccgaaccaacttcagttcgccaaggtttagttgatcccctctggcgtcgtgccatggaagaggagctccaggctctggtctccaacaatacctgggaacttattcctcgtcctccaggtgcccatgtcatcacagggaaatgacatttctgtcacaaatttcatgcaaatggttctcttgagcgctacaaggctcattaggtatgtcgaggattcactcagcgtcatggggttgattatgatgagacttttagtctggtggtcaaaccagctacggttcgcacagtcctctcgctagctctgtcaagggattgacctatacaccaacttgatgtcaagaatgtgtttcttcatgggactctttctgagacaatctattgcaaccagcctgcaggttttgttgactctgttcatcccacttatgtctgtcgtctcaacaagtccctttatggcctgaagcaagccccacgagcctggtacagttgttttgcttcccacatgaagtctctgggttttgttgaagccaaagcatatacctccctgtttattttccacaatggcactgagacagcttacttctttatgttgatgatattatcctcactacatccagttcaactatattctagcgtgtcattacagctcttcagttagattttcccatgaaggaacttgggccacgaatgtagcgtaagatgcgcttaagggcggcaaggtgagactctcgcggatcatgcatgtgaaggaaaacctgctgaacaacataggcaatgtcaggtctagcaaaagtgagacactgaagagcaccagacaaactctagaaatccgtaggagagggaggaccatcg

SEQ ID NO: 98562 - DNA, 979 bp, Zea Mays
cagaattttaaagctgacaaagcacacaactatcagctataaaggaccaaaccctgaccaaaccaaactactagtagcaacacaaatagaaacacagagctgaccaacatcaaagttcacacatatcacaccagcgcagcaagcagcattccatcccatagtttttcctgaagctaggcgcaaccagggaaaggaagtagaacgaccgcacagttgttgaaccaaaataaccagataacaaaacatgtttcatttcaacggattcgtctgtcaactggcctccaaccacgagtcttgttgtagatctcacacgccatctttttgattttgagacttccgagctccaccaattttcttgccttctttttttgacgaatagcccaagtattaagccaaaaacaacaagagaaaatcacattagtcggatcatcaattcggttagtcccaaagcaacaattattgcgacatctccagatcgcccaaatgacagcaccatagccaaacagaaccagatttttttcagtcttattaaaactgttaatccaagtaccaaacaaatcatccacattatcaggaatagaatttagaccaagagcagagtagacaattctccacgtaaatctggctaccggacattgaaaaaacaaatggtctatggattctgaaaatccacaaaagatacattccagattacccttccaatttttcttgaacaaattatctttagttaaaatcttcttgtgcataacaagccacataaaaactttgatcttatgtggaagtctagtattccacaagaaactaggagccaaaggaatctgagagcacttgatttctttgtaaaaagaattaacagaataacctttgctacccaaaagccaaacagatttatcttcttcctcagaaataatagtattattacattgtgtaataagattgttatactcaacttccaaggcaccataaatcctccttctga

SEQ ID NO: 98563 - DNA, 332 bp, Zea Mays
cggtagtcggcgtatacgaagccgatggcgtcaaaaactctgttcagtcttttctttccccgacctccgaaggctgcgaacagtgcattatcttctgccttggaatatgctccaagcagttcatcacttgtagcttcgatacacttcagccagtcgtcgtttggttcaccaaacttatccccaaacctgaatgtatacttcagccggatcaaatcaccttcgctagagttagtgatggtctccttcggcatttcccagctttctacaagtagccataccctgaaggctatatgttcttgaattaaatttcttgtcccaataaaggagcaaat

SEQ ID NO: 98564 - DNA, 568 bp, Zea Mays
aaaaaaaataaccgaaagcaagaataacgcagaaatgattgcaagccaaattcgtgtcgaattataaaaaggagcgccagagaagctcggatcatgcaatcctcgagagagaaagattgcagggcgatccagccagccttctagtctagcatcaagaccgaacattcttgccgatccagaggacattcagctgataggaaaaaaaaagataaaggagggtagagtaatgtaccttaaagagcattccttgcgcactttgcatgacgaccgagcgactttatatattcatcggaatcacaagcgattaggacgccctttttcccccctatcctcactcaaggagaatctaattctaacaatgataggttcaactgcattgccaatttggcatctcacatgcatggagagcatttggatgcatttccatgctagtagaaagtggcagtagttttcatctcacaagttcacataatgccacctctatctttgttacacatttagtgattataaaacaaaagaaaaaaaaataggtatctttcgtatgttcctttggttgtgactatatatg

SEQ ID NO: 98565 - DNA, 451 bp, Zea Mays
ccagaattccggaaatgagcactttgcacaactaatagttgcagaaagaagcgcaggacggtaaatcgagaaatgcagatacgtcaccatcgatatcatgaacgagtaaacaaaatcaaagcagaagtgcgaccactaaaaaaggcaaaacataaacataccaattattgcagtaaaaagggaaaataattattcagtccaggtcaaaccaagaaagcagtaataaaaatctataaagatcaattatatctgtttacaatcgaagagaattgacgataaaaagaaaggaagcaaagaagacagtgcacagatatcaataactttgagcgacaaaaaataattcagaagcgaccattctaattcatggaaacatatttggaattcaacagttagtgaatcacatacgaagagaaagctcggccgctatcttcaacaactaccagaattacaa

SEQ ID NO: 98566 - DNA, 316 bp, Zea Mays
ggacttagtccaggagcacattgcttatagagtgtggccactcgcaagtgggtgggagatgccgaaggaggctgctgctgggtctagccaaggtggtttaatctacttgaagtacacgttcaaatataggagccagtttgacgagccaaatgatgactgactagatgccattgaagcaaccagtgatgaattgcttggtgcctactcgaaggctaaaaatgatgctatgacaacggccttcggggctcgaggcaaaaagaggctgaatagagtatttgatgtcatcgggtttgtatacccagattactactatcct

SEQ ID NO: 98567 - DNA, 473 bp, Zea Mays
tgcaatttcgttttcagtttggctttgttcagttcgtgttcgtggtggagtcgtgttgctggtttaggttgtatcttcgtagtagttcaactgcaccttcgccgctgtcccatccaccattacccatatcacaagtcgatccacccctttaatcgacttgccctcgctagccgccttgtgtgacttctcgccacgccaaccctagataggttgtgagccgccttgagtcttctgcctgcaccgcagcccttccttattcatctggcacaacctattttgttccacgaaagatctgtgtttggttgtgattgcagatagggaagttttgccctaaccgccgctttctagtcgtgcctccaaaaaacataatttgaggtaccttacttaaaacaggcataacttttcactcggttgttcaaaaaatctgaaatttttataggagcttggtgacgccattctgaggccaaccaact

SEQ ID NO: 98568 - DNA, 1097 bp, Zea Mays
gtcgacgacatcgtcctcatggcctcctcccatgacctccgatgacacataatctcctccctccagtaggagttcgcaatgaaggatctgggtgagttacaccattttcctagggatcaccgtggagcgtcgatcccagggcctatttctccactagcgctggtacaccatcgacatcctcgagcgtgatggcattgctgactgtaagccctacatgactccggtgggcactgagggcaaggtctcctccgacgtagccccatggtggctgatcccactagcgaccgaagtcttgtcggggcgctgttgtacctcgtcttcacccagcccgacatcgcctacgtcgtctagcaggtgtgtctcaatatgcatgccccgcgggagccacatctcaccagtatgaagcggatcctgcaatacctctagggcactaccgactttggcctcctccttcgacgatcagcgaccaccgacctcgtcgtctacaccgatgtcgactgggtcggctgtccggacacgcgtcggtccacctccgattttgatgtgttccttagcgacagtcttgtctcctggtcctcgcacatgggtggattggctttcatgggcagagtattgctataatacttccttccacaccgctcttcggacgacaccttttgaggtggtgtatggcaggccgcccccgcccttgtagtcgtactcgcctggcacatcacgcacggaggctatggatactctcctacagaaccgcgacgacatattgactgaggttcgccagcgccttcttcaagctcaggagctgtccaagaaacactatgacaccgaccatcatcccttggagttcgctgttggggactgggtgtggctacgtcttctccaccacaccactcagtctatagaggccggcgcacggaagaagctcacgcctaagtacgcgggatcatttcgggtactaaagcgcatcagctccatggcttataaactgcagctatcggccgactcacgccttcacgacgtcttccatgtgggctcgctgaagccccaccgtggtgatcccccggaggcggcaggtgctttgccactagtgcaggacgggc

SEQ ID NO: 98569 - DNA, 440 bp, Zea Mays
gttttagctcgacaggcctgttgggcccatactcgcctaccatgactacggggtcatgcttgggtcactcccttgtccccacatattagcttgaacatataccatcctcgcctcccctcactcagtccccttccccaccttgtataaccctagcatggatcaccctgtagccatagatgcttgcctccatcgatgtctcatcctcatctcctcgctccactctccatgtctccagctacctcatcgctagatctacaaccatgaccaccaaagatgcctcttacctccatagctccaccttcattttcctacacacatatttcctctatgtttgtctctagttgctgcctcagaagatctagtcacggtcactaaggcattaagaagcctcctatttgggccatctatagtcttctcccctctgcacgcctccatgtttt

SEQ ID NO: 98570 - DNA, 371 bp, Zea Mays
tccttgccagactcttgtccttttctttataggctctcatgaatagcctagtgacctttgagtcactccaatcttcactacctagcactcttattttgttgaccaataccattaaccgatcaaagagtgattgaagagagtttcccttagaccaatcatatcttgcaagttcgctttccaaagcttcaatcctgtgtcttttagctttgggatctccctcatgtgacattttcagaatattccaaatgtcacgtgcatcatctcttccttgaactttccggtactcttccggacaaaggcttcctttgattatgctcactgcttgagcactgcgatgcgcctcttgcatcattttcgatgtcatctcttct

SEQ ID NO: 98571 - DNA, 331 bp, Zea Mays
tcatagtagtcaccgggtttctaataggggatattctccacaacaaagaagccattggaagaatagccaagtgggcctacgagctgggagctcacgacatcgagtttcggcctcgtactgcaataaagactcaagcactagttgacttcgtatcagaatggaccgagcaacaagtaccagacaacccggagactgcagaagtatggcaaatatatttcgatggctcgctaaagctgcagggggcaggtgcaggggtcctcttcattgcacctggcggtgagcaactcaaatatgctcttcagttgttattctcagcatccaataatgaaac

SEQ ID NO: 98572 - DNA, 274 bp, Zea Mays
atttggggcggttgggtgcagagagaatatttccattgtgaagtgcgtagctagcattacagattacagatgctccttcctacttttatgagattacttacatgaaagctacttcagcatttggcataaagggaaattgaaagggttgccttaccgggataaaatatttcgtaatcacaagtcatcatccaagtaggggtaaatgatcagatattttaatgaggtaaatgcagaacgtatagaagagaacgacacgaaggcagagacgaggctg

SEQ ID NO: 98573 - DNA, 399 bp, Zea Mays
tgatattggaagcactcaggaagaaagtcttcgacaagaatgaaaagtttgcagggaagtggatcagagagttaccttatgtggtttggagcctaagaacttaacccagtcgagctctgcatggaaacacccccttcttcatggtctatggttcgtaggcagtgctacctgccgacctcaggtttggggcaccaaggctggtcttcgaaagcatagctgaagcagaagctaccatgctagaagatattgacgtgctggaggaagaacggttgaatacagtaattcagtcagctagataccagcagaccctgaggcgctatcatgataaggctatacaacatcgatcttttgtagtgggagacttggtccttcgccgaattctaacgagagaaggacggc

SEQ ID NO: 98574 - DNA, 475 bp, Zea Mays
gcgcaacctctctgcctcgctcgacccaagctcagccctcgggcaaattctctgcctcgcccgagctcggcctcggccgctgactacgccgtgaatcccgtagatagccactccgcccgactatagcgcacgtcaagagatggctcggctggcatctcgggaaaacttctgcatcaaccaagcgagggctctgatctcgatgggtgctgtagagaatctcgatgtcatcacacgccaggacgatgacgcataccgtaagcagcctttggcccataccccggcgctattacaaccactacgacatgggcggcctctccgtcgggagctcgggcgtacggacgacccctcggtctcggcctcgcctctctacaggaagtcagcaggcgtaaatctactgcacggttcgccatcacgttagattccagggcatctctccttcaaatacaagactcagcttcaccacggacgctcccct

SEQ ID NO: 98575 - DNA, 414 bp, Zea Mays
cagagggcaaagtgtttatcagcccgaacgatgttttcttagagaaagagtttctcaaaagagagaaaagtaaacaaaaggtgtaccttgaaaaagttcatgatgagccaatgggacaagattcaacaagtgatgctaatgtagcagaacaagttgagacatctatggaaagagaagcaccaccacaacaacgaaggtcagcaaggcttcgcgaggcacgagcggaagtgctattgtcagacagtggggaagtattgttgttatacaacaatgaacttgcaacatatgcagaagcgataatgggcccagattccaagatatggcaagtctccatgagaaccaaggtatattccatggggagatagggacaatcaagtttggaacttgtttgacctacctgatggtgtttgaccc

SEQ ID NO: 98576 - DNA, 375 bp, Zea Mays
gagagataagaaatatgcaaatgtaccaaaggaaagagatatgattaaaaggatatgtcaattaagcttaaacaattctatatgctttacatagtgatgctctcttctttgtgctttgtccttagtcttcttgaatgtcgcttaagtcctatactcaagacaatgtatggaaatatcttacacaagagagtgttctacaactagtgatccttttctaagtaattgttttagatgtcaagtaaatcacaaattgcataaatatatcatgaattctccttttaacttaggcatatcaagatagatgtcgattgaaattaccaattgaaatcaaattgaaattacatgaggcactaagaagcataagtgataattgaa

SEQ ID NO: 98577 - DNA, 419 bp, Zea Mays
atgtcgtcttcgaaatgtctgaaggtcgaatcctgagctggtgataacctgacctcagatctatctttgaaaacacattggctcctctcagctgatcaaatagatcttctattctgggcaaggggtacttgttcttgattgtgacctcattcaaagctcgataatcgatgcacatcctcctagtgccatctttcttctccacgaataggacaggggtggcccaaggtgaggtgcttggccggatgtaacctttttctaacagctcatcgatctgcttcttaagttcaaccaactctggttcggatactctgtaagctctcttaaagatgggggcggttccaggaagaagctctatggcaaactcaacttttcgctcgggtggcatacctggtaagtcctttgggaacacatctgggaac

SEQ ID NO: 98578 - DNA, 430 bp, Zea Mays
cgcggccatcagctccaattaataatattgccaatcagtggcaaccaggcaaagcccccagcactaggactaccctcagcggtaaggccgcgacagcaggcaagccaagaggaagaggccaaggcaaagccccccaacaacccaaaaagttttgttgcatgttccatgacgaagattcagcgcacccaaccagagattgtccagaaaccaaagactgcatggccagagcggccccacaaacaatcaaagagccatcgctcacacttatcaccctcaccagtacctccatcctctatacaaaaataaacacccataccacactcagtcgcagctgaattacaaccaaagtgcccccatcatccataactctagtaccaagaaagattaccactcccacctccaccgctccctaattaaaccagcaacttgt

SEQ ID NO: 98579 - DNA, 599 bp, Zea Mays
ccaatcatctgcctcaattggattgtctgatcctccaaacttgggtggctgcatgcggttgaaatctgcaatcttgctcccattgccattgtgatgcactgcaagtctattgttgccaaggtttccttgagcttgagctgtgagggttgtgacaagggcttgaaggagttggttctgctgctgcaacatggctgccagatcaatgggtgctggggcacggggaggcagtggcggtaggtgtccaattgctggtgcttcggcggctgcgttctgagcgcctaggtttccctggttgacatcttccccatcttccagagcattgagtccatggactcggctcgaacgacgagacatcttcgctctatgcgaaaagacaagattaggtgattctcctagtagcctactggggtatatttttataatatataataccacacaatgcacacaagcaattcattcaagcaccatacaagcattcattcgaacagggatacatggtacaacggattacaataacgtggctcaacttttaagggtcggccgaaacaacttgactactggttcctacggcacggtcttcgggatctttgtctttagcc

SEQ ID NO: 98580 - DNA, 658 bp, Zea Mays
cgttaggcattttgctcgatcccaaacctggttgtcatgcaaatatgctatatatcgttaaaaacatttatgtggtagcttattaaatacaaacaaaacttgcaccaaaaccgtggccttgtgtattggacttcttttggaaacttcattttgaaaattagtgccggccggatgccttccacgcgtgctctttcagtctttcttcattcttcttcctatgtgaacaatataggtggtgggaccctgctggggcttattccttatcggaaatagagcaacaagttcacttggataaaaagaagaaacagcttgcgtacgtataacaaggagtcctttattattattcttattatcttagtgtaaatattattattattaggggcgtttacagcgtagcaagttcactcttgcaagcaagggacttttacaagagcatgtagctagttagttcatttggagtgtgaacatgtcttatttgcacacttgcttttttcccctctctttattttctccatcttcaggatggctattattagctcctttgcatgcgttcatggaattctgcgtcagaaaaccaaaacggaaaatagcattattggtcagtgtaatatacatgatatatatatgctacggtggagttattaggatgatatatctc

SEQ ID NO: 98581 - DNA, 694 bp, Zea Mays
gagaaccactaaaatcagagttacggtttaagagttatgattttccgaaggtttaggtgtttactataaaacaaatgaggtacaagattttaaccataggtttcatagtaatacaatgttactagatgataaacaatattaatatgaaactaatgccactggaatggatcaaaaagtagttaaattaaagaagttatgaatttcctaaagttggtgaataaattttgtggtaaaaatcaatttctttagttatttactgctttctcaaattcctgggtgacaggcagtattcctagaaaacccaggggctcaactgcatataaaaagggctaattttaaatgattatatactttatgtggaccatgggttggttttgataaagattagtggctcttctagaaagtgcacatagcgaaggggcaccggtgcgccctgatttgtccgatcagaaagctgagatcaggattaggccaaccccttaaacgaatcagtacgcaatctgacccacctgattaacgatcaacgacagagatcagcggtcacccgagattagcccagatccgaccgatggcggatctgcggtccagatttaaaatagcgaaatccaccctagacccgcccgatccaaatcggacggctaccacacctttggccgaaccgatattcagcttctaatcgcgaccattgcctgag

SEQ ID NO: 98582 - DNA, 520 bp, Zea Mays
ccgggttcagcttcgtacgggttgcccgcagcttgtcgaagaccaaggttaagtcttccactagggtcgaccctctcttagtcttgaccacaatgtcatcgacgtagacttccactttgtccctaatcaggtccccgaaagtcttactcatcgcccgcacaaatgttggcagggcgtttttcagatcgtaaggcataacaacatagcagtaaagcccatccactgttacgaaagcggtatgcttcctatcttccctagacatctggatttgatggaaactagagtaagcatctaagaatgacaataggtcgcacccggaggtagaatccacgatttggtctatacgtggaagtgggtacgggtccttagggcaggccttattcaggctggtgtagtcgatgcacatccaaagcttcccattcgccttggggacaatgactgggttggccagccacaccgggtgatgaacctcttcgatgaagccagcgtctagcagcttctggacctcctttcggatgaa

SEQ ID NO: 98583 - DNA, 368 bp, Zea Mays
gtcggatgccgtgccgagcaggctgtttggcaagggaccattgccactgcccttgcctccacgaccagcgcagcaagtgacggtgactgaagacaacaaacgtgccgaggttcctcgtcagcgtgggatggatgacaagttggctgcattacgtgcttacaggcgagcaaagggattgtgtcagcgttgtgcggagaaatggtcgcgagatcatcagtgtccgccgactgtgcagcttcaagcattgcaggaagtctgggatttatattagtgtgaagatgatgacagtttcaccccaccggaaacggctcattctggggaggagcagttatttctcgcagtttcagtagctgcagttcagggcagag

SEQ ID NO: 98584 - DNA, 487 bp, Zea Mays
tgatccgcacggccgaggcaaggcaccctgtcgccattagccacgacaacttagagggtagggcaagtgatgaagggggagactgatgtcccttgcggcttgggcgctgacgaagttgtgagtggagccagtatccatgagggcgatgagctgccgacaccaacatcgaccaagacctgcatggtgtcagccgtgcgaaggacaaccatggcatggagggagaagacgggcgtggcggcatcgggatcgaccatcccgacatattccgccgagtcagtcacctccacggagaagaagtggccgtcagaagcagatggctcctctgggtcggccaagtcatctgtgttggtcaactcctggtagaagaggcgctggttacagtggtcgcgggtgaacgactcgtggcagttgtagcataaccaatagcgacgttgtcctgtcatctctgctggggtgaaatgtttgatggtaggcgtcggagaactcg

SEQ ID NO: 98585 - DNA, 707 bp, Zea Mays
agaagattaccgtgcatggggttcggtctctagcacaagaatccacaccacacgatccaagtgtcttcacgacatgtgtgttatttgttttctatttatttattactctggctaggatatgcatcctgcatggtgtcggcggtgatatcagtcattctcctccatggttcgatgattgtggaccacagggagcaggtctcgctcacgcgtggtacatgatcgtcgcagaagcatttttttagccgctgactggtaggacctggcatccagaagactccttcccctcagcatcataacaaacgtagcaagaagatcgtaataaaattccaataaatcgcaacaaacttttctttccccgactgattcgttcctcgccttcagcacaaataccgaccctttccccgaactccttgacccatctagaacaagcgcctggccgtagtcgagcagccatgaaacagagttcgtcgtcctggagagaatggatttctgccggtgtgagtcttgtgcggtggtcgccgagcaagcagcgtcgagttaggggagagaaaggagtagccgccgccatggatgaagctagtcaggctccagccgtggagtcctgctgtgcttcgaacttggtaagaagatgtccctgtaattcaacatttcatcctctctgcataggttctatccgcgctccgatccatactcctgggcggtagtta

SEQ ID NO: 98586 - DNA, 552 bp, Zea Mays
cttatttggctactacaaaaacacaagccaacgctctaatatacaacaatttaagagatccaataattaaacaaactatagcagtgtactaagaaatgcaaacaatacataataaacatattatttgcattgtgaaattattgttgttgtatagaaatcataaatagaattcgcctccagttaaacatttgcaatgcgaaattatattgatgatcaccctattgtctctatttcaggagaagcactgctggtgcaaattgttcctagagactggagttagggtactaccaactaaaatttgagaacagtaaaagagattagaaaagacttcaatttaagttgtaagagcaacactggacatgcttcagataagaactcaaatcgagtcacacacagatacattgagatagatgatacaaattgattgtaacatactaataataagtagtggtcaaagtggacctaaacagattaattgaactgggttgggatgagaattgtacctacgacgtcctagcggtgaggtgtgaggattcgttgtcctcctcactc

SEQ ID NO: 98587 - DNA, 991 bp, Zea Mays
gcggaattaaagggaatagtttccacatgcaaacgtgattactgtgatacgtgggcgcgtaaattatggatcttgcatgggaagtaatgcgcggaaggtaaaaaaaaaatgaagcataagatgttgaaagatatggcataaaaccgaaacggcataatagttgcataaacagtatataccgtttggcgtaaaacgttgagtcattgtgcgtaaatttttttattatggattttagtttgacatagacgtcgccataatatcgggacggtttcggaaataatggggagaccctgtaaacgtggatgcagttacttttatagtatccgagatttactttcattcggaaaaaaaagactactaagcctgcataactaatcggagttggagatggccggctctggagagtcgccggcgatggaaggagatggcgttcgtcttgatccagagacagagggaggagttggtggtaactcactggtgacaccacctcctgctctaatgggttctgagatcgccgagatgagcataggggaagaaggagaacaaagggttcgacctcctatgtccaatattagctccagggagatggatacgccacaaatactgcattcacatgtaagttcaatcgctgtatttgattattgattgattatattgttgtgaacatattccatggtacaaacaacaatgacaatgaaatagcaggcaaaaaacattgatccaactatagtgccaacggtagggatgactttcaaggatgttgatgcatataaattctataaaaggtatgcatatgaagttggatttccactgaagaaatacagagagaagacattcagtaagtggataaattgttcacgtgaaggtaaaagtgcaccaaaatcaaatgatacacctaggatgaggaatagatcatcggggcgtacgcaatataaagctggaataaaatttaaaaaaatatatgatgatgaaaacaaaatggttgtagctg

SEQ ID NO: 98588 - DNA, 682 bp, Zea Mays
cttttctcatccggggactggccttgccagtttctcccttttttcgtggtcttctcgatttttactctttgaaccttacacatctgaatcccaattatgtgtttcaagttgctgtgtttgtctacctttgcgaagctttccttggaattcttccacactttgggctttggaaatacctttaccattgccggcccgggatggctggagggcaacattagcttgttagaggcgctagtttggaactttgccgaggtaggaagactggatatcttgacattcttttgaaagatagcattaagggatggcgcttcgagtggttcactctggagaatcataacaaatcgcttcccactcgattggggagacatcccgacgtctgaacgcctagctggacagaggtcccaacagatgcagagcttgctgagtccaggggttgcttgccgagatatgtgtgttgaagaacagaggcttgaccactaaagctgtcgttgttgactttgttttcaagaatatccagcctttgaaggatagagtctaccctgcttacctgtacactagtgttaatgacccctctcgaattaccaacaagtgaatatatgaggacgtgctgagttgggttgactcaatgctgagggcaaagcttcgaatgctggtgctcccccttcgtattctgcctggaatc

SEQ ID NO: 98589 - DNA, 473 bp, Zea Mays
gttcttctcttgttcacagcctttcgagtaaccacttcttgtgatatatttgatgtgcgaggattatcaatgataatgttcttgcctttgtctttattggccacatccggtcgtgaaagttgcctagaggggggtgaataggcaagtggaaactttttcaacaaaaactagaaacgaactgggtaaaatcggttcaaccggtgtcaaaaccggttcaaccagtttgcacgagctcaactaaagaatgagatataaaactgaattgatctcgaaattcacccagttaactttggaaatgagatgttctagttgatccacagggttcaaagtagtagatctgagaagggcacttctcaaaatccacacaccaaaaatatataaacaaaatttccacggaatggtgagagaatgaagaacacaaacaaacacaatgagcaagaacacaagagacacaagatttatcccgaggttcg

SEQ ID NO: 98590 - DNA, 2092 bp, Zea Mays
gtttttctgaaccatggtttttcaatactatagtttgcaattctcatgacaataccatagttttggttagctccaacaaagtgatttgaaccggcatcaatgagtaaatttatgtatgcggatagtgtgcttagtggatgcaagatttatataggttcgggctaaatatttgtacttccggtctttgttggcatacgctactaacacatgattgctcgtagtaggggttacaagcggacgagagagggaaatggtcccaagtctctaaggattgtgatgctaagggttctacgtatcatgttcctcccccttttatagactaggaaggggtcagttacaaatggtttctctcggaagggatcactacgactgtagaacgagatagctctcactcggtaaacgccttcccatgtgttgttattcgtcccatatcttccttctaaaagactgccggtgaagcatgccgacgacgggagtctgatcatcataagtactctgcctgcctgtctctacccgcgtcgacccttagtcttcgtagcttgtcctcatgtcttcccttcgtcctcttgcgtgctctgtagggcgtcgtaggacttagggttcataggtcatgaataaggctcagacctaggacttataggccttgagtaggtttcaggcctaggacttataggtcatgaatgggaggtggactggctctcttccacaccacggctcagcgccaagcgtagttaatatagcatgagagcagtccttgggtcagacatggaatccacttgagtggctccctgatgcctcgtctaacacccgagctaggttgagcctcgcctgacactaggcacggtgcaggggtcatccgggtgtggattcacccgagcgagttcctccatgcgctctctgactcgtggcccctaggacctagggatccgctcctcaacagtggccccccgagcccctgaggggagtgtgtctcccttggtggatcttcgcttcgatgggtcgatcgatacatatcttgggtttcaaactattgtctttggctggccctgaggggccacctcttccttggggagcggttgcagtttcaatgtccctagggccgaggagatgcctttacgtcgactcccttttacatggggcgctacatccctctgctttataaacatgggagaaaggaggggtgtcggtcaccacaccgctccttctacttttcactttcccccttggatagatctatgtagttggtcagtcattgggcccttggtgaggaagaggttgtgtcgcgctgggtcggagtaagtcctttggggtttgcttctctttccctcacaaccttctgacttctggttccttgctctagcatgactttcagtgtttgtggaagtcggaacatgtctcctcgcgcgtggttcatcatggtcgggcccatgggcttcccctccatattccctcgaattcgaggagaacctcactgcttcctgtgtagccctagacgcgacccaagtcaagtcgggccttcttcgggaacaacttgctgagttcaacagccgcatggcaggtagttccccccctttttctttcactcccctcgctctttatcaagccaatccctttgtgtgtttttctttacagttctggaggttgagctagagaaggttctccactgggcaagccaagtcgtagagtacgtcaaggcccatggtttgtcacatgtggagtgcttagacaatgtcccatgttgtgtccgggatatggtagaagttagcattcatcaagggtggtcatagccttgatcgttggggggctctgctctagctgtagtcttcaaggaatcatctgtctccctctagatatcccagacaacgggctggaggacatgctagaggtcttcgacaaggcagctagtcgggtcatagctaggttgtcttctgatgacgtcattcgcaaggcttggtcattgcttgttgtttgtttcatttggtctggattgttttcccaaccgagaaacatgaatctgctttccacactacgtcttagttcttagtacatatttatgggggatcatgttcacgtgatcttgagggtcccacat

SEQ ID NO: 98591 - DNA, 470 bp, Zea Mays
gagacgtccggattgaaggtaatcgcttttggattctactacatgtagatttctacaattcagttatccttcccaagaagcatcaacccattctgcatcaacgttttatcaactggagtgggtgtgaaggtattggggatcgagagatgacattggcactgagggcctgtgaacacaagaacatgaagaatatcatgactttccaatttgattggaacgatgagattattgctcaattctactccacattgtggatcaagcatgcagatgaggaaagtccctacaactttccttatatgaacttttttattgaagggagctggtacaaggtcagctatagaagattttctcatattttgggattcactgataatgatattgctggagataagatcaaaatccatgatttttgccctcccaccagggctgaggccaaagatttacatatttctgaaaatgatgagtattgg

SEQ ID NO: 98592 - DNA, 397 bp, Zea Mays
ccaaaaactcatatagttcgtatcttatggtaaaggctatcttaggtacatctttggtttgaatctttaaatgatgatatcctgatcttagatctatttttgagaatatcttagctcctctcatctgatcacacaaatcttcaatccaaggtaaagggtatttgttattaattgtcacttcatttaaacttctataatcaacacacattcttcttgaactatctttcttgttcacaaatagaactggggatccccaaggggacgagcttggatggataaaacctttttctaacaattcttctaattgtttcttaagttctcctagatccttgacatccattctataaggtctttttaaaatgggtgcagttccaagtaataattcaatagagaactc

SEQ ID NO: 98593 - DNA, 470 bp, Zea Mays
tcgaataggcatgagtgtgccatgccgattcaagtcattaccgactaaaaccgaccgctctgttagtagggtatagtggtcaccctgagttacgtaagagcgagcatgttacaccgccttaagtcgttgtcgacttaagtcgattgccccattagcagggtatagtggtcaccccgagttaagtaagcgtgagcatgtcacaccgccttaagtcgttgccggcttaagtcaattgctccgttagcagggtatagtggtcaccctgagttaagtaagcgtgagcatgtcacaccgccttaagtcgttgccggcttaagtcgattgctccgttagcagggtatagtggtcaccctgagttaagtaagcatgagcatgtcacaccgccttaagtcgttgccggcttaagtcgattgctccgttagcagggtatagtggtcaccctgagttaagtaagcgcgagcatgtcacac

SEQ ID NO: 98594 - DNA, 427 bp, Zea Mays
gaaaatgttcctgaggaactgcaaaactatcaggctatctgtgaattagggtctacaattggggttgttgaagaggtggatatcttatccttagactctaaggatatggtgagattcaaggttcatgtcaaaagtgttgctatgattcctcctattatagaggtgggggtcaaacctttcctctatgacattttctttaaaattgatgatataactgacgagggatggaatgatgagtctataaaccttggtaaaagagcttcggtggacagcaaggtcttgatgacccctcttatgaaaaaactggcaaaaaggctagaaatgttggagaaaattttgttaaagaagaaatgaggctcgaaaatattggagagatgatgtctcatggcaaatcttctggccagagaactgacttgggtgataacaa

SEQ ID NO: 98595 - DNA, 605 bp, Zea Mays
caaggccatgcaagttgaaagggcaaaggaggaagaaaaagggcatctcaaaagaaagttccaggttctctgggcacagcagcaggacaggcaccagaagactcgatcatttggattcccacccaaggggccaaacttcagtagaccagttggacccacctcgtcacggttcagccagcagagtcagagttctttccataccccctcagtggcaagcaaccaacccccggcaaatgcatgttggcactgcggtgatcccagtcacttcaagaacaaatgtccgcagctgaagccaccaggacccgcctactccaactcggtgaatggccccaagaataccttggcatccgcccccaaggcgccctccttcgtcagccagcagaacaagaccccgtaccaaggaagggcacgagtgaatcacgtcgatgcccaggaggctcagcaagctccgggagtagtgctcggtgagttccttgttgaatttactcccgctaccgtacttttcgattctggagcaacccactctttcatagccactagttttgtggaaaagcatggcattccctctacccctctagagattcccttggtcacccgaaacccag

SEQ ID NO: 98596 - DNA, 529 bp, Zea Mays
gtatcttgtaactgaaaaactattcagtgttggctagttccaagttgtagaataccatgcataggattcttgtcatactgatagtacaaaaacaagcacccatgttgcctatgccagccacataacattcatctctcaaaagataaatcatcattgcatcatactcgtttttggtttccatggtggagtaattagtaatactactttccttgaaaaacaagaggttatatcttttttatttgactgaacgttagtttgtatatcaaatccatacgggaaaattactgttctaactttgttgctataatgcgcctacttaatttagattcaagcttgaatattattcgtgagacaattgcaatatactttgttgctatactctgcacctatcatccagataactcaagatctgcaaaggcaaaccaagatggtgatagaaggataggtaagtttccataatccatatcaagaagtatctgcagtattgaaatgagtcaatggagagggggaaactgtagttaaattacag

SEQ ID NO: 98597 - DNA, 387 bp, Zea Mays
agaaggttaaaatggttttaagagagcatttatggtcacacgatagcataagcgagatagtacacgtcatgtcttcccctgcattttcggacaaagcagtttctactaaaactcttgaagatatcagcacagctgcggaagtgtccattatcaaagtttgctttatccattaatagccttcaggattaatttgagacacatgttcgactaaattgtcaagaatcaaattgccaggattgttcaagcaccgtctgcgcaggtaccagaattttactgttgttatttgcacatatagtcaatgcatttatttaagatgcgaacttttctgttgttatttgtacatcaaaatatgagctgaagttgacttattcttctcctagagtaggc

SEQ ID NO: 98598 - DNA, 296 bp, Zea Mays
gccaccactcatatctagctatggctccttggtgccctggtctctcactcagagtttgatgttgtggatttccttatttgtgagatcgaggacaccgttctggatggtctgcgtgctcgtcgacagctgtcgtatgctcactatctgtgtcacatttttgctcagctgattcggcctccacagttccagggcacactcgaggcctcacgccacgtctttgggtactaccgtccagcgcctgaggatcctgtgccagcacctgctccagtattttacactcaggctgaggatactgc

SEQ ID NO: 98599 - DNA, 424 bp, Zea Mays
gggcggggtagcggtgctagggtttaggggccacccatgtcgcccgagcggaggacgacgcggggccgttaccatacataacccatggactttggttttgaatgcaacaacttttttctcgaacactcacgagagttgcataatcgtgaagggggggaggtcatgttctttaggacctcatttgttactttggcggcttaaatttcctagtagagaaccagtgtttgagaattagaaaattctagtcttttacacacggacactacaaaacactacccctgatttctgctctaatttcttagatctgcctgtgtcgtcagcatgcattcccttgccaccccgaagtgtcttttgtaacgttttctcgtgcaatagtatttgcagtagtgtcctaaccatgtaaatatacttgagagcacttagg

SEQ ID NO: 98600 - DNA, 345 bp, Zea Mays
tgcttaatcaggagctactatagatgtgccaatagtaaagaccaagggtgccttgcaaccaagacagttcaacagaaggaatcagatggaagcgggacagtgagcttgttcgacgttgaatattacggccaccacatttgcaagaaggatgtcgtcaaccatccgtgtgttgttgacacagcacactattacagtgtgccgattgccaatcagaaccaaagcagtagcagcccaacgtttgttcacaatgatgtctatggaatccaggatgaaagctttgaaaacctgttcatggtgccgagcataccagagtatctgacagatttcacagacattgaaatggcg

SEQ ID NO: 98601 - DNA, 520 bp, Zea Mays
ggcgcctgaaccggagggtgagtcggcacggcctgtgccttggccaggcatgccctagccatggatctcgcgggagtcatttcaggcccagtggatggacccttccgagttggagcagctgctaactatctcttgattttaccctctatgtcgacgatgcggtggggctctgctctagtcagcgatgcacgagattgatccaaaatggaacatctcacccagagcgaagttgacgatggtggtgaaggtgacagccatggagctatccatagtcgatgttgcaccccctacctggtgcgccagctgatagtgtctagcactgacaacacactatggggtataccgtagagtacttttggtggtcggcgatgttgattgtagctcgatggttcatgcaaagcacgacatgacacaaagatgtatacaggttcaggccgctaaggagcataataccatacgtcttgtgtgttgctggagtttgaggttacagaggagatgagttcagtgttctagatgtgtc

SEQ ID NO: 98602 - DNA, 372 bp, Zea Mays
cgttgggagcttgctcggcccacccctcactctacatgggggtcagagtggatttcggtttttacctggtagtctggtacgatggggttgtggtggcgacgcggtaaaaaacagtatcatcgtggtgccgttcggcgagggaggctttgacaggacgtgaaacggcctactcaccttatcgtgtgtgggtggcatgacagtgtggttaaccactctgttcgctgctgacacattttctccctacgcgctctccggcgcatcggccgaagcggcacaagtcctgcaaaacgtacaatcttccttgcatcgcccaaggctggggaatgttgacgtggcggatccccctatgtgtctcgtggggcccatctttca

SEQ ID NO: 98603 - DNA, 494 bp, Zea Mays
tttgaatctagacccaccactgcagatatgaatctcttaaagcttagatctccattcaaaacctagctagaacacattactcaaacagtcgaattgctcaccagaacgagctgcacattacaagttggcattgcttcagatagccacacggtgacgacactggccaggtaacacaagtgcaggaccacatgttgttgcatgattgatctttgcattatgtgtctgcatgcaatacatgcatcacagatgaatgaagcggctagatgaggcgtggacgtcctgcaaagtagatgtacatgtaccacatgcatcatgggatgaaccgtgccgccattccggacaagattcgttgcgctgctgtattcgtgtgaaggaaacgtgatcataagcggatggaagaaaacatctccctgtagtcctgtacgcatgtctttattttctgtaaatttaaccaaactgaagatagatttcattttattttcagcagatagata

SEQ ID NO: 98604 - DNA, 713 bp, Zea Mays
tcccggggtgataatgaatagacaaatcataatctttaatcaattcgagtcaccgacgctgcctcaaattcagctccttccgagtgaaaatatacttgagacttttatgatcggtgtaaatgtcacaagcctcgccataaagataatgcctccacgactttagagcaaaaaccaccgcggccaattcgagatcatgagttggataattcccctcatgcttcctcaactgccttgagccataagcaatcactctgtcttcctgcatcaacacacagccaagaccaattcgcgaagcatccgtataaactgtgaaacgcttaccgctcttaggcaaagctaggataggggcgtccaccaacttgctcttcaatgtctgataactaacctcgcaatcgctggaccagacgaagagaacacccttctccaaaagtctagtcaaaggcttagcaatgctggaaaaatttggtacgaagcgccgataatatccagtgagccccaagaaactttgaatttcagagacaccagagggtctcttccactccaccacagccgcaacattcttgggatcaaccgcaatgccctgctgattaatcacatgccccaggaaagccactttggatagccaaaaggcacacttcttcaacttgccatagaactgattctcccttagggcacccataatgagacggagaagctgctcatgctcagcctcg

SEQ ID NO: 98605 - DNA, 367 bp, Zea Mays
catttttagtgacactaataaaatgaaaatcagtaaggtcacgaccatataagtaggtaatgccatcattccccttgagcgaatgagcattggccatagcaacataagacgatgaatatgcatggacaatttcaacataaccatcacccactaaatgagaaactagtgcaaactataagggacattccaatttgcatgaacccaatcacacccaagtatcaaactgtagctactttgcacctctatgacggtgaaggttgtggccaaagtcttgcacctgacaataagctccatagatgaaactcctttggttgaaataggatcacctcctccaactccactgatcatcatcttggtcctgatcaac

SEQ ID NO: 98606 - DNA, 418 bp, Zea Mays
gagcattaggagttatggcagaggttgtggtctagccttgttgtggaaggatgaggtgggcattatattacaaaatatggataagatacacattgatgtggtggtgttgaccatgtaatgaattgtgattgatggaggtttactggcttctatatggagtcgggaatttttaaaactactcaatggccaatatatccttcttatggcgttgtgctgagaatgttaatgatgttctataggctagtgagtagtttggtggagttggtcagattgaatgccaaatgcaagggttcggggaagcggtgtgtcggagagcaaatctctggccgggtggcggagtgcacccgccctaaatcctgagatgaggaggggcttaggcgttttgcttgaccgtcgaaatgaacgggaagaaactcaa

SEQ ID NO: 98607 - DNA, 617 bp, Zea Mays
gagcctatgacagctattgccgggcacgaagtccatccaatactgtgtccttgatctcacatataaggaagtcaacaacatcaaactctgaatgcgagatcagggcaccaaggagctagagctggatatgagtggtagcctccctataacccattcggggcagtagggtccgtctcatgagctgatataagtacttggccgttgtagtgaaatctgccagagaatgtcgcgacccatctgagaagggcggtcggaacaaagccgcgacgtgagctgtagctggagcaactccgccgtgagggcgacgaggaggatcagaggtaccgtagaacaagctgtgaagacgagtcgatgactcgttgaatccaaacagctggcgaatctggctaccatgaagtgtaacatcctctcgctcaaagcggaatctcatccactggtgatcggggtcgatccatacagaagcatagaaaactcgaacccactcctcaacatatctgccgctgttagttagaagagtgagaagtccaggcaaatatgagaggtgtacctcagagtccgcaccggctgctagcaggaaagtagggagatccaatagccgatgcgcttgcagagcaatc

SEQ ID NO: 98608 - DNA, 410 bp, Zea Mays
ggcgccctaacttcgctgagacctaattcaacacctaacgaacgtttcccctcgatcaattgcatagttcgagatctaaatcaccctatccacggagacagtgcgaaccacggatgagcagaagtgttcccggcgatctagggcagtctagcttaattgaatgggtcgaggagcatcagtggcaggtaagagtgctgaaacaagagagcagagggcaagatcggacctgaaacgagctagccacgtcgaggactctttcacggtggcggaaacctgatttgggagaatgagcaattcgtggactctggtgaacaattggaggcaagtgctggtgctttggatgggtaattaccctacggagctcatggcgtgctcaatttataggtcccttgagcggtggccagtgaatt

SEQ ID NO: 98609 - DNA, 745 bp, Zea Mays
gatatactcatgtactggttgctattgataaattcactaaatggatagagtacaaacctattgcttctttgacttcggctaaggcagtggaattcatacaagacataatattcaggttcggaataccgaatagcatcataactgacctgggatccaatttaactagttcggagttctttgatttatacaaacaaagaagtattcagatcaaatatgcatcagtagcacacccaagagccaacgggcaggtagaaagagccaatggaatgatattggaagcactcagaaagaaagtcttcgataagaatgaaaagctcgtaggaaagtggatcagagagttgtcgtatgtggtctggagcctaagaactcaacctagccgagctttgcatggaaacactcccttctttatggtctttggttcggaagcagtgctacctgctgatctcaagtttggggcaccaagactgatcttcgaaagcgtagctgaagccgaggccactagattggaggatgttgatatactggaagaagaacgattgaatacagtgattcagtcagccaggtaccagcaaactctgaggcgctatcatgataatgtcatacgacatcgatccttcgcagtgggagatcttgtcctccgcccaattctaacgggggaaggacgacacaaattgtcgccactatgggaaggaccattcatagtagcagaagtcactcggcctggatcatatcgtcttactcaaat

SEQ ID NO: 98610 - DNA, 502 bp, Zea Mays
tactgttacatgtacaatttcctgaggtgctcaatattccatgagttttgcacttcatttccatccatctgggtaagtcggtaggatcctgaccgagtgacttctgtaatgatgaatggtccttcccatggtggtgacaatttgtgtcgcccttctcccgccaatacgcggtggagcactaggtctcctattgcgaaggatcgatgtcgtactgctttatcatggtagcgccccagagtttgctagtacctagccgattggataacgacattcaaacgttcttcaatacgtccacatcttccagtatagttgcttccgcttcagctatactttcaaatgttaacctgggtgctccaaagatcatgtccactggtaacactgcttctgatccatataccatgaagaacgaagtgtttccatgcagggcccgacttggttgggttcgcaggctccaaactacatacggtagttctctgatccatttccatgcaaacttttcgct

SEQ ID NO: 98611 - DNA, 433 bp, Zea Mays
gtgtggttgggcgaatcctcgattcaggctgtcggttaaagacggtggttggcttcgagttttatttgtcaggttgcactagttatcgctgcttgcagcaagttatcttggcttctttgaagctagttatctgaagattgatcctacgtcgtgaagatcgagcatcgtgacgcatcatgactggttcatgacaaagattgtcttggttgaagccctcgtaattctggtccctatagttgttcttgtcctgcgcttcaatgttgcacatttcttcagttgcttcgtcaatctttttctgaagtttagaaagacgaagaaccttatccctgcacttctcttgatcaagttcttggtcatgtggttcttggctgatagccttcctcttttggtttcttgcctccctaaggagagcttcgtccccttggttggtgtc

SEQ ID NO: 98612 - DNA, 314 bp, Zea Mays
gcccagatgattttaaagaaagggggttagctgagattttaattcctcttggtgttttataatgcatgcatgctggaagaaacgttgcctctcaaaagaaaatagggtgcctttttagggcatccttaaaatataagtattggcacacagggcctaattaattagccacctatttctccctctatgcctaaggcctttcgtcctaggtctagcggtctagtcctgtcgatccgtaatagtttctaggcaagttttagattttgaaatttggtgttcatggtttattgtccttctctgtggtggaattcgctccg

SEQ ID NO: 98613 - DNA, 892 bp, Zea Mays
aaacgacaaaggggtacgttctttctctaatcgcaacatctgaccccaaacgaacgacccaaattttattataacccaatctaatcttatccgctctaggatagatcaacgacctagatcactcacctccccgatacatcctactctaatcggagccattgctcacgggatcaatgactaacgtctctcctccccaacccgacaactaggcacgacggcgtgcatcgacccacggtggcaacattgtcggtgaagtcttcctgttgacccggcgccccaagctttctagagaaaccatgctatacaacacgaagatgccaactatcacgaaggagctagtcttaccacctattgcgtaggcacgacatctggccatgacacagcgtggatctgccatacccgcccaactccggcgaccaatttctcacactccggtaaccaatcgcgctaggagacgccacgaattccttcctagggaccaggcgaagtttcctaacccgacaccgacaccacgacaatggtttatacgcgtatcaacaatggcggcttcggttctctcccggtgactctttgttctattcctctcaatgatggtggcatctggattccaattatggtcaagggggcatggggcacaaattaaataccttggaaccagggaggggagccccgaatcacaacaactcaaggattgtgatttcgttcggatttgttatagcgctagatgagagaagcttctatatgcccgggtccacatggcagtgatagtaaaggaaacagatgcatggaatgaggggctgcgctgcgggacctggatgtcagtgtgcgctgcaagatgaggtgggctaaagagtggtggagttgggccgagagaggaggaagatgttccttt

SEQ ID NO: 98614 - DNA, 1138 bp, Zea Mays
aactaaattaaccttaattttaaatcaaattacaagcacgtgaaacttgcagcaaacactaattcaaatgtgcatcacataatttttgaaggtaacgaaactattcttatttcatttgaattacaaatattcagttaaacaaaatacaaatattatagggatctaagcgatattaattatagatatcgaggggtagctcgcaaaattagaagtcttcttctacctatgtcagggagttgggcgtcggtgttgcggagaaggggaagacaacgacggatcggtacggtgtcgacaaatagaggagctctagtgagggcgcaatcgagcgtcctaacggcgaacgacgacatggtgtgttggcgcaaggcgagtatcatgacgacgacacgaacatgcgttcaacgtacaacaatagggagcatgagctttggcgacagatcggtggtgctcgaggcaaactccggcgaactgtgttggtgatggcgaggaggcgaacgtgaagacggtgtgggcaataggtgtgcgagtgacaactaggggcacgagcgcactgcgggaatagcagagtagaggaacggaggagggatggggagacacgaaatggactcggcaaggtcgggggcacgcattttatagggagaaggaggaagccatgacatctatggtggggagagaaggcgaccaccatttatggtgtagcagcagtgggacgagagagagacaggcgcacgatgcactgggagggggagagaatgtcaggagacgattgagatcaagtagaggaagacaactgccacaatgaagaagcaggagctggatgatatcgaagcacgaccacgttgatagaggcgcaacaacatgcgtgtgttgagccagaatgggccatgtaactgccttctgggctgggctataatggtggcgatataaacacattgtaacaggagtcaggaactatgagcgatgacaatcaatacatttcctctcgtcgccattctctcctcttagtagtcttcttctcttccgatagtctgcttcctcttgctacctccgatctctctcctccgttcctacatccatcagcgtaccaagggttgctaacaattggtatcaaagactattgatctctaggcaaactcgc

SEQ ID NO: 98615 - DNA, 365 bp, Zea Mays
atcgtgccaaggctcctgcgccatcgggaagtccagcgctattgacgtgcacttcggtagttgcaccaccggtggtgcggtcgtccggtctagtatgtatgcatgtcgcatgtgaaacggtcttggtctagcttgcagtgtggatggctcatacaaaagcccggtcgtcaggacaagatgatatatggtgcacatgtatggacatgctcaacacctctgcattagaggagggcaactcgctaaatatctgcaatagtttttcaagttaagtttaaactcaaacttttcatggtctctcatgggattacctagcactagtttttacaagtatgcatcaccactctatataaaacttacttaggtca

SEQ ID NO: 98616 - DNA, 952 bp, Zea Mays
gactgcgaatgatgttgacgtgtgtctgaatgactccaactaagctctcaaccatatcgagtggctcttttccatctctgaaactgaaattggccaacgacatatggtcagtttctgtccgaggatggaggtagttcagattatagccaatgcgaggagctaaataattatgaagggcttaccgaggaacacactatggatcgggtagtcattgtgtgagtagacgatgcgggacggcgtaccgagggcttgaacagccaatggccaacgacgagcaggcacttaatggagacgtcgagcgccgccaccgcttccctctccgctccagcgtcgctgcaaacccgacttcgttcaacctcgacgaaccgatatggagactcaaggagaaacgacctcgattccaaaagactaacatacaacggccggaagcaagagagacgaaccactttcgaaaagcgagagttgagcggggatgagagaggcgacgccgcaaaagggagcaagcaccggtgccccgtgttttgtgcagttcgatacagatgttaacactagatggtaacgatggaagaacaacatagaattggtagagaacagcatagggaaaaataggttagagcttggagaagttgagtttgtgtttttcttcttgtatgccccgcaccaggcgaccactcagcctataaaaaccctcacactcgttcgccagaatccagcccattaacccacgacggcccaaagttccttttgttgtgcttcttcacttgatttgaagtcctcgttggccctgtagccacaccgtcaacatgttcactgctgacatttctccttgctggaaacgctgattgcccccaaacagtggcatgtggaaactgattctgcaactccagcacatcctcccatgtagccaattcaaccggcatgtaagcccactgtaccagtacctgagaacatg

SEQ ID NO: 98617 - DNA, 508 bp, Zea Mays
tgattttgtcatgtttcaatgatgttaaggtgttgtttacgtctagaatgtgtaacaaggtagcacatcatcttgctactattggttctgatagtcaagagttgatttagatgtataattttccagacgttgtatcagatttggtcgccagcgatttaatgctgtgtgaaggttaatgaaatttttagattgctataaaaagagttataaatgttttattggggttttgttgtactaatatatatctaagacttttcttgaaattagttattttccatggttcaacaaccttattaatttttttaactaaaaaggcaagaaaagatcttaaaaattacttctaactaggctggggaggttacttaaatgattttacgagttgagattcaaatcaaacagaaaaatacatatgactgagccgatcttgagattttggcccatgcagtacaagaaagcccagcccaagagccgacaacatcctttgacctttggttcctttccccttgcc

SEQ ID NO: 98618 - DNA, 557 bp, Zea Mays
ctttccttctctcagaagtcagatggaggtccgctgccaaaccagcttttgccagaatgaagatggtttccccaagttgctgagagcatgcacagttcgcctcgaaatcagaagccagccagagtatgatggtcgtgaattcgtcgagcatggcatagagaagtgtgttgtgactgtatacattggatccagtcagcatcatgtggaatggagtgtcactgctgctgggcacagattcaaagacacctgccagtcgtcgctcgcaaggcattgagggccctatgtcagatctatgaagaagtggctgacaccctgctcagattctttccgccctttcagagagatcatcccgtttgtatggtcaggatgcgtgccttagaaggttagcagctgcttgaggacgaccccacagtcgtgtacctcactgcataactgctcaccctggatgcacagtatgatttcttggctcggtaccaccgtcagataattgcccgagtagaagatgcagagaagcgcaaccgtaagctccatgtggatctcacctcagctcaagcccg

SEQ ID NO: 98619 - DNA, 289 bp, Zea Mays
ttagaccgggcacggtcctccttcggtgtcatcctccgtagtttcgggctcactttgtattctccgtaaccaaggcccatctggctaaatacacgattcaaacgaacatggcctcctcgtaactctatacctttctcaatctcatgctccattactggaccaacactctcctctgcttccttttgtctccgcaacaaaagtatccttggaacggtcacccagctccacaacgtatgtaggactcaatatcggtttatcaaaacccgaagcctctatgggtgaccggcca

SEQ ID NO: 98620 - DNA, 1140 bp, Zea Mays
ccggtgagcctacaccggccgattcacgcaacgaccggtgctctacttcggcgcaaacctaattcaagccctaataagcgtttcccctcaaccaatttcactattggagctcgaacacgcactgtccacggtgaccgtatgatcaacagacattctaacgcattcccggtgatctaaggtagcttagctcaattgagttggtcgaggagtatcaggggcacacaagaacactaaaacaaaaaaggtagagggtatgagcagacctgagacaagctgaccacagcgaggtcacaccgctcggtgttcttgagtgatttgggggaaatcccaaattggggagctctagtggttgattcgaggcactggttgcttcactggttgcacaactacttagcgaagcaggcggggtcggcaatttgtagcaggcttgagcggtggctagtgaatttgagagagacgcgcggcggccggagaagaagaaggttactggtgcgcgtgattggtggcaattaccgtggcaagctccccggcaaccaccggacgagctaacgtgagtcacggtggtaaagttaatgtgccaaggcacgtggtgcaaggctgcgaagtggctatctccggcgaacccatccaaatcgaccgtggtctgctcgggtacggtggccagagtaaaatagtggtcggagtgtatccacggcgtgatatttacttacccccggtgctatccaactgatccgagcgtggaacaccacagcgatagcacgaatccgcgcacggctcgtcggcggcgaggggatcagaacctgatccttcctgttactgtaccatgggattgttcttcagtcagcctgacagaccatgtttggggcggatttcctcctgattttacatggcaacaagaccattgttctgtagcaaatttgtagcctaatgatccagctacattcttactatagcaaccatagccaaacactgaatggattatggtcgaatccaagtccaaagattgtccaatcacactgttagcctgaattcagacctaagcagtctgacagcccatctttgggccaaattatctcaaaatatttcatggtaccaaggcataatacctatagcaaagttgtcctccttttatagctctac

SEQ ID NO: 98621 - DNA, 911 bp, Zea Mays
cggatattttagtttttgggcatagtgtctggcttccaggatttcttcttcgaatagttttttccccgaagcatgtcgaaaaatgtaatcaacatcttcaactgaagcttcgggggcaggggattttgctttttctgccataccctgccctgctgtcatgccgctatctgaagtttgttgatcagctttgtcttcaggcgcgacaaccttcgtctcaatgggcactacaggcccaacttcggcttcggcctggaccttggcaacttcggcaactttcttaataggagcaggggtcaaggcctttgtggtctccataacagcgtctagcacgctggccatcctcctcctcttgggagttgcggtaggacctttttgcatcttcggcaaatttgcctctgccggtgggctcagaatttctggcatttttactgtttcttccacctttggctcttcgaccgtatcatccttagcttcggctggcccgactgtaggcaccttcgcattacaatagactcttcagcgctctgcacgatggaagcagcttgttttgcttcagtagttgaagaggtccctttgccaaattcaggcactacggccggttcaatatatcgcggtcggtgggtcagaaccttcattttcttgtccttcggcatagcagtggtggccgaagcgacattttttctcttcttcccttgccttcgcagcgggtagtgataatcagggtatacgaagccgattgcatcaaataccctattcaatcttttcttcccttggcccccgaaggctgcggacaaggcatcatcttcggccttggaatatgtcccgagtagctcatcgctggtagcttcaatgcatttcaaccagtcatcatttggtttatcaaacttctctctaaatctgaagtatacttc

SEQ ID NO: 98622 - DNA, 732 bp, Zea Mays
gactcctaacaaaatatcctaaccaaatcaatttaacttatctctttcctaacaaaacaaaccaatctaatctgtaatctctctttcctaacaaaccaaaccaaactaatgtgtctgccactctacttgtcgtaacatgatgtttctaaatacattagtaattgtgttttgttttcgtggttattacataatgcaattctttcatctttgaagtaacaacaggtctgagaccccctgtcagttcatctgtttgttaccacttatagccctggttcttagagcatctccaatagttatgtaaacaagtctctaaatatgaatttaacaagttttcgagaaaacctcttcttcaacagttatgtaaatcagttccctaaatttacaaactccctacaaaactaatttcatccctacatttaccaaacttgttgggactccctaaatcaacgctggtactaaatccatcgtgaaaatcatacttttgccactgttttgcgttgttccactgtcctgttgaccacaaatccatctccagcgcccagatgtcttgatgctgccactgctagacaacctcttatgccgaggcgtcgtcagagcacatcatgtgatgtcttcacgccatcgtcgcgaccgtctgatcttccatcgataacttcgacctctcaagacatcagggaaagttgtgatattgatttctaccgccagctcaattaaaaatagaaagcatgctcg

SEQ ID NO: 98623 - DNA, 357 bp, Zea Mays
tagggttgtagtactggtatgcacaagtttgttaaggttgacgatagccctttgttcggtgttgtaggttttggtgactgtaataaattatggttcatctggtattgtaaaactgtttcatgtgtgttgttcagactatgtgttataatgtatccagtcatttggtattatatttattttgtcttgcttccttcaattacaattcttctataaattgccatgacagtcgaagaatggagaactacaactacgaccaaccttcacaagcccctggagactatgtgccatgcacatacacagaaggcatagatttaacagaaatcgatgacgaaggaaacatgaactttgcctttacta

SEQ ID NO: 98624 - DNA, 348 bp, Zea Mays
gtcggtcttggggaggggagtcgttggtgtgtcatctcgaccgtccctggatcgggccactagttgaggctgcagtcgactcaactcgggtggcatgacttcgagctgggacgccgtggtcccggtcatactcctcccggtgccttatctcgttttcgtgtcgtcggtcacgtgaagcgttggtggagctttgtgcatctcgtcgactgttgatggcatgtcgtaggtcgctcgagggatgagcgataggtagaaggtgattagctgcccgagtaagcagccgccgatagccttcagcgtccggagttcgcaggaggcaatcagctatctaggccagcacccctccaa

SEQ ID NO: 98625 - DNA, 329 bp, Zea Mays
cttaatgccaaagggggagaaattaaggccaaaacaaatggatcagccaaccacttgtgaatttcaaaaaattgttaagttagaatctttgtgtttgatcaaaaccctcttattgcaaaattgttctcttatgcgggagaagtttagttatgggaaaaagggggagtttgtggcatttgataaaatttaatcttgaaagatctcttgatttgccaaaacaagtgttttgatatagagataggaaaaagaatttgttttgtgaaaataaaccaagtggtggcaaaagtgatccaaatatgacaaatatatgtgagatagataagtcatca

SEQ ID NO: 98626 - DNA, 667 bp, Zea Mays
aagcttagtaaatactggtggttaggcagctattgaatttccatctcttagtatcaatgcagctggtgcaaatttcagtctgatactattgtattttaaaggtgtgacaattaattactctgacagtaagcatgcgcagatgctgatattagcatttttttccatatttagagtaaatatagaaacttaaatgaagtaaatgatgaatcagctgaccaaaaaaaccattagaaatgactgatctccattttacatgccagaatcatggctgtacatatcagtatgatggtaacaaagatgaagagcttattctcgtaactggcttgctatgtactttagttgaaaggctggtgggatagctaactggtgaacttggtgaacatgctcaaactgatcaacataagttgaaattgtagtggagattttactcaggatagaaggaagagaacatctaacctctctactttagtacttgacaaccttgaaccaacttcattctttgctaaaataggacaatttaaagtgaatcatgttgttactccatcctgttttatttatgttgccttgttgtacctttttgattgaacctgataaacgttaaatgttgtgatccatttttaccgtcaaatccatagaatcttccattttgcagcttttacatgtgcac

SEQ ID NO: 98627 - DNA, 519 bp, Zea Mays
tgctgacctcaagtttggggcgccgaggctaatctttgaaagcatagcagaagttgaggccaccaggctggaggacattgatatacttgaagaagaacggctgaatgcagtaattcaatcggcacggtaccagcagactctaaggcgctatcacgacaaggctttgcgacagcgatccttctcagtaggagatctcgtcctccaccgaattctaacgggggagggatggcacaagttatcgcccttatgggaaggacccttcatagtagcagaagtcactcggccaggatcatatcgtctcactcagatagatggcacagaagtcgggaactcctggaacatagaacacctcaggaagttttatccctagctgtatttcaaaaagctatcgggacgacaatgtattctgtaaagtggaaatatgtcatcaataaaaaaggggtttcaaagatagtttgttcacgattgacttgcattcttacttaactcggggtgaccactatgccctgctaacggagc

SEQ ID NO: 98628 - DNA, 488 bp, Zea Mays
accaaggcgcctaccaaggtgcctaaggtgcaaccatctggagcagacggtggtcccgtcaagacatctaggtcggcgtggattcctcccagaccactcgcatcgtgggcaatctggaggagaaataggaaatcgcgctcgtcgccttcctccaggcaaatgcggacgtattcgcatgggaaccgtcgcagatgcctaggatccccagggaggtgatcgagcaccatctgaagatccaccctgacgccaaaccggtgagtcagaagcctcggagacagtccattgagcgacatgatttcatccatgaggaggtccggaagctgatgcgcgctggcttcatcgaagaggtccattacccaatatggctggccaatctagtcattgttcccaaggctaacgggaagcttcgaatgtgcatcgactacaccaacctcaataaggcctgtcccaaggacccatatccacttccatgaatagatcaaatcgtg

SEQ ID NO: 98629 - DNA, 452 bp, Zea Mays
agatggtggaggcaaatccggttcgttgggcgctgttaacatgaattcatcgctgggaccttctacctctacgcgcaagttaccacatacggtcaagctcgctaatgttttcacctcaattcacaatagtttagacagtgtgctgccttattcctctagcgacaacctgctaattacgagcacgaatattacagccaacacaccagctgcccaaccgattgagcttagtgaggattcagaattgtttacatttcaaaactgtttaaacagcgccctgggggtctgcccaggtgctgatctgggcgctgtcagtccggccgggtgtttagagcctcttcctgcgatcgttaatcaagatactagcgacaaccttctcaatctgtgcacaaataatccagccaacacaccagctgcccaaccgattgagtttagtaaggattcagaattgttta

SEQ ID NO: 98630 - DNA, 588 bp, Zea Mays
atctccttcagcaccgagcgcaagagtgcgctcatagctagatgatcgtgggcgtgctttaatcccttgccgccctgctcgacgatgtcccagacgtccatcgcctcgagattgcactacatcaacatagcccactcggaataattagaccgatcgagcaacggccacattagcgacccaaccggtacggcggtcctcccatcgcttggtgatgggttgtcgtcgcccatcttattcttcggctgcttcctttagggaatgacatacttcttcttggctggctcactaatggctctgataccaattattgtcgtcggctgccagtagtgcagctcggtggcgatcggcaacgaaggtgatgcacttaggagcgcacgacatcgcactacttctcacaggtgcgaaattcgcggatcacaactgaatacgatagtttggcgctgcataacattgcagtttttctggttttcctcaatgctatttaaccctggtgcttacatagtcgctggaccacgatcacccgccaagcgcgctcacgttgcgatgcgcccgcctaacgcgctggaacgatttacatgcgcggcatgg

SEQ ID NO: 98631 - DNA, 696 bp, Zea Mays
ccaaaggatggttatcttgctgaagaacagcaccaatgcccttgcctgaagcgtcagtctccaccaaaaaaggtttgttaaaatttggaaatgccaatactggagctgaagggagtgcttgcttaagggcttgaaaagttgtgtcatgaatagaagtccacacaaatactgtgttcttttttaacagctcagtgagtggcttggcaattactccaaagtttcttacaaacttccagtaatatccagcaagcccaagaaaacctcgcaactccttggaagtttgaggcacaggccaagataccactgtttcaaccttggaagggtcagtggataccccagcttggctgataatgtgacccaaatatgcaatctgttgtcggccaaaagaacatttagacaatttgacttgccaacaatcacgagtcagcaactgtaaaaccatttccatgtgttgtagatgcagcgcccaagtaggactgtaaacaaggatgtcatcgaaaaataccagaacacaggttctcaacaaggaagcaagtgtcttgttcatggctccttgaaacgttgcacgcgctccgatgagtttgaagggcatgacacaaaactcaaattgactgtgatgtgtttggaatgttgtcttgtgctggtcttgtggtgccattcttatttgatggaacccagctcgcaaatccaacgtag

SEQ ID NO: 98632 - DNA, 596 bp, Zea Mays
ctcctgactcctgagcacaactacatgctacataggccttgggacatatgacaacagtaggtagacaaccgaccaaaacagtaaagcatatccaaagctccaagcttatgtgatgttactcttcgctaatgcgcaatctaagcgaccaagtcacatgcaggcacatgtcacactcgcacctagaagatggacgacggaaggctagacgttatcgctcgacgctcaccatttgacataaaataagttggtcaaacaagcgtagctccaccactctagacaggtacccttcgggtatagaatgcccggcgggttcaggtatggatgtggaattgtacccgcgcatagatacgagtattggagcgagtagtttttagtctaacggaaccgggtctggcatcgcaaaacccgtcgtgtcttcacccattgtcgtctctaatctcaggcggatacttgacatgttccccctcgcccaagccttaaccttagcctacatacagtgtattaaaaaaatgaacagataatttggttcacagccttatagccttaatcttagcttacgtacagtgtattaaaaaacatgaacgataatttggaca

SEQ ID NO: 98633 - DNA, 644 bp, Zea Mays
ttggaactcaatagagtaagtggtttgctcagatttggagttatatgtttcgagtgctatttggagcaaaaggttgataaaaagaggtaaaatgagatggaggatggaatagagaaaacgagatggtttggaatgtttggatggactcaaggaacatttttctaaaccataaaagtgagcaagtgaagagccaagtcaagtcaaagaagttgtgctcgaattagacaaagtcaggctgattctaggcgcaccgaaccaagtcccgtgtgcaccggaccaaggtcatatgcacatgatctgggtcctatgtgcaccagatcaaagttgtagaagagcctattttggagtttagtgggcttcgtgcactggaccaaggtcatgtgcaccggatcaaggtcctatgtgcattaaacctccaatggtcgtgaataaaaatacaacaattgtatgacatggcgctgatgtggaaggtctagcggtgcaccagacgatcaagtgcattgtggccgcacgacacttttgcaatggctactgacaaaagttgtatatttagaggtcctgtgtgcactagaccaacactatttgagattcggtgcaacaactagtttggctttgggggctataaatacatgcctccacaaccc

SEQ ID NO: 98634 - DNA, 734 bp, Zea Mays
tggtcgtccgtttcctagtggacggacaagatgagaagtaaaaatacggcttcagccagaccggtccatgaccgttggtcggctgacgtgtggccaggggaaagaaagcgtttggtccgttggatttcaatccattggctaagatcagatcaggaggaaggtgattgtgaccgtagattccggattgagcggacctgacgtcgtagctcataacttcgttgttcattagatcctgtgcgtccgatcgggatcccgtgacccagattcaatcttgtttcattaaaccacgaccattgatcttggatccaatggctaatattgcataccagttcgattaagataacaatttgatctggacccctagattctaatcgtgcggccaagatataaggataccccttcggctgtgtggattcgcaaaagaacccctgctctttttgtaaattaatctgtcgtcctagaactatagcatagagtttaatataggcccctggtatttgtagtttgaaccccgaatttctcagtaatcacggccgcagtccaatccactggtaaattaatttaattagatgcagaaatcatttttagtataaaaataatatcttaatcttggaaaattcataacttgatgaatttaaccccgatttgatccgtttcagttgtgatattttcgtacaaatattaactacgcagtaatagcattgattatatcatatctcatacctttatattta

SEQ ID NO: 98635 - DNA, 305 bp, Zea Mays
tgtagcagcactaagggcctaccacgtcatctttagtggaccttttgcatctggcaacgtgctaattcaggaggtgagttcatgcaacatctatgtagacaagtatataattgatcatgagtttgatgagcttcaatgattttatggagctcctgcagataaatgtagatctatctgtggaatcacctcgcccgcctcttcgcaacatgaaatttctaaggattaccaagcagaatgcaaatggggactttgttgtagtggatgtgtcaatcaatgatgtccaaggaattcatgaacaacaaggc

SEQ ID NO: 98636 - DNA, 717 bp, Zea Mays
acaaaattcttgtctggcagcgtttgactaggatggtgggggatgttcctctaaggaaggatggtcagggctcaaggccaaggaagtcagtctagaaaagaatctccccattgcaggagggtgggaagccggaatgtgtacctactgcatctgttcaaggtgctagcgttggaggccatgaaggcttacgatgcaagcgaaagaggaactgttccaagcacggacggggagagatgacaacggatgatcaccatcagcaagtatctctggttcatgttgttggagcagcagtcccggacccatccttgttgattgtcaacaattctgaggagtttgactccactcttaactccacctgtgatttggattattcggatgatttggcaaggaaggaaattgctctccgacgagctctatttgtctctgtggctggaacacgtccagtggtccttgcttaagaagttgtggatgaagttgcacgccagtttgatattgcagtgaagaacatgtcaattcatccgacaatgccagaagacttccttttgttactgcctgatgaagatgctgcatctaaggttttcaatgatggaaaggcactacggggaccttgtttcaccttgctgttcaagaaatggtcgagatttgctcatgcttctacctcttctttgtccaaattagtagatattgaaattagaggcattccagagcacgcatggt

SEQ ID NO: 98637 - DNA, 311 bp, Zea Mays
gttcagtagcaggaaccatttgtatattgtcaaattttgggcacacttgacatcccttatagtacttacaatcgacaatcaatttagtccaataaaactcaacccttctaaataaccacatcatttttggagccgattgattagtaccataaataccttcatacacttcggacatagctaacatagcagcattagggcccaagcatttaagcatgatatcactaggagttcgacgataaagttcattatcaatgagaatatatttcgtcgaatacccctatttgttctaccatttggatcatgtaaatctg

SEQ ID NO: 98638 - DNA, 779 bp, Zea Mays
aactttctctttttgcattaagacaccctaaaccttgccttgaagcatcacagaagatgacgaaatcctggtgtatatctggtagtgacaaaacgggtgcggtcgtaagcttatccttgatgatctggaaacttccctcacattttggagtccacacaaacttattgtcctttttgagaagttcggtcataggttttgctatgctggagaatcctttgataaatcggcggtaataccctgccattcccagaaagcttcgtacttcactgacgttggatggctgtttccattttgaaacggcttctaccttggatgggtccagctggtctattgaagcttggtcccctgggtgggagcccaaagggtcgagttctctggtgatgatcttgctgctgagctcggagaagttggaatttcctcttgaggtgccctttttcttcctcttttgccctttccacttggatggatttgttggagaggtgagagaagttgaggaagtcttggctggcgaggatggtcttaagctcgggtcttagccctttcagaaaacgggccatcttcctggactcggtgctgacatcgtcaggcgcgtaacgggccaattctgtgaacttgtgcatatactcactgacagttcttccaccttgagttagttcccggaactcatcttctttgagttgaacgatcccctggggtacatggtgctcacggaaggctgtttcgaattctgcccaggtagcatctttgacggcctcgctgaaggtgtcccaccatgctag

SEQ ID NO: 98639 - DNA, 708 bp, Zea Mays
tgctctatgttccatgaattccccacttctgtgccatccatttgagtaagccagtatgatcctggccgggtgacctctgatacaatgaatggcccttcccatagtggtgacagcttgtgtcgtccttcccccgttagaatttggcgaaggaccaagtctcccactgcaaaagatcagtgtcgcacgactttatcatgatagcgcctcaaggtctactggtatctggctgactgaattactgtgttcaatcgctcttcctccagcacatcaatatcctctagcatggtagcttctgcttcagctatgctttcgaagaccagcctcggtgccccgaacctgatgtcgacgggtagcactgcctccgaaccatagaccatgaagaatggggtatttccatgtagagctcgactaggttgagttctcaagctccagaccacatacggtagctctctgatccactttcctgcaaacttttcatttttgtcgaacactttcttcctgagtgcttccagtatcattccattggccctttccacctgaccattagctcttgggtgcactactgatgcatacttggtctagatactccgttgttcacagaaatcaaagaattcagagctagtgaagttagatcccaggttggttatgatgctatttggtaccccaaatatgaatattatgtcttgtatgaactccaccgccttggct

SEQ ID NO: 98640 - DNA, 1175 bp, Zea Mays
tcaaccaatcaccatcacatggttgttatttattaatatgataacataaaagagagtatcatcgtctaacgcgaagtataacttattacatcgtgactcaaaactcctaaagcagcctagtgacggatccgggctctccatagcgcagtctcttgcggggaggagacaatgccatggcggggacctgagcttcaggcggatccagtccttgcagttgggcttccagggttgcaatcctggcatgggcattctctagctccatgtgtatcctgtagagatctagggtggcactgtccaggtcggtgttgagaccggccactacaccagctagggtgttgaggcgatcctcaccagcttcacctgggacgatgctggtgtggcttcctccacgaagacactgaggaagatgcctgaacctcgtgttctgcagctgctgccggtaggtgtgactgagtgaccacagggtccgacgggcagcatcgctgaccgaggcagcgtaggtggacagtggtgtcagggactcgtgagcagacagagtcctgaatcccctgtcacctgcatccatcaccctgacgtggatgcgagtgatgtaatagcaagcccggggaggctcgctcactcgccttgtttcatacagggggtggacgtaggtgcctagcgcgtgcagcacttcttgcagcaggttggggaagtgctccgtctcgaacattgatgtgtaatgttcgacaataggaccgaacaccatgaagttatcctgctgggcgtagtcagcttcctcgtggacgtgttcgtctccaccttcttcgtcgtcgtcatcctcgtcatcgtcgtctccgaagtcgtcggggtcgtctcctccgggtgcaggtgcttggaaggctggtgcatatggtgctgacgtcgatgacccagctgcgaaggctagggattctgccaacggggtgggggtcagcagctgctcctccgagctgtcctccaggttgactacattctccactcggatgggagggagatccgccggaacttcctcgactaccactgggtagaccgggatctgccggggctgaggggcatagctggtgttgatgcgggtagtttgaagagtgcgaaccatctacaagagaagtgtcaactcagttgaatttcaaagaggtaagactgataaaggaatttat

SEQ ID NO: 98641 - DNA, 361 bp, Zea Mays
cggttccgcaaggtagtcaagcacccaatccatcaactcgtgccttcaattgttcaccagagcccccgaattgctcacttcccccaaatcggttttctatcgccgtgagaaggctctcaccgtggccagtgcgcttcaggtccgatcatgtcctctgctctcttgtttcattacccttatgtgctcctgatgcttctcgacccgaccgattaggctagagcccatttgatcgccgggaacactttgtgttatccgttgatcgtgcggtcgccgtgagcagagaggttgggagctcgaaccgtgcaattgatcgaggggaaacgttggttagatgttgaattaggtatcaaccaagttagag

SEQ ID NO: 98642 - DNA, 471 bp, Zea Mays
gaagtttgtgagctttgagcttatggtcaaagactctatacacgtggagaacatttctcatggtaactcctccacacctaagccacaacctgtcgcattcaaagcaacataagagaagaaggaggagaccacaacaagcaaggggcttccaattgacccctctgagcttgataatgagaagatgaccctcattatcaaaatcttccggtaaatcctcaaggaatggaaggggaaggactaaaaaccccattccaagaggatttgctaccattgtggtaagttcggtcactatattgctacatgtcaatatgccagtgatagtgatagggacagggacaagaagggaataataaaatggagaagaagaaaaggttctaccacaagaagaaaggtggcgaggtgcatatcagaaaggaataagactacgatgagagctcctccgacaaggatgtcgccaatatcgccatcaac

SEQ ID NO: 98643 - DNA, 378 bp, Zea Mays
catgctaacttgcaacaaaaaaaagtagagctctaaatttgtacataaagtgctcatttttgttattacaaagaataacttaaatagaccccctctctccacccacaccctagatctgcatctaaagctatctccagcagctctgctatctcaaactttactctacaaacagtgttatctacaatgcaaatcctcaattttacatgttttgctaatcattacaaattccagtaggtaagatcaaaattagtcacactagatggggtgcgacaagagctaacatagctcatgctaaggtactcccgtattacctaaagacatgtctaacatatataaatgtgtgatgcaattatgcaaataagaaaatttatgagtggg

SEQ ID NO: 98644 - DNA, 1074 bp, Zea Mays
cgttggtctgcctcccactcatagcctacgaggcccacgggctgcggtgcactcatgatctacaacccctcggactgtggtgcactcatgacctattgagactaggcctaagtgcccataccgcttgcacagcacaacaagacaagtcgtgccaagccctaggttattgaggccaggggtcggcgtcgctccaatgatggcgctcgggtcacacattgctcgcatcgttcattataaagaatacaagacaactagacgaccccaacgcccatgggtgcacatggcttcaccctgtggtagaacgctcgattttaccatcatccggtgactccttcctaaacaagccatcaccgaatgacctcttcattggcctataaaaggatgaggttggtcctcgtgcatggagggcgaaagaaagacaaacacacacatgagcagatgcctagacgaacaccaagactcaaagacaatggaccgactggaggatggaggatgcaccgaggaggacccaaaggccatagccccgacgacaagccaagacttagttagaactccactttatacccttagctccacttcctccaccccacagagacttgggagcctctcctcactctctctcccgcttgtaacccctactacgagaattgatctgcaatggtaccggtagcgcacagcgaaatttacttgtcggagcgaggttcgaaacaccgacacacactacaatgctactatcatcgagtaaaataaatacacccacaaatgtacaatcacactcaagcagtaatagtagtagattgcataaatatatgtactaatcaagagaggcaacaggtaactcagagcaccatctccacgcgggcttcgtctactcgggaaaggctgaatctcccctgggaattaggcttctaaactcgcccttagcctatgacctagggtctcatctctcttgttttctcatttggtcaatgataaccatcctttttttattttatcctccttgtcttttgtcttatggattgatgcctagcttatagcatcgagctaccgcacgaacatcatcatggacatgac

SEQ ID NO: 98645 - DNA, 451 bp, Zea Mays
gggagctgagcctcgataggtgggcccagaaatacaataatatgaagcgcagagcgtcggataagactggtggaccaagatattcatccatggtgtgcaagaatcttctcttggtcgtcgtgtgcgctcctctagccagactcgtctccgccccatcttgtcaccatgtgggtgaaggctctagcgtagcttgcagggtaggctggctcgccgtcttgcgtaggggagcaggtggacaatgatgttgtgtctcctccgtctgtctcttcacctacctctacagcgggaatattagaaatcatgataggagttactcacgcgtgacatagtaggtcaatggtctttgcctcggtaacgcatggattactgacgcaccccaggccttgtggacaccccgccttcatttaatatggggcacacgctacatgcccttggtgtggacaggtgcgca

SEQ ID NO: 98646 - DNA, 557 bp, Zea Mays
ccttgagccccatcgatgttgcaaaagagttaagaacgactctgagaaaaaaataattgtctagggcaagcttccattatcaataatgtgtcatcagcatattgaacgatcggaaaatcttgaccacagttcgcggcgaggggcaacttgagcaggttttgttgacgcgctttattgatgatgctctgaagcagatccgccgcaaggacaaaaaggagaggcgagagggggtctccctgtctaaccccgcgcttgcaatggaaagttttccctgggacgccattaaggaggaccgaggacgtaccagactgaagaatatccctaatccagctcatccacctgggcccaaaacctctatgcgacagcacctgaagaatcagctcatgctcaagtgtatcaaaggccttttcaaaatccaatttgagcacaatgatctctttttttgagatatgacaaagatgaatatattcatatgcccaggccaagcagtcctgaatggttcttcctttgatgaagccatattgatttttgtgaacaagggaagtcatcactgtctg

SEQ ID NO: 98647 - DNA, 371 bp, Zea Mays
tgctggatgaaaagaaagcagcacatgcaaacaattgtgctgggccataccttattaattagataatttggctagctaccgtatacttgccttaacctaatatcacaccaggaggttatggtaggcagtaatagggttcttagaagttagaactgtttaagccccatctttacagcttctggccagtgtttatggttagctgctagattattctttattgaaagaggcaaatttctgctggtgtcagcttgatttgtattcaaattcgaaccatcatttgggtggagtatctgacaaaaagttaacatagtctatgtagcttttaaatgttaaacaaaataccatgcttcaacaaattctaattatctatt

SEQ ID NO: 98648 - DNA, 444 bp, Zea Mays
gcaatatggacatgtcaatctaccatgtgtactccaaccgacaaaaatagcatacaccatgaagtcatgcaccgaccacaaatacgcaactcaaagtttgaatatctgttttttaaaacattgtatgcttcgactcctttccaaagctccttcaactcttcaatcaagggtttaacataacattgagtttctttccaggatggtccgggtcaggtatgattaagcaaagaaatataaatttatacttcatacaaagagaaggtggaaggttgtatggaataacaaagatgagccaacatgagtatcatgatgccatttgaccaaaaggtgtgaagccatcggtcacgaggccaatttgaacattcctcagttcagctgcaaagtctggatcaaacgtgtcgagagccttccaagcatccccatctgaagggtgcaccatttgct

SEQ ID NO: 98649 - DNA, 399 bp, Zea Mays
gtttatgtggttattagattggttcgttgattgatcgcgctgcagacctgtagttgctagatcgatctggtaagcataagcacagctgcttttccttcagttcgttcagagacgtcagacgcatgggatctatattgcccgtgcataaaactatgctcctagtcgtttccaatttgagtcatgatgatgattaattgattatttccaactggccatatccctcaacggaatgcttgcacctgggcagcatggcgcatcatcatccccagacacgtggaaccgctagcggccgtagatatggatagggccaaagataaatggtaacggtttcaggtcaggcgtctgcctcccacgctaccggcctgcgcagcggctgctgcgtgaatctctatatattct

SEQ ID NO: 98650 - DNA, 333 bp, Zea Mays
actgttctatggagttcgatccctagggctcaccatatgacacattcccactcgtgtggtgctcgctcgctgtggcaactctgaccccgtatactctcttcgtcttctcgtcccacctccctcctcttgtgttgctccaccttatgcccaagccatgccccggacatccactttcctcatcagcacgtcctcctcccatgctctggacactaccaccaccttcaccatttggcttcgtcgtcttggtcaccctggccctgacatcatgttcaagctctctagtagctctgatatatcttgcagcaggggcccctctaagcatctttgtcatgc

SEQ ID NO: 98651 - DNA, 457 bp, Zea Mays
aaggaatcatgtgtacggggaaaggggcttcgatgagcaggggtctgataaaggaagggacgcgcacgaacgaataagaaacaacgacactctcgagtaaacagggaagacggagagctctagcatatggggaaagagtcacacgcgagagatgcgactagataaaacggtggtttggggtctatgcgagagctccctaaaacagggtctctagtgacaatcggagtggccatctaaattttgatgtcaacgtattcagccaatcgttgttgtccactgacgtactttaaggagaagcatcaaatgtgaacttcacgttgaatggacatgagtacaacctcgccgctgacatctacctttctggtgtttgtgaaaactaactctctcacaaactctgaagcaatagatgtttgttgtatgacatgtggacgcacgagagaacataaaagagagcatt

SEQ ID NO: 98652 - DNA, 659 bp, Zea Mays
gctgctgcctgtgtgtgtctgtcatctactaattaattaactcgctgcccatcgtcttcactggactagaaaccataaggtcaaatccaagcggcaacggcagtaaggacatggcgacgagctgctgctgctggtgcatgttgtctgtggacatggacgacgatgtggcagtggtgcaagatagcttgccatcgttgatggctcgacgtgccatgcggcggctgtgaggagctgatacggaggggtgcgttgtcgtgcatcatgtcaataaagacgctgccatccacaaaggcggaggggatgatgtgctcgaggaggcgtgggatccatgatccagaggtagtacgtgaggtcctcgtctttatccaccacggaggagcgatggtcggggttctgttgccagcacctgcctcatccgcaaacttagtttctatctgtgcgcgcggaggtagagcgggcagaggagatgacgtgcggatgtctgtggcgccgatcgtggtattggtttgatagaaacagtagctggctggttcttgcgggttgttgcaggttcttactgttgtcgcgcgggcttgagcaatcaaaagatgtcgggccacaatgaagctgcagctctctcgcattggtcactaatgctgattttgtgggttgggttggtg

SEQ ID NO: 98653 - DNA, 528 bp, Zea Mays
ctatatgctactagcagaaaaggtagtccaaagaggggttaacagatctttgcattttcagattcagaacagtacactaagtctgaaattgcagtgttttggctgattttgaaactcatttgtgcctaatacatagggttttgggctgtagagtatataaaggaattaaataccatatgatggtgaataagtctccttaagtgactttggtttgatcctacacaaaagtgggagagaaagcttgctcaaggttggactgacagacagtgctttaacagcatttggtccagttctgaaatctgaaattggttgtatggtgccaagtttggagctcttttgtggttgttatataaggttttggactgaggtttatgtagtggaagtgaagaccacctaatggtgaacaactatattaaaggatgatgtacatgattccacataaaaagcagtgtaacagctgctcaaagtttgactgtcaggtggttggtgacttagtctattcagaactgaaagtctgaaatcagtacg

SEQ ID NO: 98654 - DNA, 443 bp, Zea Mays
tgataccctgaggcctcaccaccttgcatcacattttcggatcctctcccgtgcttggatctggaacgcggaggagtttcttcacgaatttcttgatcatcatcggagtcagattcaactactgacgggttcctacgacgcaccatccttaagataaaaaggagaacatatggtgagcgaggagatcgatgttcaaggattttaacaaacattgttgagtaaagatgcgtatgatattgagcatgcacttcaaccgttcatgcgagcggttcaactacaacgaacaataccaaactactaaactcaaacaatgttcgagacaaaggaagacagtttaagtgttgcaagcacctaaactacatagtatccttgaaaagatacacaagataatcaagaacggtgtgagatcgagtaaaaacatgaggaaataaggcaatacctcg

SEQ ID NO: 98655 - DNA, 348 bp, Zea Mays
ctgtcggtaagccatgggggggaaggatccatccagcggggttactgcacttgttacccgtccctcaaggggtttggcaagatataacaatgtacttcattgaacagctacccaaatcagagggatatgataccattctagtggtggtagaccgattttcaaagtatgctcattttcttgctctgaaacactcgtttacagcaacccaggttgctaacccgttgatggatcaagtggtgaagttacatggatttcccaagtctataatgagtgactatgacaaaattttcactagtgccttttggacgtagttgttcaagttgatggggaactaaactcaatctgagc

SEQ ID NO: 98656 - DNA, 328 bp, Zea Mays
cggcaacctttccagaagcagcaatctttctttttatcccttgccctcgcagcaggtaacaatagtcagggtatacgaagccaatagcatcgaataccctgttcaaccttttcttattccgacccccgaaggctgcggacaaggcattgtcttcggttttggaatatgccccgagtaactcgtcgctagtagcttcaatgtgcttcagccaatcatcatttagttcatcaaacttatccccaaacctgaatgtatacttcagccggaccaaaccaccttcgctagagttagtgatggtctccttcggcatttcccagctttccacaag

SEQ ID NO: 98657 - DNA, 404 bp, Zea Mays
gcgagagtggagtcgagagctgacgtgacagagattagagatagatggtacattggaaccggcctaatgacctccacttatttacatatgcctaaggctaggtccaacgcctttaacgtggcttggcacgtagtcggtatcgactgttgtatgcctaaccacaagcgatttgatcggggcagccgacacacgaggacccaggaggtgcactattgctacggttgtgcctcctgattgagactccaggttaggggtctatgcatgccacctagcttgacctataaccaaggaggatgtattgttgtcgatgaatcgctctacaaatgcacaacaacaaattaaacgttaaattctggtgatcatgtggatcaactgaaggaacatgaaagcctaagaggggtgaa

SEQ ID NO: 98658 - DNA, 3070 bp, Zea Mays
cggagggacgcggaggctgggggcgatgccgcgggcgcagcggtggcgtctcacaccagcagcatgcaggtgaggtctccgcaccctacttctcggctgtcctgtacgattttgggagctttatgatgcgtagatccgctcgctgctatttgattggctaaacctgcgtccgttgcgtgccttcattttagtttgttagtgcgtagtaggttctggaagggagctgtcggaattttgcatggaggcggtggggaatttctgtgggccaaccgtgccttagatccgagttagctgccgttggagctggtaaattattgttctgagagggattgggtgtgcttatttcttggtgaactgtagtaatgagcgagatatcataagacttggtttttttgttcatgaggaatatgtgggtatgtttttttttgttttttgtgctatccccatgctgctgtaccagcacctgcatgtttgggaagtagtgaggcctgctttactgtggagttagcctgtgtcacttggtttctcactctgtcagtgaacttattggtgatagtctcgatgtgaacagttcagcacaatgagattgacaatttaaacaaagacgaatgtgccctgagcatgatgtaatcactacccatatgccatatcatttcgtaaacgtggggcatacttgattgaattatattgatacaatatatcagctactaccattttgattatttctatgccggcagtagtatccttctatcttgaaaactgtagagccttcccatctcatctgaaatttctatacaatcaaaagttccagcttaggtggatgtgatctacattgataaacttaacatctaggaagtaggaacagaagttgttttgatttaaatttattgcatcatttgattatatgtaccggtgggattttgttcctctgaagccaaatatcccaacttcattgaatgtctcacttcattgtagaaaaacaatcgacttttggtagtttgacctaaaagaaagataataaaaggcacccatgatactccctttcagtggttgttgcgtatgtcagaaaggtcaaaacagcttgtgatacctgccagctgatctatggtcatatttgtatccgtagttaactagttatactacccaatccaagtatcggtcacttcagtattaaacaaacactgatagccatgatttgttagacattgttgcaatggactagagcacgtgatgaatgtttcacttgcacagaatttttattgtggataagaggcccttgcagcagcatgtcattaggtctaggtgcagcagaggtaccaaggatagcaaagtatgacagtagctgggcataatgtgggagagcctagagtgcagatctaaccacgtcaaaagtcctacaagtcttaacgttcatatgattagaccgaaattttgtttttaggaatttgcaaattttgattagttcttactgtgttagtcattggtccaacgtccaatgaatgtttaatttgtgttaactactagcctttctagggtatctatatcgaggaggtccacacgcataatataatgatgaagcattcttctattttctgtctctcgagctctctagttctctctaccaagctatatctgtctgtctcattacaatccttaaccccattcagccatgtatattactaacgatggttacaattctaactgttccagcgtgtcaaagtataccgtttggctgatggtgggaagtgggacgatcaaggaacaggtcatgtttctattgattacattgaggtatgaagaatttctttgctaatatgggtggtatttataatttcttattcatgggtctaagctaattctcatactttctcctgattttctttgatagtgcccaaatatttgtttgcctcttgatctactttagttttgctaccctagtaccttgttgcaacatgcttcatttgaccctcattctgtttctacaaataatgaaattgtcaactattcatttttttcactgtcaagggaacagtgtcccaatgtaaaactaaagaaaaccttgtcgaagtagacatcattttcatatttcatactgtaatggtgattcatggaacagtgtcccaatgtaaaactaaagcaatagtccactaaaaatgaaaataagcacaaattacttgatgatgattcatggatcaatatatcggtgtaaaagtaaagaaatggtccagtacaaatggaaacaagcagaaattacttgtagtctatgcctctatggcaccatgatattctgtcattgtattatgatttctaatctgtgtgcttactttttggaccttatatgatttattatttcgttggtttcagggttcgaaagaactcggtttgactgttttagatgaagatgacaatgagacgctacttatgcacaacatcacatctgatgatatttacagaaaacaagaaggtgaactaactcagtatcactctgtttttgagctaattcatatcttttttgcaacttcctaatccatttcttttgttagaaacaatcatttcatggagagatcgtgaagcagcgacagacttagcactaagctttcaggaagctgcaggatgctcctacatatggtgattgaagcaagagctgtggtgcagttaccatgtttttgttcaattactctttttggtttatttgtgttctttgttggtgctttgcagggaacatatatgtgaaattcagagaaaccttcagttcagtaaccttggtggtgagtttttaaaaatcagctgtgactgtttattcaaccacacatttgcatgcagcatgctcttctcattttaacgatgcctgcagctccggaagttggtcgtcgtcaatcatcagaatctctagaagcctctagaataatgcattcaaatggtacaccccctttgctgaacgtccacttgagattgtgccattgtggtatctttcaaaaataatatttagaaattattttaaagcgtctagtttgggaacataacagaaaagtatcttactgtccattgcaaagtaggtgactagattctg

SEQ ID NO: 98659 - DNA, 637 bp, Zea Mays
gaatggctgagagagggtggcatggagaagagctagctgggtagtgcttaaccaaactttgatggactagctagactgatttgtggcttcaattaaatattcaaattgcatatatattatgtaattttgtatctcattattctcatatagtaccttcaattcaatggtcaagttgcatatatattatgtaattttgtatctcatttatacaaataacatttgtttctattgttgtatgttcaatcttttcatatgtagaaatataattgacttcggtgaatatcgtgccaattgttgtgacatacaacaatcttttgctgatggcgcatgtctcgacaacgtgtttatgcaatgtttcattgagtgtgtccgcgatgactagtctaaacatattcctccactgaatgctcaccagctcattctagatgttaatgttggggtatgacttctacatttatacctcttttttaaatgcatagcatatatggaaattacataatacttctctatcctattaggctatattgaactttgaggagcaggagcaacatagtaagtctcctcgtccatttgacccttcagttttggagagttacctattgaagacactgccttccttcaagcagctggatgacta

SEQ ID NO: 98660 - DNA, 382 bp, Zea Mays
tggccatgttgagtttggtgagctttggatagtgcggacttgttgtctattggttttggtgtggtttgaggctaattggtgtgacaacgatgtggtggtgttgaatatttggttgggtttgcatagttattgatttggatgattggtgggattattagttggtgtaggagggtttggcaatattaaagttattgcttaactttaaatgcttcctggaggtgtcgtctaatcttaggttgacagtgaaggctacgaccaacttgtcctatttgtattgtgctctttataggttagctttgacttgctaaagcacctactctaatgttgggtgaagaattggtcagtctccttcaagtgttggttggccaatcatatgtgttcc

SEQ ID NO: 98661 - DNA, 639 bp, Zea Mays
gctccacggcagaaaaacaaagatgattctcattctgcgcttgttcgggtcactagtggttctttatctcaggaacaaatagcttcagagcttgggaggttggtttctactaaatggaattgggagatagtgaagacatgaccgttcttgtttaaaactctttttccatcaagagaacagttggcccagatgatagaatggggagtggttcaaaccaaatttaacgcctctatgaaaatagaggaaggcgtggttgctaaaaaagcaaaaggtgaactgaagaaagtttggattcagttcatcggaattccttcggagatgatgaattttttgcttatatgggcagtgggttctacactcggagttacaaaggctatagatatgaaattcacctataagttcgaggttggtcgcctgcaggtatcagttcttgatccgaatcttatcccgcagttcgtggatgttgtaattggtgatttcatttatgagcttcaatttcgggtggaggaaaatattgatgaaattaacctagagccaatggatatggatgatactgactttggggaagatgataaaaagtcagaggataatggttccagtaaacaaaattttgggtcactaactttggaacaatacaaa

SEQ ID NO: 98662 - DNA, 689 bp, Zea Mays
taaggatcaagcctcccacatttgccagatctagcaacccgctcgacgctgatgactggctgtgcacaataaaaatgaatttagaggccatcggatgccccaagaaccagcgtgttcatcttgctgctcataaactctccgggatggccctatcctggtgggataccttcaacgcgaccatcagagatgctacctgggaagaatttgaagcagctttccgagagcatcatgtacccctagggatcgtctagctcaaagaagaagaatttcgggaattaactcaaggagggagatctatcaatgaatacgtccacaagttcacagaacaagctcgctatgcgcctgacgatgttagcacggaagccaagaagatggcccgtttcttgaaggggctgagaccagaactcaaaactatcctcgccagccaagatttcctcagcttctcacacctctcaaacaaggccatacaggtggaaagggctagggaagaagaaaagggtcacctcaagaggaagtttcaagttctccgacctcagcagcaagacatgcactagagagttcgatcttttgggtttcctcccaaaggaccgagcttcaacaagacagcagggtctgctccatcacgtttcagccagccgggttaaagttccctccatgccgcatctgttgcaagcaactaacctccagct

SEQ ID NO: 98663 - DNA, 354 bp, Zea Mays
ttttccttcaaagagttcaattacactacgggtttgtttggaaacaagggtcaaatactagaatttactgtttaaaactttgctcccaaacaagtcctacaagaatgaaactcacccaatatttttgcagtctcaaagtaacggaggagaaagcatagaggaagcagtattgggcttctgtgaagttcattggcgtctcagccgtttctcacttgcagttgcatgtcgttgttgcctagcttgttacccattcctctcgatcgtttgcttccccgaattaatttgaatttgggtacataacttctataactcttttcacttgtcgtattcaaatcacctgacacttgtttcttt

SEQ ID NO: 98664 - DNA, 280 bp, Zea Mays
tatgtcttgcatgctttatgtgttgagataggaattctgtgattgtttgccacgtatttaagaattttgttatcacataagaccttgccagtttgatgactgaaacatgtttttgaaattaattaaacatcacaatgtagctatttgcaccgaataaatctccacacaccgttcctgtttttatacacacttatccaatgagttgtttgaactttttaaccttttgaacatagagaaatgtaacttgtaaggaaaatacatactgtttgttgccacccta

SEQ ID NO: 98665 - DNA, 331 bp, Zea Mays
aactttgctatattgactcgggacaaattctttgaagttcttgatctacagagctcccaagatgactcagtaccacagttagtctaaattttagacatcaaacagccagacagcccgactttgtgtttgattatctccaatttttgtgtaacaaccaaagaggatgtctgcatcaaagctgttctcctacaataggcctacaaaattgatgtggtgacctagggcaaaatcctccttgtttgaaagttacaaggtcacaaagatgagctcaaaacactgaatttcagacttagctttagaactcaaatagggtccttttgcaaataggtcc

SEQ ID NO: 98666 - DNA, 397 bp, Zea Mays
ctcaattgcactggccacggcgagggtgttcatgcggtgggatgaaccgatttggggaaaactcgaaattcgtgagctctagcgaacgattgagggtgggagcgggtgctttggtttcgtgatgacatagcgcagctaacccagccttcaatttatagagggcttaagtggtggtgctcaatttggccgagcagtgctggcggccggaggggagaaagagtactggcgcaacgaaacaggtggctttcaccgtggcggctcctccggcgatcaccggacgtgcatagcacggttagccgcgacgtggtaaagcgtttggacacgcggcggatggcagggatgactcaacggcggtgagatcttatctgatcgacgatgagcaaaggggaaaagtgtg

SEQ ID NO: 98667 - DNA, 295 bp, Zea Mays
acggaagaatgacaaatatcagagaaaaggaaagaaaagggcatgctatgaatgtggctagaccggtcacttcattgcggattgtccaaacaagaaggaacaagatgccaagaaagattacaaaaagggacaagttgaagaagggaggcaaggataagggatacttcaagaagaagcccacataggtgaataatggaactccgacgaagagagttcaagctcggaggaagaggaagaggtggcaaatgtctccattcaatccacctcgacctcgcaactcttcactaacctctcc

SEQ ID NO: 98668 - DNA, 307 bp, Zea Mays
caaacaagaagatataggatattatgtgcactatggaccaaacctctttaaactaccttcatgccactaccttgttgcacccaggttcaacacacattcggcctataccctcggtctatttgctacacttttaatgttttgggtaccctccataacccggtgttgtacctagcacgccacgtagggagaggcattgttttattcttagattgatgtgtctactatgtaatgcaaccatggcaccaccagcacgctcgtcagctagagcagtctcctttgacacctatgctagcaactttgatcatga

SEQ ID NO: 98669 - DNA, 649 bp, Zea Mays
ttaggagggaggcggctagggtttgggaggattaatgggctgaaacaccaatcgtggcccaactaacccacgcgacagctcccgaccgcaacgcaagcgtcaaaccaaataaattctactgccctagttgtgaatgttttccacaaaattccaaatccccaaaacaacaaccggatgagggaaaaaaacaaaaaaaacaacccctaacttctcttctttgcaaaccgggtatcacactctacccctcttaaaaagaattcgacctcgaattctgacgcttctatcggaatgacaaaagaaaagattaatgaatcaacaacacttaccgacaacgaaaagttctgggtacttctgccgcatcagctcctcaagttcccacgtagcctcgcgctcagactgattagtccataagaccttgacatactcaacacacgctccgagaattccaatatacacaccggacgacactccagagtcagatcctgctgcaccgaattggttccatcttaatctgatggtccggatcccgcaagaacttcctcaacatagagacatgaaaaaccgggtgtacccctgccatggaatccggcagtagcaagcgataagccaggctgccaactcggaccaagatagtgaacggtccaatgta

SEQ ID NO: 98670 - DNA, 449 bp, Zea Mays
tggccacttggtacgatagctgataactagaaattttgcatctttgcggtaagcaaaattgtagcagccgaagttttcgtgtagcccatcttctctagcttttgtttgataatgaagctcatgtattcggcagaagccttcggcaaacggttctacccctggcttcgaagggcccatatgtagacgctaagcctaacgatggcgttaggagttagctaatgaagataaatcccaaacttcttcaaaacaccagcaatcatctcattcagaggaaatcttaatcccgctttaaagaagcttttgaagacaaccacctcatctttttctggcttcaaagtaatttcctctccaccaaaacgaaccagatccttttttgcttcactgaaatagcctaacttcatcagcttagacatatcaccttcagtaatggtggatttcccaaactccag

SEQ ID NO: 98671 - DNA, 795 bp, Zea Mays
tccggcgtgaccctgctgatgtcgagtagttcatacctgtagaaatgaggctagggatccgcttgaaggcggatgtaataacttttgtttttgtaagatgcttttgggaactatcaattaaacaactcttatctgtatgctatttgttcttgctgtgtgtggcgttaccaactcctccctggtacttggcccccctgggatgtaggctcgatgtgtcgaggctggatgccagtatacttaagaaagaattggtgacctggcccccaggaggtagtctcgactaggacctggacctgcacacagccttggctagggagcgttagtagcacacccatacgacccatcgtctggtatcagccatcctttgattcatgcaacaggacctgcaggatttagcctgggaagccaagccacgtgcctagaccccctgaatcacaactccagatactaggacacccatcgcagagtggtggagcgtgcacgcttagggttcgggaccaggctaagcggctacacagttctggaccaccgcaagaaacgtgcatccattctctagaaccggacctcgggttgccggacccacagggctatagttccaaatactagggtacttgtcacagagtggtggagcgtgcaggcttagggtacggaaccaagctaagtggctacacagcttcggaccaccctagggaacgagtacccattctctagaactggcccacaagctgtcggaccccctgccttcgtagaggggtcctaaactgcaagcctggctacccaattcggatgtcatca

SEQ ID NO: 98672 - DNA, 341 bp, Zea Mays
tcggggtcaccatagttgtagcatccatccttagatccgccatgccgccaattcagacaattgttgtgaaactgcttgaaccggttggcaataagcgccagctcctcatccccaaggatctccacctgctcctctgtgatggttgacaaataagataaagcaaacattacaggtgaagagtaagaagaggaaccacctctagagaccaaggccatgatgggtgcactagggttctcaatcttgtccctagtctggtgatcgatctcagcggacttgagtatgctgaagagctcatccacgatgagtgtcacatagttaggcgactcgattgtcgccgagac

SEQ ID NO: 98673 - DNA, 402 bp, Zea Mays
cttgattccaattgtttcatttcagaattgagtgttctgtcctgatgtttaatttgagtgttatgtaaagttctgctctggcatctggcaataatgcctgtcaatgatgcctggtaggaatactgcttatattaaaaaaatgacatggaaagtcaggagtgtaaactgcagcctcaaagaggaacacatgattcaaaaacttttattaagttactatgaaatgaaaatttcaggttgttatgggtcttagttaattccaacgaacacatggagtcttcactcttagcacttcctattattttctttcattgtagcaggtatagctgctagtagaatcatactggacaaaactggtgattgcactcaaataattaaaacaagttttcgcccattccattttgg

SEQ ID NO: 98674 - DNA, 620 bp, Zea Mays
agaaaaagaggaaaattgctgcttcggtgaccctagctgagcctgtgctgaagagtaaaaaggtgaaggttctgacccaccggccgcgttatattgaaccggccgtagtggctgaatttggcgcagggtcctcctcagtagccgaagcaacagaaactgcttcgattgcacagagcactaaagaggtgatcgtaacgccgaagatacccatagccgagtcagtcgaggctaaggttgataaggttgaaaaggcaaaagttgaagaaataataaaggtgccaaaaattctgagccctccgatggaggcaaaactgccgaaggtgctgaaaacttctgcagcaactcccaagaggaggaggatggccaacgtgctagatgttgtgctagaaactacgaagatcttgagccctactactgcaaataaagttgccaaagctacaaaaacgcaggccgaagcaaaaaccgggcaagcagaaatcgaaactgcacaaattcaaattgaatcagaagctgggccttcaatgcccatcgagacggagcttgctgctcctgaggaaaaaatgacagagtagattgcacctgagaaaatcgaagttgctgctcccgaagcttcaaacaaa

SEQ ID NO: 98675 - DNA, 403 bp, Zea Mays
taggccctttgcaaccccttcccataccatcttggaaatgggaggacatttgcatggactttatagtgggattacccaatacatccaggcaccatgattctatttgggttattgtggacagattgacaaagactgcacatttcttaccagtgcgcaccacccacaggacagagaaatatgcagagatctacattgatcaaataattcgtctgcatgggataccaaagactatagtctcggacagaggagcaccattcgtggcacgattttgggaacaattgcaagaatcacttgggacccatgtcatccgaagctcagcataccacccccaaacagatggccagacagaaaggataaatcagattttggaagacatgttgcgagcatgtgcactacactatgg

SEQ ID NO: 98676 - DNA, 609 bp, Zea Mays
gaaatgggagcgggagggggaatagtggaagctggagtggtggaggtggtgggtatagcgaaagtagaggatggctcaggagcaacatgagtaggtgaagtgggaggtggagtagaaatagtggtggaaggtgtggagggagtaatggagcgaggtcgagatgcgaggcgacgaactctataggctatctgatcagaagggatctgcagctgtcctccctgctcagcctgctctactgctgctaccgctgcaagtgctgcatgagcggctctgtccatacgacgcttcttcctgccctcctgctgctcaaggtaaaccgtcttccccttgacctgcctgaatgggcgaagagggtcctcgtcgtctcctccccttgatgctgaaacattcttcgtccgcaccatcctgacctgactgttgcacgatagagtgaaaagctaagctgaggtagagagcagtcgataggatctcaaatgaagtgatagctacctagaaatttcacgagagagagaagatccaggcaggacaggagacgggtacacggacaggcgagatcactgaaatgacagaagaggtgagcacgtattagtcacatagtcataagtatat

SEQ ID NO: 98677 - DNA, 527 bp, Zea Mays
aaatttatcaccttgaataaccaaaatttttacaatgttcaccatttatgttgactattctttttttcaaaactaattgactctccaacatgcattcaaggctacctttggcttgatggttgctctcaataagctcaggcctgagagcttgtcaggaatgaagctcgctattcctacttgttgtccttttcattttgttttattgtttttctccctacccgttaaaattgagctccatatgcgtagaggtgtaaactgagctcccaacagttaaggtgtttgttgtgtccagctgcttgttgtgcagatttgcctgacgattttttagccaacagttaaggaccaattggatgatgatttttgctgtgcagatttgcctctcgagacagtgttaacttttataaattgatttggtatattaatcaagatgcaatttcgtggcacgactacaaatcaatagtatttccatttgaggcaacgagtcgtagtcttcagtccccagtattttctctgaacttctattgtta

SEQ ID NO: 98678 - DNA, 1343 bp, Zea Mays
ttttcggcttgggcttcagccagtgaaccttccatagaatgaatgacgaagtctttcttttccaaggcagcttcgtgatctttaactttgatttcaaggtcttgaataacgaagtcctttttcttcagagcaacttcgtaattttcgattttgttttctagatctttgatggtagctttgtttttctcctcttcaatatcttgttgcattctcagcactttacttagtagtatactctaccaaaacaaccttcgttagaaaacatattaattcaaaaaacaatataaagttgagtttttaccttgaaattagcatagagcaagctaccggcaatatgctgtcgctggtacctgtagaggtccgcttctatcttcggcaggccaacgctttttgagaaagtcctaacaaccttggcctcggttcgattctgaaggcaccttagtttcccttcattgacaccaccaaatagcagagaccctggtttgtatccgcaggatatagcatatttctttagctcttcttttttagtgtctgttaactcttgtccaagtatatcttgaaaattaaaattttcttcttccaaagtgtcttcaattttctcttttcctttttcaattgtcgtgttcaccgcaaccgcagcagcttcttctttagccattctcagaagtatattgtcaatatcaccaagtgtggtctctagattaggatcttcggtggtctcggtttcggctccggtggcttcggcttcagtggtggctccggtagcttcggctccggttgtttcggctctggtgtctgtggttttggtagtgacaatttttgacgccgatgtcggtggcggtgtctgatgaatgacatcggccacttggataattcttcgttttttcggctttgcggaacttttgtaatacccaaattataagacttataaaagagttggtctccttatgtgatttgccatctactccttgagacatgtgactaaatctaattaaaagataataattctttactaaaaacaaaaaaaagaaaagctatgcatcatgttggagttttgtttatgcattgattaaatataatggtgacactaataaaaaaatacatagtaatgatttgagatttatcccaaaggcacaatttatagaattggaaataagaaagaaagagagaaatattatacaacacaaaataaagttaaaaataaataaattcatcacacttttaggtgtgttgaaattgtactgttaatttctgagagtgaatttgccacaagttgaaatttaatttgaattggaatttgaatttggaaatagaaatgaacaaaagaaaaagaaaagagattt

SEQ ID NO: 98679 - DNA, 475 bp, Zea Mays
cattagctatctacacgtcatcgagcgcacaacatcaacaccactggaaggacgacgattactacctataattaaccaacgcaaacacgacatcacacgtacaagcatttaccacattcactttaatcatttattagttactctattatttaaactacttaggcacacgtacattcactgtgacttctaaacgtcatacaaacaaacttagtttaatagggagtaatcacttaatcgggttctgccaacattcttaatattctaatgcaagcacacacctaagagaacacgtagaaggtgttagcctaatcacaatgccttttatactagtctaatgaggttggttatttagtaatattagattagtagcgcaagtattagaaatggtaacatatcgttaattgtgtttcttgtccatataatgacacttgccaaattaacgttgatggaaggtaattacttacaagacgtcaac

SEQ ID NO: 98680 - DNA, 910 bp, Zea Mays
gcagtgtgccagtgtcacatcctactgtaccaagtttgttctgttctgcgctgttagtgcactgccggctaatagcgatacacttaagcttgtcattgtaccttgcaatctattcacactctctgaaatttctccctttacacattttccagtgacttagtaatttcatgttgcttagtggttcctaactttggtaacccttttaactgacaggcaggactattcccattgctcagatatggctgttcgaggaagcagtgctttcaagctacgtttctatcccaacttagaagtacaaaatattgcacaagaatgggttaaagagagccggaggctgttctatctaagaactgccaacaatgtcacaaataacatctataagggaaacactcctctatggactggaatggtacaaaatgaactctctgaagattgcaggggtttgaactacacttatttgaataatttgagggaacgcgtatcgtccaaatcaattgtaaatagacatggtaataaccgagaactgatcgggcatagtacgataaatcagcatgtgaaatcagtgccagctccagtacgtgttgttaatgatagtgtcaagtgtttcagcatgcctagagcctctaaggtggagattccttggcctgcctattcaccagcggaggatcctttgcttgataaatctaatacagaggtaattttggagcttgaggataaagttcatgatggtgatgacaaaaagaaaaaaactgttgtaaaaaaggtggtttcacctttcccaactaaagcggccttctctgaggaatctttgaaagcacgggaggcacttgctagcatctacgacaaagttttggtagttgacgatatcgagtcagctaggaacattgttaaactgctcactacaaagtac

SEQ ID NO: 98681 - DNA, 282 bp, Zea Mays
agcctacaggatatggccactgatagacagctgggaaatgccgaaagaaaccatcactaaccctagcgaaggcggcctggttcgattgaaatacaccttcaggtttggagaccagtttgtcgaaccagatgatgactggctgaagtgtgttgaaaatactagcaatgagttacttggagcatattccaagtccaaagataatgcactatctgcggccttcaggagccaaaaaagaaaagattaaatagagtttttgatgctattggatttgtgtaccctgac

SEQ ID NO: 98682 - DNA, 361 bp, Zea Mays
tcatattgtgcataataatacatgcagtgatgatttctgcaagacgattccgatcccagccataagcgggtcctcggagcactccccaacgtgtttgtaaaacaccaaacacattcaatatctttacaacaactttcatgcatctccgtgaagtgtatgttctcctcctcccatggccgtttaatggctttgaaaatgttagccagtttgggtaaatgtcgtcagctagatagtaccaaatctataagcgtttctgttaactgtgtattgaacagggggcatccgatcgattgtaaatgggtcaaaaacaggggatctgtgaaggacattgatatcgttgtttgttcctggcattccaaag

SEQ ID NO: 98683 - DNA, 663 bp, Zea Mays
cttggaagcacgcagttccttgatgatggaatccttggtcgatagcagctgtccgagtcgtagaacctcatcttgggatacttgcagctcgcgacgatgatgatccaggtctgccacagtgaagtggtggctcctttccaaaatagtcaaggagttactggcatcatggtataatctgtctagattgtcacgagagaccgtgagtgctcgtttctcctcctacaagcaagaagcaacaatcagcatccagtcaacaataagcatggcaaagtcaaccaaggaagtttacctcatgcgccgtcctttcaaagtcaagctcagacttgagggaggaattcaaagaacggtcgacatgcaaagaagcagaggtttgggccaagtcggcttgactttgagaatacttctcctcgaggtcagagcaccgttgggtcaactcggcccgacttcgagaatacttttcctcaaggtcagagcaccgttgggccatatccgacaacgcagctgaaagggatgcatgactaagaacaaggtgatcaataaaaacaattagggaagttgtaagatcacaaaccagcgttggacgcctttaggtcatcaatctgtttctggagtagcaatggattccattgcatcagaaacagagcttgttcgggaatagtggcg

SEQ ID NO: 98684 - DNA, 883 bp, Zea Mays
caaacatataactccaacatgatgcatatttttttatcattgttttaattcatctctaaattttatgtatgctctttttatgatgcaaatatggcacatgacatgaggagacctctctatattctttgtatacaaaattgagtattacaggctccatacgacgtagggcaactcccttatccactttcctgcgaacttttcatttttatcgaagacttttttcctgagtgcctctaatatcatcccgttagctctttcaacctgcccgttggctcttgggtgtgccaccaaagcatatttgatctgaatgcttttttgttcgcagaaatcaaagaactctgaacttgtgaagttggatcataggtcagttatgatactatttggtattccgaatctgaatattatgtcttgtatgaattccacggccttagctgaagttaaagaagcaatgggtttgaactctatccatttagtgaatttgtcgattgctaccagtatatgagtgtatcctccttgagctttcttgaaaggtccaatcatatccagtccccagcatgcgaacggccaagttactggtatggtctgcagttgctgcgctggtagatgttgttgttttgacaagtactggcaagcttcgcacctttgaactaactcggctgcatcactttttgctgttggccaatagaatcccgacctgaagactttcccgactagtgtcttggatgctgcgtgtattccacattgcccaccatggacctcatccagaagttacttcccagtagatgggagaatgcatttcatgaggacgcccgatgcgctccttctgtatagtgtttccccaatgagtgtgtagtgagctgactgtctagcgatgcgctcggct

SEQ ID NO: 98685 - DNA, 887 bp, Zea Mays
tcgagcttctggacgagagcgtggagctcctcctcgtgggaaaggatgtgtgcatgacattggttttgttactcttcttcttggttgggattccttgtctccctcgccattatcatttcgtggcaacgccaccgcgtaacaagctcttcttattgcctcgtcgaagtccgagttgggctccatcgaggcaaggctcaaatcatcctcgagcatgtcgaggatggatgctagcttatggtcgatgacagccactaagattgatggcaagactcctcacgcctgcttccttgtgacaacagcgtgctggttgaggcgtcgcttaagggcggtagtgcacctcttgaggcgtcgcttctttgccttgctcttggtggaatgcatgggtcatgtgcctacaacgataggtatgtcagggcaggaaagttggagttcgctcgtggcggtggtgaggaagtcgagggagccaaacatgatgggctcctaggagtgaaagtctcgcctccagtgaatgctgaagaattggccatcagagtggaggatgtctactagtgtgctagcagccccctacatggcgcgccaactatcgtggtttcggaaattgaggacaatgagatttgtgtttggtggggatgctagcgcagattcactccgattggcgagtcgctgagactcgaatgtggggttgagacagagggtttatactggttcaagctcgcgccctagtctagtgtagtgttgatcgtagtattgctttggggcatgttacaaccgatgtgcttgtgtgaagattgaaggggtcctgcccttttatagctcatggtttgttgcccttgggcggtgtagtcctcctgtcgttgtctgtagggttgtgtgtagttgtactctcg

SEQ ID NO: 98686 - DNA, 464 bp, Zea Mays
ctgaatctccatcatcaccaccacattccccctccaagagtatatgctactcaaggtctgccatatctgtgaagcagtgcgcatagcttccaccctcttgctaacagtgggagacatagatgccaataaccatgccactatcatagagtttgttgtatgccaagttctccattcagtgccaagcttatcaaccggctcaacacaggtctcctccaagtagtgctccactaccttgcctcctaagaggacgcacactctcctcgaccagctcaagtaatttttgatgccctctagcttcacatcgttcggcacaagttctaactttaactcagatgggtttgtattggccttggcaccaatcaaccccaaccccataagctcctggatcataatcctcatctcactcatcatctcactctttgtaatcccacctgaaccaccaccaattgttaccttcgttgcag

SEQ ID NO: 98687 - DNA, 528 bp, Zea Mays
ggatgtggataatgcattatcttcggctttggaatacgagccaagcaattcatcacttgtaacttcgatacatttcagccagtcgtcatttggttcatcaaatttatctccatatatgaatgtatacttcagtcgaaccaggtcaccttcgccagactcggtgacagtctccttcagcatctcccagttctctacaagcggccatactctgaatgctatatgttcttgaattaagtctcttgtaccaatgaagaagcatacagtaccaaaggccttctgcatgcttcggcgacttcatcgatttcaaccatcggctttcgaaggccgaagcaggaccatatgggacgcataataacatccttaacatcctccctcgctaccaagtcgttcttcacataaaaccattcctccatccaatttcccggccacctctttcgaaatcttggcactgggtgacttgcgttgggatgggcaataaacccgtaacaaccgaagttgttgtgatactgttccttccccatggccttt

SEQ ID NO: 98688 - DNA, 533 bp, Zea Mays
gtcgaagaccgtcaatgcgatcttttttcgacgtagatttttgcggggcattttttgcttgtatattacatggctccgcctcgttaaaaacctcacccccgggaggaaaagagtgcgggccagaataaaattgttttgcgaattacaagggcgagctggccctgaggagtcaaacaaaaaatttgcggagattatcaatgttccaggaatgctccaagtcctcatcggatggcgttgcgagcctgtacacgttgggggacgccttcgtcttgacgatgaaagggccctcccacttgggctccagcttgccccgggactctgtccgagctgtccggacgagtacgaggtctccttcgctgaattccctcgggatgactgtgtggtcacgacatgcttttgtttgggcttggtatttgtttagagcctgtagggcgaagacgcggtctccatcgatgaggtccttcgaagtgggctcgtccacatcggggacagctgacgggactgttcgtggggacccatgttttatttcttgc

SEQ ID NO: 98689 - DNA, 624 bp, Zea Mays
tggcgaagcatagcgttggcgagatgtcgtgaagtggtaggcgccatcggatggggctagagcgaacccatcttcgggtagatcggggtggccaacacgatttgttgtcctcgtcgtttgggatgagtattggtgaggggggtctgcagaatctgtttgagggtgaggaattgaaaatgatgttgtttaattatcgggaggcgggcattatcccgaaggctgagccgatgtagagtgtgtgatgcctcacttgtcgtgcggtagtaagtgaaaacgctaccctcccccggctcgcaataaagagggaggggagagcgcgattgtatttatttgtgcggtggggctggtgggccttcgctgtgtgtgtgtaacttgtgacttgtattgtaatgtgccctgttacccttcgcttgccggtgcgatgttgttgaatgagatggggaatctatttgttgtgactgtctggctgcacccttaggcgacttttgcatggatttgtctttttggaaaagacttcgtatcatgtacttgttgtgcttgtccggctgcacccttaggtgacttttgcacggatttgtcttttagtaaagacttcgtattgtgcacttgttgtgcttgttcggc

SEQ ID NO: 98690 - DNA, 516 bp, Zea Mays
gacattggtggtggcgcctctcccggaagctggtagaaccttggatattcagaggcctgtcagtgttcgcccgaaacgcccttgccgagccaatcaacttgattctcctgctaatgagcagaaaaagaaaaagagacgtcttcggcgagtatctagcttggatcgggatgctggtccttcggttcctgctgttgaggaagtgcttgtgcctgaatttaccgatgctgaccccaatgggtgtgatccatctattgctgatcccaataggtgtgatccatctgtcgctgatcccaatgggtgtgctgtctgtgttgctgatgaaaacgagggggaggaagaagatgaggtccctttgactcggaagaacagtcgacgatacgtagccagtggggaaagtagtggagttccttctcctgctctgtctgccctcattggtctacaagaattgtctctggcgaactttgatcagactcttaaagatatggttccagaggatctgttatcagagccagcgga

SEQ ID NO: 98691 - DNA, 568 bp, Zea Mays
cagcaaccaaccttgggccaagagccaacaacaacagaaccaccaatagtaagtccacaatataactaattatcaatagcatggaaaaggcccccctcgcacacaagaaaatccctagcaaccataaaggagatcaaggtctagcagaggtgacgactgtggcaagggctctggccaagagcaaaagctatattgcatcatccatggcaaagacatcgggcactaaattaaatattgccctgtcacaagggataccaaggagataatgtcaaggtcgatcccagatcaactagcaaaggctatagcacatacctatcaaccacaaggcccacctactaccaaaatgttcaaccccctacccgcattatcccttaactaacacccaaagctacaccatgaagaaagactgcaaccccctccaccaccacaaaacatacccccacccactagctccctccaccaccacctaagggcgacgacaatttcctccaaccacttgtccacgacatcataaatatgacatctggtggctccagtgttgacttcgagaagaaaaggaaaagaaaat

SEQ ID NO: 98692 - DNA, 859 bp, Zea Mays
tatggaaaattaggaatctagcaaaattggtcctacatttttaggatttttctacaattttctagaattgttttagctctggctggaaaagaaaaagaaaaggaatgaacagtcttgggccaaatctagccgagacggcccaatcccgggtggaaacgcgcgcgcccgcgcccgcgctggcagacttgcacagagacccctgtctttttgaataccctgaaagagtccaaggcactattcccggcagtcactaacacttacaaataaatccttacacttctctcctttcacaacctgaagtccccgacgtcgagcggcgttgtgcagagctccgtcgagcccgtataccggccgactcacgctgtgactggcgccatacttcgaccgagaccgaattcaaggtctaatgagtgtttccccccacttaatttcaccaatggctacctagtttgctctgtccacggtgaccgtggacatcgcggatagctgaacacgttcccggtgattaagggggttctagttcaattggacgggtcgatgagcatcaagggtacataagaacgctcaaacgagggagcagaaggtatgagcatacctgaatcgagctggccgcggtgaggctaaaccgagcggggttcttgagcgttttggggagaatccaaaattggagttcactggtgatcgattgagagcaatacttggtggctgggtgcgtaatgatcctacggagctcacggtggcctcaatttataataggcaagagcggtggccgggaattcgagcgacgacacgcggcggttggagaaagagagcactggcgtagtggattggtgtcctattaccgtggcaatctctctgg

SEQ ID NO: 98693 - DNA, 703 bp, Zea Mays
ctccggtacatgcctatcactccacggcttaagcgtctctttctaaatcaagagacaacaaagcaaatgaggtggcataaggaaggggatcgccagggtcaagatccggatgtcatggtgcatccctcagatggcgaggcctggcaggctctcaaccgttttgatctagaatttgcaagagaccctaggtgtgttcgtcttggtttgtcgacggacggattcactccttactccaataattccacttcttactcatgttggccagtttttatgatgccctacaatctccctgctaacaaatgcatgaaagaagaggtcatgtttattgcccttattgttccaggttcgaaggatcatctaacgaaaatcaatgtatttatggaaccattgatcgaagaactaaaaatgttgtggcagggggttgaggcatatgatagtcatctgaaatgtcgttttactctacgcgcaacatatctatggtcaattcatgatctgctagcatatgacattttttctggttggtgtgtccacggcatactgcgttgtccaatatgtatgggtgactcacaagcatataggttagaacatggtaagaaggaaacatttttggatgttcaccgatgcctccttccctataatcatccttttagaaaggatacaaagtcatttcgaaaaggcaagagggttagagatgggccaccga

SEQ ID NO: 98694 - DNA, 343 bp, Zea Mays
gcggcatggtgcaagtggtccaaataatacagctacataacatatatatatcatgagagtaatatgcaaatgaacgtaaacacataatatatgtatgtattttcagattgcaattgattaatctaataaaagatttgccaaattaagtatgaaacttacaagaacaacgatggaacagccatatatcgtcgtcgacacattattagtgctcctattgtgccatttttgggcagcttcacataggtcactaaaaatgagatggcaccaatcaatttgagggaaccgctccaattcttctgtaagtagaacctcattgtaagatatcgaccaggtagctgttggg

SEQ ID NO: 98695 - DNA, 423 bp, Zea Mays
ctcttcagttggcttgagagacgaatattttctagtgcaaaacgagttacttctggatttttatcaactctttccctaagaagttcaacttcttgtgataaggttttgttttcctccagtagatatgattgtgctggcaatttactgttcacaagaacctccattctatgaatcttatcatcccgaaacttaagcatcatcttagccgatcttgtgtcatcctctctttgtcgaacctttgaacacatcataaaacaataattatgccgtcttacaatttgttatcggttggtaatgcaaaacatatttttttccaccagaaattaccaattcattcaactgctcaatttgaagttcaagttcctttatagtattttctgcagttgattctctccgtaatgctccggcaagtgcttcttccag

SEQ ID NO: 98696 - DNA, 465 bp, Zea Mays
gtggttaattatcttgcaactagtttacgtgggcctgcaagtcatcaccactgttgtcattttatttgacttttcgagattacaatgaatagttatgcatttcaaaaggaaaggtacagtagttcatttaatttgatacaataactgagatcgaaagatgtcagagcaattttatgcagtttactacgccggttcgtggtctctaaacttgtttggacgtgtcatccatgtccccaaattcttaaaacaaacttttagagaccctaaacctgtacagatccccaaactctcgtaaccaattttttaggttctaaacgtgttcctgggcatacaggtccaaacggatccaaacccgtgccatgagtctacatggcgctactgatgtagataacggatgctatggcatatccaataggaactagactttttgttgatgttaagcttcttttggcaatttgactcccg

SEQ ID NO: 98697 - DNA, 524 bp, Zea Mays
tctgtcactagctccgtgtctcccctgaagcaaagtttgtgattatttccttttgtttcttctctttgtgtcctcttaatttgtgtgttaaccttgtgtgtttctatggactggtctattaaattttgtttttatatgcaggtatggcttagagccttagactatacctaaccataatgactcctccacccactggaactatgtatcatccgttatatatatgtcaaaagtagatagcgacatcatccaccatttcatcagggatttgacgtgtgatctccgaccctaacggccaaagtagacagacaggtggatcaaattggggaaaaaaaattgtgtgcagccgggatgtaaatccatagcgctacagtccatccctagatgatggcacctgtgcgcttacgacgatccacgactgagaaagaaagcagccaatgcgcgaatcagctcggtgacattcgactctggctacgagcagctagctacacctcggcatcaaagaaacagacgcacccagaacccca

SEQ ID NO: 98698 - DNA, 576 bp, Zea Mays
atggaattaacccagttaggctcagacaaagtgtgtccaacatcccgggctcaaaagtagcaacaaaagctaagtggtcaaagtgggacaactgctgataactggagagagtgactcgctcatcaatcataccaatcatctgttgaggagggtgatcacactgaacatgccgcggagccgtcctcgaagaggtagcctccccttcaatagtaacctcaactcctccagtctcaacaggagctaactcgagcgaaccctaagtagtggaagtagggggatcaggtttgtcaaccgaagtagtggaagaaggcatgactcaggcagccagtggagtcagctcgggatcaccccaatcggcgttgtcatgctcctccacaaagatggtctattccatctgatctggacctacaggctcaaggacagaggatgaacaaggtgcagcctcatcgaatgtaacctcataagtctccatgatgcggttagtctccaagttaagaacacgataagcacgagagtgtaatgcataacccaggaaaaccccatgagaagaccatgactcaaacttgtccaaattgc

SEQ ID NO: 98699 - DNA, 812 bp, Zea Mays
cgtgaagtcgtccgagagataaccactccaagccaaagacgcccaaatgtacagccggacaagctcaacatacgttcacaccacctaaaggtgcgaagtcgtacaacagatgcccatcatctaaacacaaagtcacttacgactacagtcagatcagaatgcaacacatctttaataatctaagggcatgaacaacgaagggcacaacttatttcaaatacaagaaaaacaataagcacaaagtgaccattcaaatacaagatattccgttctgcgcacaagttcccatagttgtcctttggcgaagggggcgagggcagtgtttacacttgaattcacaaaagaacgaccatgtcaacaccgacacattacattggctctgccttcaggataaggccagcctcccagaaattgaacaacatcagtttaatctcctcgccatcaaaaagagcccatagatctccctcttcgaaacattgctcggtcgtcggagcagggatgatccggcaagtcccctcctccgaccgcattctttctcgtggacgagacctctccattccgatatgacgacgccttcgagggacttcaatgccttgcgaagggtcgccaatcattcccacactctgtttccaaactccgatccttctcttgccccgtggtgtagtgggggcaaccctagacaaagactccaccgcggcgggggcaaccctaggcgaagactctgcaacagacaaatctagcgccaaaaaataatctaagtcatcctccaaagagtcatcgttcatcctagcaaatgggctcatcaactcttc

SEQ ID NO: 98700 - DNA, 584 bp, Zea Mays
ttcttattaactccatcatcagttttatttgattctggagcatctcactcctaagtaacaaagtcattcgtggaaaaacataatataccaaactatcccttgaagaagaaactattaattcgatcacgaggaggtgaacttagagccactcactcatgccctcagactaagatcaaaattagaggcctaagctttctagtagagctgataattttggaatcaagtggaatcgatgtgatacttggaatagactacttgaccaagtatgatggagtaatatcctgtgccaaaaggatggttacattaaccagtccgcaaggagaaagaattgaggtcaatgtcagtatgccagcaacagtagaagcaatggtaaatcagttggaagagaaatctttggagcacatcagaatagtgtatgaatacccaggcgtatttccggaagaattaccaggtatggcacctgatcgtgatatagagttttctattgaactattacccggaaccgcaccaatttcaaaaagagcttaccaaatggatgtcaaagatttaatcgaactgaagaaacaaatagaagaattactaga

SEQ ID NO: 98701 - DNA, 370 bp, Zea Mays
tgtacatatgtaactatagtttgtatggtgaggctgtgcgccatcgcgcttccggctatgttcagaaaggcattgcgcacttggtctagtacgtttattatgttggtccggctgcgcctgtagtcggtctttgcgcggacagtttggcgtagggttttgcacgggtagtcttttgaggaagacttcgatttttcgcacttgttgtgctagtccggctgcacccttaggcgacttttgcacggatagtctttttgaggaagacttcgattttccgcacttgttgtgctagtccggttgcacccttaggcgacttttgcacggatagtctttttgaggaagacttcgatttttcgcacttgttgtgctagtc

SEQ ID NO: 98702 - DNA, 857 bp, Zea Mays
gtactttcacagtacgtactctgtattgttatgaacttagctaggcgatttaattttttagtttaattcataaattcctcagcgaatataggtgcctgtaagttgctatatatggtttccatataccatatagatataatttgtttcggtgggatagttgttcaaacacgttccaaacaattacaatgattcatgtttcatttgagctagctgttgtgtccaatttcaaaacgtctaccatgtaaccgacataaatgtattttgtatgccaagtgataaaccaaaattctaatccagtgtcgtctcatgtgaggtggctaggacggcaccaaacactagctgtcgccacccccttattcttcccctctccatcttgccgcatcagagtaagcatccaaaattcccgagcggcttgcgaggatggtggcggcggagtcctcgtgtgccctaggacggtgtagcttgacccaagcatggctcgacccgttatccaccaggctcataccgaccccgctcgatcgccgtgtcgtgtctaggccttaggttgttgcatggtggatactaggcctccgttgtccactggactcgatcatcatgtcgtgtctgcgccttatgtacgacacatcaggctacatctagcacgaacaggttttgtttttttctctttttcataaaaaacttactaatatatataaactaggggtttcgtcgtgtgtcggccccctttcccagggttccccacacaccgcgaaatataaaaaaaagtgtagctacgagaattcaaaccatgatctctagcaagagaacactcacatctaaccactgtaactcatgttggtttgtgttgtataaagaaa

SEQ ID NO: 98703 - DNA, 859 bp, Zea Mays
gttccgccgcccactttgctattctggcaaatgcctccggatttctgagtaactctccaagacccctgttggaagtgactcgtactttatatgcctcgaaatagtgtcttagcatacgtgaagccatgatgactgtgtatgctattttctcaagctcagtcatgttgcactttgagcttgtgaggactttggagacaaagtatattgggcattggtgaaccttgtcgtccctttgccttttcttggactaataacgtgctgactacgctgggcgagggtgcaatgtaaagtaggagggggagcgtcgggtctagacttgttaatgttgccaggtcagatagataatgttttagagactcgaatgaagctgcttgttctgggccccagacaaagtctttcccgccgcataatgttttaagaaaagggaggcttcactcggtggaccttgagataaatttgttccgtgctgccagcctgcctcttaaccgttggatgtccttggtggattgcggcggtgccatatacatgatggcttggattttatttggattggtttcgattcctctgtttgacacgaggtaaccgaggatttttccttgtcgtaccccgaagatgcacttctctaggtttagtcggagtctttcttcacgcatgctggcgaatgtttctgcgaggtctgaaaggtgatcttccttgcttttgctcgcaacgacgatatcatcgacataagtgaagatattgtggcccattcggttttcgagaaccttcttggtgaggtgggagaatgtcgagccgacatttttgagtccttcgagcatccatacgaagcggtacgtggcgaaggaggtaatgaaactgg

SEQ ID NO: 98704 - DNA, 526 bp, Zea Mays
ggcgagaaaggcacgctccttgatctttgccttctgaaggtacttcttcttgagcgactccttgttgaatcctcccttggacttgtacttgccggaggtgtacttgccccttgcaccgaccaaagtgatgattgcgtgggccgcactccgctttgcccttcttggggcagctggcattgaagtggttaggatcgccatagttgtagcatccgtccttggacccgccaatgtcgtcggctcatacggttattgtggaaccacgtgaaccggctggccacaagtgctagctcctcatccccaaggctctccacctactcctctgtaatagacaacaaagaagggagagcaaacatagcaggtgaggagtttagaagcggaccacctccagagactagggccatggtgggtgcaccagggttctcaatctttggcccgagtctggtggtcaatctctgtggacttgagcttgctgaagagctcatccacggtgagagtctcatagttggacgactcgatgatcgccgag

SEQ ID NO: 98705 - DNA, 566 bp, Zea Mays
gggtgccggggatcttcctagtgcgagtactgagtataggcggcgaagggtggtgttgaaacacagtgtgggtgagttttcgcgaagtggtaggcgccgtcgtatggggatggagcgtggccgtctccgagtagaccgggttagtaaacgagaattgttgtcctcgccgattggggcgagcataggtgagggggatctgcgaaatctttttgagggtgaggaattgaggataatgttgttcaattacagggagatgagtatcatcccgaaggctgagccaatgtaatgtatgatgccctcgccgtgtgtatgtaactgtaatttgtattgtaatgtggcatgttggtcgtatttgcacgcctgtgctgatccggctgcacccgtgggcgacttttgtgcggagtatagattgacgtacttgtgctgttccggcggcacccttagacgacttttgcacggtgtgtctttttaataaaagacttcgattaacgcactttgttgtgctattccggctgcacccttaggcgacttttgcgcgcagtgtctttttgataaaagacttcgat

SEQ ID NO: 98706 - DNA, 350 bp, Zea Mays
aggcctaccactcccttctatagaccacgggatgacagggttacaagtgacaagtggagctgatcctaataatctgtcccatcctgcattaatggaagccctatcgatgttagtttgaagttttgtatgaattttagtggcgttgtaagtgcatgccctacctgtaccggatatcatgggcgtcgtgcggacatgtggcctattgctaaaaatttggagcgtgagaggaggagcaagatctccatgatgctacaaaagatgtgggaaggcacgacgcacatcttggattatcgtggtcatagacaccatggcagatgaagagggtgatctggaacgtaacagccatagca

SEQ ID NO: 98707 - DNA, 277 bp, Zea Mays
caatgtctcagctatggaaggaaaaatcacgtcactgccatagaaggaaacacataccctcgccgctatccacgcctcgcagcaatccagcacgcaggaatcccatcgtcgacgacgcgcaggaccaccccgcccaatcgttcttcccatgcaccgcggatgccccgcccatatcctccacgccccaaacgcaatccacgtctcgccgccatggaaggaatcgcaacccaatcccctcatcgccatccagcgcacaggaccaccatcggcccgcatc

SEQ ID NO: 98708 - DNA, 429 bp, Zea Mays
ctggtctcacttcggcctcctaaggtctaaggtggaaattgatggcaatgttgaatcatgtttgaaggccttcagcactgtgtgtgccttcattggcacgagggatttgattcaagagcatatagccttcaggatatggcctcttgtggagagctgggatatgccgaaagaaaacactgtcgattccagtgagggtggcctggtccgattgaagtataccttcagatttagggagaagtttgatgagccacacgatgattggctgaagtgtatcgaagctaccagtgatgagctacttggggcatactccaaggccgaagataatgctttgtccacagctttcgggggacgaggcaagaaaagattgaatagggtatttgatgatattgtcttcgtataccctgattatcactacccgatgcgagggca

SEQ ID NO: 98709 - DNA, 423 bp, Zea Mays
gaccatccagtttggatggccaggatgcatgcattggaagggaagcagctgcttgaggacgaccccatagtcgtgtacctcactgcatacctgctcaccctggatgcccagtatgatttcttggctcggcaccactgtcagatgattgctcgagcagaagatgcagagaagcacaaccgtcagctccatgtggatctcaccaaagctcaagcccgtgcaactgcattggaaagtcgtgaagtcattgcggttgaagccttgaagcaagccaaggatgagcacgtccagaagctgatagaggccttcttggtaacccataaccaacgtagagccctgcggatccaagagcccgctccatccaacccagtccaacccatgagagatgaagatccccagattcttgaaggtcacccggtctctatc

SEQ ID NO: 98710 - DNA, 405 bp, Zea Mays
gggagggtagccgccgaaaataactaagtcggcgactagggagttggtcgccaaaattacacactttttcggtggctatctgtatggacaccataaattaggtcatccgccgaaaatgcttggttttcctacagtgataccactgagtacctatgccttatcgactgcctccagcactcagtgcatacccgatcaaacatcacctttgttgtcggctatgttagacggtcatggagaactccaccactgagcacctcaacatggtatcagggacatgattgtctacgactactctacaagtgcaacaagaaagacttgaagttgctcgggtacagtgacgctgacatgggcagcgacgttgatacaaggaagagcaccattgatatgcgattcttccttgactcc

SEQ ID NO: 98711 - DNA, 677 bp, Zea Mays
caaagagcgaggccatcgaagcctacacccatgtcgtgtcgatccaaaacgcctatgatgccctggttgtaacagcgaggagggatgcatagtcagtgatccttgcacaccttgagagcgtgaatgcgagctcccacctctgtatctcggagcaaggaaaataagttgccaaggcctgagtcgtggtcctggaggtggagctgggcagtcgaaccaaggaggagaagctcctagcctctctacaaggtaacatctatagttagtctcttctaaagccatacatttgttgcctgctttctccctttcatggcctatgtcttcccgggttagccatacaagtgaaattcgatgctgttgaagagaacttcgttgaagtgcaaagtagcctagaggagctggagaaggaaaggctcctcctattggaggtggtgagtgccatgcatgggcgcttcagggtgcctccttcatccgggtctgaatcgcttgtctctcgccttgagggcctcacgatctggctccgagagcttgaaaaggaatccttctgccaagggatctgtatggcctttgccatcgcaatgtctcactatgaagggaggatcgagctggaggacctaagcgagggctattgcgttacctagagtgattcagatcttgctggcatggtgaaactgtggagg

SEQ ID NO: 98712 - DNA, 785 bp, Zea Mays
caaggcatgcccaaaagacaagttccccttcccagaatagacaaaattgtttcctcagctgcatggtgcgaagttatgtccttgctagattgttttttgggttaccaccaaatataccttagggaagaagacttaaccaacgccagttttatcacacccttcgatacatagtgcttcatttggatgcccgaaggcttaaagaatgcagggtccactttctctcgcctaactcagcccatattgaagaatcaagtcgtccacaacatattcacctatgtcgacgatatcgtcgtcgcaagaaaaaacaagactgatcacctagcagacctcgtcaaaacatttgccaatatgagagaggatagacttcatctaaatccagataaatgtgtcttcgacattcataagggcaaggtcctagggtacctcgtatcacgaaaaggtattgaagccaatctaaaacaatcaaagccataacagaaacacacctgccacgaaccatcaaagaaatcaaaaagctaacaggtcgcattgcagctcttagcaggttcatctcgaagtcgttgagcacaaccttccttccctaaaaatctcgtgaggtgccaaagactttgtctagggcccagagaaagcagtagccttcgagtccttcaaatcctatctaacagagctcaccaccctctccagcccaactcttttagcagagctgctactgtacctagcagcttcccatagtgcagtaagtgcatccctcattcaagaaaagcagactgagggcaaacttccac

SEQ ID NO: 98713 - DNA, 479 bp, Zea Mays
accgcgtcttcgccctacaggctctaaacaactaccaagcccaaacaaaagcatggcgtgaccacacagtcatcccgagggaattcagtgaaggagacctcgtacttgtccggacagctcggacagagtcccggggcaagctggagcccaagtgggagggccctttcatcgtcaagacgaaggcgtcccccagcgcgtacaggctcgcaacgccatccggcgaggacttggagcattcctggaacattgataacctctgcaaattttttgtttgactcctcagggctagctcgcccttgtaattcgcaaaacaattttattctggcccgcactcttttcctcccggggggtgaggtttttaacgaggcggagccatgtaatatacaagcgaaaaatcccccgcaaaaatctacgtcgaaaaaaagactgcatcgacggtcttcgacattcgaccaatacaaagtcaccgcgaggggcag

SEQ ID NO: 98714 - DNA, 550 bp, Zea Mays
gccggccatggtgaccaccgcgggtggaacgttgtgtgccgccgtgttgatagcttggggtggaagaggggtgagggtcgttggatcctcgatgaagggtgcaggtgtggcgatgggtataaccattggatcagccacggacgctctggatcagtcgagtggataccccttcggatatttgaatcgtgaccattgattgtcgatccagcgcaccttgtagcataccctttcgtgttatattggagaccatcagatctagattgggtggctctgggtccccggtacctcttcgccgttgccgatttgctaaagagcccctgggttttggtgaaaccaacccgcagtccattgtggatgtttactgagtttcgggaacctttgcgtttcaaccctgaactctctgcaaattgcgcgcgtagtccagacaaattataaaatagagaaattcatttagaaaaagatttataatacaaaattaattccaataacttgtttaatccctagaaaattcatttcaactcctttttgatccattctagttcctataatt

SEQ ID NO: 98715 - DNA, 337 bp, Zea Mays
tttgggatattacactctacccccttaaaaagaattcgtcctcgaattcgaccactccaacaaaacatccaaggtaccccatatagcagcaccattcaaaacatgggtccattatttgtcagccatacatcaacatcattgtcttaaaacgacactcttttatgaaggggtaatacgcactaagcacaacctttaccaacttcaacaattcattttaattcaatggtgaaacatccacaccagttgaatgtataagaagatcaaacacctcacctcacagcaccacgaaacaagtagttatattgaaacaaaactcctaatcttcctaaaccttgtt

SEQ ID NO: 98716 - DNA, 847 bp, Zea Mays
gtgtggcactggtgctactcgggttgtgcaacctgcatgctgagtacatgttgcacaacaagactcccatacttgttagcatctgtggcagccacattttcttcttggatttctgcaatgtcagtggcaagcataacatatacggtttctttggaaccactagctgaagaatactcaccattgtcacgaataatcagtgtgcgcttgttggggcattcccgtatcacgtgaccaaatcctttacagcgatggaattgaatatccttggtgcgtccagagaaggaggcaccctttgttgctggagttggtgctggactttttgctatgaccatgccacatggagtgctgctagatgacgctagcgctactggtggtgacacgataacagtcctaagggtagagttggatggcatggtgtgacctacaaaagtgttagcttgtgtcctcgcatgttgtccctggacttcacgtttagctttacaagcaagatggaatacacgagtaatattagtgtactccttataaccaagcacatcctgaatggcgcggtttaaaccacccaaaaagtgtgccatagcagcgtcattgttctcaactaaaccacaacgaagcataccgatttgcagctcctgatagtactcttcaacagagtgtgtgtcttgttttaaacattgtagtttattaagcaaatcgtgagcatagtatgagggaacaaatctagggcgcataaggcttttaaagcatcccaagtggtaggaatgtcagtgggatgtttgttgcaatgttcacaccaccaaatagaagcaaaatgggtaaagtcactagtagcagctctaacttgatggtt

SEQ ID NO: 98717 - DNA, 560 bp, Zea Mays
tgatttggttgggcctctcaaaaaggcacctgggggctacatacatgtcttggtcgcgattgataagttcactaagtgcatcgaagcgtggctaatcgcgaaggtcacctctgggcaggctatgaaattcgtcaccaacattgtccatcgcttcggggtaccgaactcaaacataacaaacatccgtgtcgattgggccgtcgtggcccaccctcgagcaaacatacaagtcaagcaggctaacaaaatgatcatgaaaggcctcaagtctcgggtcttcatccaccttaaacaactcaggcaacaatggccataggcactgaccatagtcctttggagcttgaggacgacctcgaacttcttaacaggttacacaccttactttatggtctatggagccaaggcagttctccccaccgacatcgagtatggcgccctaagggtaaagctacatacaagcaaacaaaacgagtcaaatctaaaggacacgttggatcaactcgacgaggctcgcgacatagactcttacggtcggcgcgataccaataggcattattaag

SEQ ID NO: 98718 - DNA, 505 bp, Zea Mays
atcaatttatttgagatgtggcatacctattgcggtttcagaaatcggggaacaataagatttgtgttcgataggggtgctagcacggactcaatttaaatggagagccacgggggctcgaaaggtggatatgagacaagggttgtactggttcaggcttacgctctagtctagtgtagtgctgatcatagtattgcttggagcatgttacaattgagttcggcctgttgccttgggttgccttagccctcccggcgtaatccgtaggggcgcgcgctgccgtattcttgatgtctacctggtgtttgtgtccatgtatcttgtttgatgccaacgcagcggtacccggcgggtcccgcatagtggcctcacgacgaggttcagggttgtattcagtacaacttcatcttccgtcatgacccttgcgtcacctttcggtgcgcgttggcattcacccggtatggcgtatcgtcccgttctttcaagtattccagttactgtagag

SEQ ID NO: 98719 - DNA, 424 bp, Zea Mays
gatttggttggttggggtttgcaaagtttaaagtggtggattatataatgttatagattataagaggacacaaattaataatatagacaaatagagcttctcatatgtatgtttggtactagccgaactttgtttgttaacacctacgtggggatgagagaaaaaatgtagggctaggatggcaacggagattttccatcggggaatggccccctgtcctcgtccccgcggggataaaattttcctatccccggctccgcgaacgttcacaggtgagatttttatcccatctctgtcaggaaatttatccccacggaaaatccacccgctagaaaatacaatattgagagacaaatttgaattgattatatcaaatcaatataaattgaacaaacgagatttaaaattacaagagaaatctgct

SEQ ID NO: 98720 - DNA, 521 bp, Zea Mays
ttcgggtgcaatcccgcacaaacaaacaaggcctaaatgttttagcagtgcattagcttcatggttttggtatgatcagattttcagtggcccatttgctatcagcggggatcaaataaactacgcatttgtttgcggtatgcattaaagattggatatcctcaatataaactgcaccgccttttttaattgatatatgttaaagtgtggatatcttcaggatgcttcgcagtcagcagttaatgaaactgccaagatcggttgcattatggtcatctggtgtactgttctacaaggcaattcgaaaatttgtgttgatgtccttgcaaaaaaagttgtgttggtggtgcataggataatcggattaatgctgttgttgctacagcaactaagctgtctatggtgcttgctgcttggtttgtctatggtgctttggtttctaatttgtcgaattatgttctgttcaactgctctagagattataattatgtagagcatgaattggtatgatttgccatggc

SEQ ID NO: 98721 - DNA, 341 bp, Zea Mays
tgttaattaattttgagaggtgggaggggaaaatagtaatttgtctctgtctgtcggaactgaacgagaagagcacgaacattcgcgataggggcaaattaacctgctttaagaaaatgattatggtaacataatagcagcagttcacctactaacttaacatgctttaagatactgcatagtgcagaaggttcatgcaacatgcatcgcttccatcaataacttattcaagcataccactacttatttacatctatattactaggagcggcagacacaagacagccgcaaagagtgtcgtcatgccacttcgaatccttcttcgtcgctgttgtcaacaa

SEQ ID NO: 98722 - DNA, 667 bp, Zea Mays
ctggcttcctgttctgatagttagtataaagaagattttagaaatatcagacacaatattccacatgggcacatatgcctgtgtgatgggatttggtttgacagttttactatgtatcagtatcaccgctgatggttgatacatatgtttttgcatgtttcatgtaaaattcgtgtttctgcaatcacgccgaagttcttttaagtttctctgttattttgagttgttagtctctacttctttacaagtcgcaggacatttgagtagaggtccaatttaggcgcagtcacatggtgagaatgtgttggaattactgtaccttaaatttgttctgtttgaaatgccatttttccagtagcaaccataaatatccaagttgtccattgctatggggtttctaggaatataaaaaatggaccttcccaatctctgtggtgaaaataattatgcgtctctggtatatgcatgccaaatacatctgatttcctctgaagcagttcccgaaccaaaacaagaggttcgaagttggcagtaacagtgcccactgagtttctgatcaaaaccaggcatttctgtaacttgtaagtgtttgaactgtttggtaatttgatggaaaaatatatattgccgtgaatgaggtagtatcaatgttcagcttgtgttttcc

SEQ ID NO: 98723 - DNA, 377 bp, Zea Mays
ctcgacaatcagaggagacaagccatcaactttattatataagcaggggcatcattacataagaaggatcggttcattatgaactaatccttacaaaagacccctaccactactaccacccctacactacataatactactatttaagcagtggtgtcttgccaccggtgtcgtggccatcgccgccctcgccgccgatgttgttgctgcccttgctgctgccgacgtcatcgcctttgcctctatcgccatcaccacctttgccattgccattgtcgccattgccgaccttgtcatccttgccgccctcatcgccaccatcatacccttcatcgtcaccctcctcctcctcctcctcgaagtcattcgagtcatca

SEQ ID NO: 98724 - DNA, 357 bp, Zea Mays
tgggttcgtgtcgatgaactgggagcgatgaaggacgaggctggggacttgactgatggaccaaagaagccatgtgactagcaaacaagaactatattatttgggccatgtcattagtctagctggtgtatcaacggacccccaagaggattcaaatcatagcagatgtggccaacatcacacacagtaaaggaactatgtagtttcctagagtatggctagatattaccataactttgttaaagaatttggtctgttatccactgacaaatcttttgagaaaaggggagatatataaggacatctaaaactgaagcctcattttttctcaaactatgctgaagaattacgcatcat

SEQ ID NO: 98725 - DNA, 855 bp, Zea Mays
gaaatccctgaagtcctggctgtcaaactgtttgtcattatcgactatgagcttggacgggactccgaatcggcagacaatgttttgctagaagaacttttgggtggtcttcgaagttattgtggatactgctctggcctcgatccacttggtgaagtactcgacggcgacgaaggcgaatttgaggttcccttgagccgtaggcaatggtcctacaatatccaacccccagtgttgaagtggccatgtgtgggcgatcagcttggtgaactgcgaagggttgctcgagcggggagaaaacgtttggcatgcttcgcaagacctcgtgactcgattcgtggtatagattatcgtgggccagtaaaatccttgacagatcaccttggcagcaagggccctgggccctaagtgggacccgcacgttccgctgtggacttcgcgaaggatttgaatgccttcggtttcggtcacgcattttagcatgggctgactgatccctttttgtatagctggcccccgactggtgcgaagtcccggcttcggtgcttgaggtgtttggcctcattgacgtcgcttgggtggtaatgtccttgtagatacaaagttattggggcccgccaatcttcagtcatgatgaggttgacgatgtgatggccttcggtgtcgttagttacttgtaagccctctggattgtggacagctggtgtgccgatgacgtggtagaacacgtcggagggcaaggtctcgcctttggccactgccttagccaacgcgtcggcctcttcgttcctggcacggtccacatgctgtagggtgaagcccttgaactgcttctcgagactgcgaacagccatg

SEQ ID NO: 98726 - DNA, 458 bp, Zea Mays
gtcagatcagatgaggccggctaggaggagggatgttgaaattgatgaagccggcaagttcagttccgtttagccggccggagcctttttgattggagcggcggggtctcgagtgagtgacctctgccttgacagggagatgtagcgaggctgatggttaggaaggagagttcaggttgactatgcatgactaatgctcttttcatatgcttcttcattgttgttgttgttgtcagttttgaattctgtaggcagtgtacataggatcagtgtcctctgtaggggggtcgtgggatgttcatcatcaattcaccagccatgtacagagctgccatggctggcctgtagatgcaataagaagttcaccagggtttaagcttaagaggcatatcacatgttggtcatccgtggtgtttctgagctcagctcttggaaatctgttgcgtttgcgtcttgag

SEQ ID NO: 98727 - DNA, 447 bp, Zea Mays
gttgtattgtatcatgaatcatttgcatcatattaacttgtctttcgttactacaactattttgacccatattattatttccatgcccagaagtatctccatgaaaatcccattggtcataattctcaagtatccaattgcacaccaaatgctcaaacataacatcacttggctgcaaagtagtgtgcacgcatgactgacaagggcaataattcttgcttccttcaggcttatctttgaatgcaaattctaagaagccttttacaccgactacatattgagtcgagcctttagaacattgcaaaagaagcttaaccacctctaaatccattatgaaactataaaaaatactgatgttaattctactataaaaaatctaaaacttatttctcaattgtattagtatattgatttctagatgtctacaagtaacacaataatagctca

SEQ ID NO: 98728 - DNA, 464 bp, Zea Mays
aaactatagcttgagcaccaaaccttttttacgacagggcaaagccctctatttcattaagaaataggaccaaagagttcaatacaaggttcacaaccataagcaacctagtcaactcacaaccaacaagtccagaaacgctacgttaggaacccctataataccgagctaactcgatagaggcaagaaacgacctgaacgcgtcacaccacatgcccccaacaggaatcagaatttttgcttattacaggattgcactccatccagaaggcaagacacgcaacattcagagcaccagaattacataaccgccgacaaacagacaaactagataaagagcataagaacaagaccactggaacccactacctagtaatgcgacgatccctaggtctctagccataggcgtggcttaaaacttcacttgttgtccttctgataggcctgcttccttggaccatcgt

SEQ ID NO: 98729 - DNA, 681 bp, Zea Mays
ggagggtacactcatgtgctggtagctatcgacaaatttacaaagtggatagaatacaagccgatttcaaccttgacctcagccaaggcactggagttcatccaggaaatcatattcagattcagcataaccaacagcatcatcacagacctaggatcgaactttactagcgcagaattctttgacttctatgagcagaaatgtatccaagtcaaatacgcatcagtagcacaccctagacctaatgggcaagtggagagagcgaatgggatgatattagaggcgcttagaaagaaagtatttgacaaaattgagaaggttgctggaaaatgggtcagggtgctgccttatgtaccctggagtttgcgaacccagcccaaccgagccttgcatggaaatactcctttctttatggtatacggatcataggtagtgttgccagtagacttggcctttggagcacccagattaacctttaaaagcattgtagaggcagaagcaacccgacttgaggaaatcgatgtgctagaagaggaacgtttgaatgttgtcatttagtcggcccaatatcagcaaaccttagatgctaccatgataaagttgtgcgacaccaggcattcacggtaggagacctggtgcttcatcgcatatagtcaagagaacgacggcacaaactatcac

SEQ ID NO: 98730 - DNA, 424 bp, Zea Mays
cagtgtctaaataaggtttaaacatctacaaattttcttaagctcagcacaaaagaaaaactaatttttcttatttaaacaaggtttagtaggtttctgtttttaattttaaactctaaaatttagaacagaaagcatggggttcactatttttaaatgataggtcataatattccagagctagcaaagttggtttgacaacttttgattaatatttcatcaagttatggattttctaagttctctggtcattttaaaaaaagaataacagaattgattaaatggaaatccactttgcactggggtccctggcgattttctaagttctcttcgcgaatcagtccttaggtgactattcacatgagtcactggcattacagaaaacccctcgggttctacaaatcctaacccgaggtccttcttc

SEQ ID NO: 98731 - DNA, 490 bp, Zea Mays
attcacccccctctaggcgactttcaatctgcaaccaaacaccctaaaatggctgaccttaggtggccgtccaaatcgtagctcataagaagttttgttcagaaaagctcgaagaaagatgtgattggacacatggcaagcagtattgatcgcttcaacccaaaaacgcctaggagtcctatgctcatcaagcatcgttctggtcatctcaacaagggtccgatttttgcgttcaacaataccattctgctagggcacacggagaggaaaatgatgctccccaaagaagcacaaaaggttgcaaattaagtatttttgaattttgtgccattgtcactgcgtatagctctcatggcatttttaggaaactcattttgcaaccgaagaatcaaatctcgagcatgagtaaaagcctcatgcttcgatgccataaggaacacccaagagtagcgagagaagttgtcgacaaccacaagcacataccacttcc

SEQ ID NO: 98732 - DNA, 368 bp, Zea Mays
cgaagactgcgcataccccaccaggggttaccctgaaaccaaggccaccaaagataggatgaccagaaatcagccagccgacaaccaacgagttgtcgcgcatatttaccatccccagcagtactaccaacaacaattccacaacgaacaaatccttcaccagcctaatcatatgtaccaccaacaccaagagattcaagtcctccctccaccaccacatcatcaaaatcatccaccaccgacacccaaacaagaggacttcgccgagcagtctttccacggggtcatccacatgattaccggagggtcaagtgtagacttcggcaccaaacgacagaagaaggatcactaccacagtgttaaccatg

SEQ ID NO: 98733 - DNA, 368 bp, Zea Mays
acgggccaacatgtgtacgggatagcgctcattccatagggattgaacccatctgtggccagcgcaacacgtatattacgagcctcttcggctttctcacggtgaatagcatcaaagtgtttccatgcttcaccatcagatgtgtgcaccatcttgtcaagattgtatcattttccatttttgtgccatgtcatctgtttcgcggattcctctgtcatgtacagacgttggatcctcggtatgaacggaaggtgtcgtaggattgtcaaggggatgtcgagctgcctcttctgtccatcaccagagtctacctccatgaacctagacgatttacacttgggatagtactttgccttcgtgtattcttt

SEQ ID NO: 98734 - DNA, 360 bp, Zea Mays
tatccagtaaagtcctaacttgaaaattggaaggcctacgtgagaactggctacgagatcgattgtgcacacggagtataccaagcttgctgtgttgctggtagtttgctgggctatgagatcgattgtgcacacgaagtataccgagcttgctgtgttgttggtagtttgctggtgcagtgatgctccagtggtgctcatgggtagaagttataaatcctcttgaatatgaattcgatgtgattgtgttattgcatgaagagaggtagagaattcacttatattctaacacttctctcacgtcaagccattgtcatttgaggctgttccctttgtgaaatggggagtgctaaccggaac

SEQ ID NO: 98735 - DNA, 398 bp, Zea Mays
agcgctgctgtcagagatgctacctgggcagaatttgaagccgctttccgatagcatcatgtgcccttgggaatcgtccagctcaaagaagaagaatttcaggagttaactcaaggagggagatttgttagtgagtacgtccacaaattcatagagctggctcgctatgcgccttatgatgtcagcacacaagccaagaagatagcccgtttcttgaaggggctgagaccagaactcaagaccatcctcgccagccaagatttcctcagtttctcgcacctctcgaactaagccatctagttggaaagggcacgagaagaagggccacctcaagaggaagtttcaagttctccgagctcagcagcaggacaggcaatagagagttcgatcttttgggt

SEQ ID NO: 98736 - DNA, 755 bp, Zea Mays
cagaggtacactttagaactcctctctcatttcagtactaaatgaataactgctatggattggtaaaaaaatgtgagtctaggctaatatagttgaagggcggcaagactggatccaagggcggtgctcaaggacgaaggagaggtgcaggtatgcgctgccacgtggttggtgatacccgtggtagaattggttggtcgatgagattgaatttctcgatatggatcaagttctaggctgctgctttagttttacgggggttcatagttggatctgaaaattatggtgcttagttgattgtcattattacacagcattgatagatgtgtcttaggaattgcttggccatttgtgtatgacacaagtatcttttgcacacagtgcccacagtgcagcagattaactgatactgcagatgtagtttttgctctgaagcatttgattccactacacctgctgtctctaggatttggtatttgtttaattatttttttaacattgatatcttgtcacaaataccaattatccatatgcattgtgcctctatccagatgacttatgacttgtttattcagtttaccagctcactgcccatgttttttatgcacatggaataaattgtaagaaaatcttcttgatgcttttttaggcctccactaatggcacaaattgtagtatctgaacacacatcttaacacattccatacatcccacatgcacatcaattattgcccttaagacgtacactagattga

SEQ ID NO: 98737 - DNA, 361 bp, Zea Mays
taggtataagatagattttggagatgagttttgtaggacttatcttgatttgaagttctgtccgagagatagataaatcccaataaaaactcagtatgtaagaaaggctccccctaagtgtgtgcaggattatttgaagctgaagatataacacacataatagatcggagttttgatggagactttcctacaatcatggttatcgaggcatacaagagatgatatgtagagtaagtgcaacaattataatcactcctcgattaaccacacacagagtaatttgaactaaacatagtccaatccacagaatattacagataattgtccacaggcataagacagagttaaaagttcaagccag

SEQ ID NO: 98738 - DNA, 477 bp, Zea Mays
tacaagaggcagtttcctcagcatcagtagcagtaccatcagagcacccaacctggaggaaatcagtaccagctttagaacaaccaggcagctcgccttcctaccccagcacccaatcagaatggccaagcagctccaacgcaagtgagaggtcgtgcatgtttctactgtggagaacaaaaccactgggtgaagaactgtccaaagaaagaagctcagcagtcgccagtagtcaatacaccagcaagacaaggagcgccacaacaagcacccgtaggtcgtggtcaggcctactaccgtggaaaggtgaatcacctggaggccgaagcaatccaggatgctcaggacgtggcagtaggtatgtttccagtcgaatcctacccagcaaaagtattatttgatactggtgccacacattcttttgtttctacatcttgggtagaagcacataacatctccatagaaccaatggtcccg

SEQ ID NO: 98739 - DNA, 504 bp, Zea Mays
gctaaaacatgaacatggagggtgagtgcggacctaggagcagctagccgcgatggggtgaattacggccgcgcagtcgaccaatttggggaaaccccaaattcaacggctatagtggctaattgagggcagggatggatgctctggcttggtgataacatagcggagtagaccgtgccatcaatttataagggcgctaagcggtggtgccgaattttgaaagggaaaggccggcggtcgaagggagaggtgagtcaccggcgtgaactatcgtggcgttccccggggtaatgccttaggcaacgaacatacctcatatggatatctactgcgacgtggtagttcttctaagcatgtggcgtggctacaaacaacggcaaattccggcgaggacacctctgaccaatgcgcggcaagtgtcacagtgaatagtccggtgataaggctctactcctttcctgagttgagatctttcattgcccacagttatctgcaagccatgac

SEQ ID NO: 98740 - DNA, 312 bp, Zea Mays
aatttcgacccataacaccaagaactactgcggttataggtcatggaattaccactagacgcgcagggcagcggaagacgaacgtgtcgagcagtgccgtgcagtcgccggcgtccttcacgtccttgcatggttcgtcctagtgctactgatgcagcacctctaaggtagccacacgtattcggaggaagcaccgtgtatcaaactgctaggttcgcgatggcagctatgcgagggcgagaggcgagcggctgctcgtttgctggttgcaaaattagggttaacctaaccgcgccccagccctcaatttat

SEQ ID NO: 98741 - DNA, 745 bp, Zea Mays
ctgccgacatcccgccttcgtgattcgagctcgcaccacgattggtgccgacgagacgtgaatccatacgtggtagaatgatctctggctcggattcgatgctcgaattaccactcttgccatggacaccatgtgtcctcaccgtgaatcatctgccgctgccatagcaagccaccggacgctccggctgtccacgcaactggttggggactcgtgtatcaaaccgccataaagggttcgcgataaatccgccacgttactggcctgtggacaccgttgaggctaacgtggagcttctcgggccgccgccgccgccgtgagtcagtgaccaaattgcccaccatcgtgatgacttcctttaaattgatcctgcgctcagtcctgcctctccgttacgcacccaagccaccctttgttcccactgttccaccatcgatagccaagaacaccggtttttccccatcggtggtcaccagcgccaccgagcagtgcaaccacgtggtcagcctttcctaaggtcactcatagttgtttaactcgtgtttcgcagcctatagatcatggtgaagctcatgtgcttacctaattgaacaccgtcgtgtcggtcggtgaacgtcgccgaaggcactgtccacgtcgaccggccaacccatagctcctctggacaaacctaggtgagcatcgtatgtctgatgcattactaatacttgtagtgaccttgaattgaaccctacagcgcttgaaa

SEQ ID NO: 98742 - DNA, 309 bp, Zea Mays
gaccacgaaggccttaactcctgcttctaccaagaaaactgccgaagctgccaaaaatcatgtcgaagctgaagctgggccttcagcgcctactaaggccaagaccgccgtgcctgaagataaggtgggtcagcaaagttcagataccggcaagacgacagagcaagtcgtgacagaaaaagcaaaatctcctgtccccgaagccttagctgaggatactgattacattgtttgacatgcttcggggaagaatatatctgaagaagaaatattggaggccaaacactacgcccaaagactgaaatatcc

SEQ ID NO: 98743 - DNA, 290 bp, Zea Mays
tctgtttgtccatctatttgcggatgataggctgagctgaagtttagcttggtatccatggactcatgtaatcttttccaaaagcgcgaggtaaattgggttcctcgatctgatatgatcttcttcggtactccatgcaaaaaacaatccttgacatgtataactctgctaactgggctcccgagtaagttgtcttcacaggtataaagtgtgccactttagtccctgtccactataacccatatggaagcatagccatcacgaatacggggtagtccaactatgaaatc

SEQ ID NO: 98744 - DNA, 470 bp, Zea Mays
aattggctaaccaagtatcaagccagtcttagctgtgacaagagaacggtgaagttagtgtccttatcaggagaagaagtgttagtggagttggtcttgtctggaccaaggaaaggaagttgtcaccaagtcaccgcccatattgaggagattaaaccatcagaggctatcaatgtattatcagaattcccagatgtgtttcccgaggagttactgggtatgccacctgaaaggaaggttgaatttgccatagagcttataccaggcactgcccctatttccaagagagcctatcgagtgtctggaccagaattggtggaactcaagaagcaaattgatgagctgttagagaatggctacatcagaccgagtacctcgccttgggcagccccagtgttatttgtggagaagaaggatggaacgaagaggatgtgcatcgattaccgagccttaaatgaggttactatcaa

SEQ ID NO: 98745 - DNA, 397 bp, Zea Mays
cttctcagaacagtagggctgaacgcatgatccgcacagcgaacaacgtcatgcttttcctgcttttctaggcctcccttcccgcccgctactgggccgaagggctagctgccgctacctatctgctaccaaggcggttcctcactccaccccgtactttgctcttgttggcacctctccctcctacgatcaccttcgtgtcttcgtgtgtgcctgctaccctaatctctctgccactgcccctcataagcttgcgccccgttccaaccgttgtgtcttccttgggtattcccctgatcacaaggggtaccgatgcttctacctctccactcaccgagttcttgtctctcgtcacgtcgtcttcgacgagtctaacttccctttctccgtatcttct

SEQ ID NO: 98746 - DNA, 343 bp, Zea Mays
ctccgaaggatgtggataatgcattatcttctgctttggaacatgacccaagcagttcatcacttgtagcttcgatacatttcagccagtcgtcatttggttcatcaaaatttatctccatatctgaatgtatatttcagtcggaccatgtcaccttcgctagactcggtgacagtctccttcggcatttcccagttctctacaagcggccatactctgaatgctatatgttcttgaatcaagtctcttgtaccaatgaagaagcatacagtaccaaaggccttctggcatgcttcggcggcttcatcgatttcaaccttcggctttcgaaggccgaagcggg

SEQ ID NO: 98747 - DNA, 387 bp, Zea Mays
cttgaaaatcttcaaatgtaaaagttttttggtttttgctattctaccactttgatatatgcactttggtccaaaagtgtatggaaattaaaatcaccttaagggcacaaattagggtttccagggctcttattggggttttgagtgttctagggtttgtgtgccactcatatccatcaaatttagtctcttatgagcatttcaactatcctttgagacaaaactcaagttgtcatcatacacacccacatagctctatcccttggtttagtacctattctagggttaagatgcacttcaagtcatcacatcacaacttgttttgaagttttagcctagtggacgcattctaggtgtaacaaacataatgacatgtcaatgcatatg

SEQ ID NO: 98748 - DNA, 395 bp, Zea Mays
ccgcagagtggcttcacgacgacgttcagggttgtattcagtacaacttcatcttccgtcatgacccttgcatcacctttcggtacgcgttggcatacacacggtatgacgtactatctcgttctttcaggtattccggccactgtagaggctccgatgctgaggtccctgtgaccggggttgactggtcccaccggttagcgggggcacttctgagaatgtattgggggtcgtgtttgatagaggtcccttcgacacattttccatgacccagatgtggtttggtgatggtctgttttgtcgtgttgacgttgctcagttgtactgggttagccccccttccttgtgggcctacttgccagagggttggtcggcatctccgtttcaccgagttg

SEQ ID NO: 98749 - DNA, 420 bp, Zea Mays
tgctaggtgagccttcatccaatgtaggagatgcattggatcttactctttccatccacatctaataataactaacgggcatacacatttaacaataactaattcgtaaactattgggcatttacatttaacaataaataaatcataacatatttaacaagaactaattcataaaccataagccatcacatatgtcttagtactaaaatataacatatataaatctgaaaccctaaatctgaaacatattattgagactaaatcgaaaaccccaaacactacaaaactaaatatgagcaataaatacgcaatatagaactaaatatgggtactaaatccggtttaccagaattaaaacacggtttaccggctccaatcgcggtaaacgactgacttctcgtgataaatcaacgggttaac

SEQ ID NO: 98750 - DNA, 384 bp, Zea Mays
tcgctccctaggaacagacgataatggttgatcaagagacagttgcagcgcataccagtccatcagttcaactgccccagctgctccgaacggtgatcttaacaaaacaacatgaaccgaaatggaagaatcaattcctttttccttgggttaactatgggttcatcccaatcatatcactggagcaaaggttctgtgcctctacatgctgcctttgctaggcatctaattctcgtagaactatgtgttttaagccgtttgattcatgataaggatgagtaattctaccagaggtgattttatggttgaaatcgattatccagaacaaactttgtggaggaagcaaatcaggaggaaagttcataaggagttggtctcttccag

SEQ ID NO: 98751 - DNA, 465 bp, Zea Mays
gcggcggccctggaggagaagaagaagaggaacatggccaaactccgcggcggtgcctaggcccagcagagcagatggatcggagcaggtgcctaggcccagtctgccaggccgcgctgcgctcccgtcatcatctattcatctcctcacccagattttgcttccctcgctcgctctctcattcgtttgtgcagctgattacgctaggtctatttacgcaactgtcgtgtgtcgaattttaacagcgacggccatgcaccaaacccccaccccacacatcattttctttcttcctttcttttgattcgacgacgcctgtgattcatgcatgctctcgatcgaggcaaagctgttgtatgttgttatggtgtactgttttttttattatttataaagttttgataaaaaacatgtaaacaaaacaatcacatacatcattcaaggatacaaggaactacagtattt

SEQ ID NO: 98752 - DNA, 341 bp, Zea Mays
caaattctgatggggctcacatgtcaatgaccaactggtagatcttctctaatttgaatagattcgacatattaacttgcatagtaatagtatcaaattatgaatatcaggtacaagcctgaattctatcgatgcttatctgcggtccctccatacggtggtcctagcctctttcctgcgttgtattgtaccgccaccccttaggatttttgttggatagcttacattctcagcatcatcacggcctgcctgtctgctgcggacgtacggcatctttgagtcgcacttctaaaaaaaaaacccggaaggattgaatgacatacacgagtgcctgcattact

SEQ ID NO: 98753 - DNA, 612 bp, Zea Mays
tgatatccctggtgatttggtaatgcatcaacaaactatgacccatcaacaatctgtagatcactagaaacaacggcaggctcatcattgttagtacaaacatcaacaacaggttcgccatcaggactggccgtgggactagtgcgaggacgacgaatgtaggttttggtaactggtggtttagaagcaaagtgtgaagtgggcattgaggtagaaagacttgtaatgggaatgagaacattagttgaggatgtggtagacgatggtgtagtggaagatgaagacccaaatgaaggagcatggatgggaggaaggcacataaaagaggtggactctgtagaaaaagaagatgaatgtgtgagtaagttataaaagaaaggtcaattttcattataactcacatcacgagaaatacgaatgcgacgtgctgaaggatcataacatctatagcctttgtgctccagactatatccaagaaaaacacactcaacagattgagcagttaatttagtccgttcacgagaggctaacaacacgtagcatgtacatccaaaaactctaagatggtcatagcgaggagtgcaaaaaagaacttcaccaggagttttttct

SEQ ID NO: 98754 - DNA, 670 bp, Zea Mays
atgaagggcctacgcattgccgtagagctaagtgtccagcgtttggacgctcgggggggctctcagcttgtcgtaggataagtaatgaagaagttggagtgttgcggccccaagatggtagcgtactatcgggaggtacgacaatcagaatactagtctgatggccttgagttaaatcacatccctcggcgagataatgaagcaacagataccctcgcaaagatggcatcaggacgaccgaccgtcccacagggagtatttgccactgaccttttcaatcctcccatccgatacgagaggccggccaaagagacgagcaacccacaggcatggagccaccggtcccagaactggtcgatattgtggaagggacaaaccttccagccaaccccatagatgactagagaacgttgtatcacagtttcttaaccaatggcctacttccccaagacaaaacagaggttcaaatgcttcatcgatgggttaaattctttgtcatgattagaggagatctgtacaaaaaggggcatatcaggataagacaattgtgcatctcgatcgaacagggaagacaactcctagaagacatccacgacgagacctatggataccacgcttcccctaggagcctcgtaggaaatgccttctggtagggtttctactggcccac

SEQ ID NO: 98755 - DNA, 491 bp, Zea Mays
gtgggttgtatcatcccattcttaagggttgtatcgatagggacaaagacgaaagggtactaccccagggatgagaggtatggtgtggcaatgagatctaggaggaggtagcccttgggtaggtcaaataaggaggtaaattcagatagaaggccttggatctcctgagaaagaagttgtatgttgggagtttccagaactggttgcacttccatagtataccatatgatataactgaaaggctgacacttgttccaacttggagcaatcagttcactaaccttgtagaattaccagctgctgctcatggtaaaaacataaccatttctcctgccagtgaacctgcatcgggctatgggaagatagccaatccatacccaagatgacatcataacactgtagaggtaacaccttgaggttaacacagaagatatggccttgaatgttcatttgacatcgaggaatttgatgagtgcaatatataatctgac

SEQ ID NO: 98756 - DNA, 418 bp, Zea Mays
ttggcttcaagctcatcgtcaccaatgatctcggcactctcatactcatagttccacagttcaggttcgtgttgtggtaatccgaaccttgcgcttccgaaaagcgtgacaggtggctcgactctgacctcgaaatcaaccactgctgcttctgcaccctcctccggtgcttggctgatatcatcagagggagcacaagcgctgaacacttcctcgcgcttctcgacggcttctactgtcagcagcactgcctgggccgagctggtaacggtagacattccatcagatatcccgagcaacttccagatgggatcgtcaggtccgaaccgggacagggagcagtgcttcctcacatagctgaggtccaccgccatgcacggcggcgtggtggagacgacccatttgggcttgaggatcc

SEQ ID NO: 98757 - DNA, 719 bp, Zea Mays
gccccaccgacgacgccaattcagcgttgttgcttcctacaaggcaaagcttattctatttcatatgtttcttctttctctccagggaaatacatttcgaggattgaataaggttgagggggagatgttagttcatttctaccttaatcccctacaatatccaaggagatttaagtttccaaactagctcaaaaagggaatccgttgttaataaaggaaacgagtgatttccaaatactcacaagtggagcattttcagttcaatgaagaaggctgcttttctctggcacaaaggagccatttttaatttccaaatgtcttgaggtagaattcaactccaatatatattcgcctatagcccaaataaaggaggtcattcttgtttttatttatgctataatgaaagactagttggcacttagacatctgtctgtcattgttagtgtggtactaaaatggacgcattattgttacttgtacgttttgcatacaggcaaagtacactgaaaacactatggtaccactgcgaatagacaatgcagtagtcttacagaaacaaatcagcattttgatagctatagcacatccatcgcctaattggtgacctatcgtctatgttgtgatcaaatatacatgtactgcctaaaaagcagataatatagtaccacgaaactatacaaatcatgtgtgcgcaagtcatcatagaaggttctcgcaaa

SEQ ID NO: 98758 - DNA, 1465 bp, Zea Mays
gtcgttctgaacgggagtttgcagttggcgactgggtgttcctcaagctccagccatatgtgcagtcgtccctggcagttcgtgctcatcagaagctggcattcaaattctttgggccttttcaagtactacaacgtattggttccgtggcatataagttgcagctgcctgattcctctcgcattcacccagtctttcatgtttctcagcttaaaaaggctctgggtagtgggttcaatgtttcaccggcgttgcctactgatgcttatggtttcagtgtccctggcaaaattttgaaacgtcgtactgtcatgagagggaacaatgcttgtgatcaagttttggtgcaatggtcgttcatgccagctgaattggccacttgggaggatgtgcatgaattgaagcaacaatttccaaaggccgctgtttgggggcaatcagcgttttcagcaagggggactgttagcggtactacatcttctgctactgggaccattgtggcgcaacggattagcaggccgaccaagaaatctacaaaggtgtatgggccggattgggtgaatgggctgcagctgtgctcgctttgcgaataagtagaacgagagttgcctcgtgaagggcatgtaagaattattcactacaacttcttctccaagttctactgctcgttcgccgccactcttcttcctccttaccctccgctactcttaatcgtcctctgctactctttattgttgttctcttctactgctaccttgtatccataccgagttgctaacactggtcctcattttatagtccgtcctgacgtgggaagcacgcgggggaaggagtccagcggaggaacgccatcagacagtgtccgatccgaactctagcatgaggaagaggaagaagctgacagcgcgggcccggttgtcagtggaagcaaggcacgacccacttgtcggtggtcgagacagaagagggagtgcgcgctttcagcaaaaacaggctacgcgatactgggcctcaagctgctgggctacggccgcggaccgctagagctgaccacacgcttcaccaggcttagcacggagagaaaagaagagatgggctgcgttttggtgtggagctgggctgtagaaacaacttcactggaagactgcgcgtaaagaggatggggaagcaggccgcggctttgggcttccaggtaagctttagttttcctttcatttttattttctgttttcaaatccatttcctaaattcaaattcaaatctaatttgaattcaaatttcctcgcaacaaatcaatacaaaaataatgctccaacatgaatgcatcaaacgatatttttataaaatatttttattaccaaaaatattatttatcccatatagaaaataataactaattcctattaaatctaaataaattcatatttggtttattaaattctagaaaattagtttttcaaaatta

SEQ ID NO: 98759 - DNA, 554 bp, Zea Mays
ctttacccaatcaatattccaccttgtaaaattcaatttggttctacaaaaaagtatattcaagaaacaattgagcagactccatcataagttgatgaaacatgacatttttggtggcatattgacatatagtagaagtaaaagcagaaaaatgtaacacaatcacaaacttgaagaaaaatattttttcaatgcaaaaaacatatgcataaagtctcgtgcccgcgcgttgggacgacatacaaattatttaataatagttgtatgcccgtacgttgttacgacgacaacatgttataataaaatacattaatatgcagaaacattaatcatcattccacctatatgctccccaatgaacaaaccgatgtcaagaaaaccaaaaggatgaaaacaaaatcatcgaccagctagttcatacaagggagtagcgtagttcatacaaggggtagcgttttcccagtcagcatcccaccttttcccggtcaatattccaccttgtaaaattcaatttgattctacaaaaaagtatattcaagaaacaattgagcaga

SEQ ID NO: 98760 - DNA, 385 bp, Zea Mays
agcaggaaaagccaaattacctgaagattggagaagaacgaaggaaatcccaaatcacgagaagccaggtggtggctcgacgaaggaatatcaaccggggcaatctgaagaacgtcaccaggaatcaactcaacatcaccatcaggcatgagaactctatcatccggtgcgccgatctctaaggcgactccctcatttcaagcatgcgtcgttactatgccatcagaatgtggtggagaagacccgacgtggacatccatggaggtatgagaaggggagcccgcattgcccattggagccggatcaccaccggcaacaccctcgggggctgggttgcagcttgcgctacccacccgagccggatcattaccggcaacaccctcgg

SEQ ID NO: 98761 - DNA, 629 bp, Zea Mays
accacattcaaggcagccaacagagctcacaatcttcaggaatgcagcaaacctcttagaggccaccagctccaagaggcagaggaggaagaagctttggaggacggttctacactcaacccaggagattgttctgcttattctgtggggaggataagggacacacaacaaggatgtgccaagtcacgatccaaaagcagaaggagatagttgaagccgaagcatgacaaaatcaaccgaagcaggtcttgcatactgcctcatgctattcgccatatatacctgagtatgtgagcaaccagcaatccacgacatcagttgcttcggcaattcattctcaagctgcatgggctcagttaccaccaccaccaccattggcacctaccttggctcataatcaacagccagatgggcatcgccaagcgcaacaatagcgcgacactcgagaggactttgaagctcgcatagtcaatagcattgtgcccgaatcgagacatatttactaaagcaacacaggggctgaccagagagatttcaaattcaatgtatttttacttttctgtctttaaatttccccctccaaagacaatataagaaggtttaaccttcggcctgtagtaataaatttg

SEQ ID NO: 98762 - DNA, 310 bp, Zea Mays
cttggctgcgtcagctgcttcttgagcttcaccacccccctcgccatgccaccttggtctattgtgataatatcagtgctgtgtatctctccggaaacccagtgtaacatcagcggacgaaacatgttgagattgacctccattttgttcgagagaaggtcgccctcggtcacgttcgtgttctacatattcctgcgacatcgcagtacgccgacgtcttcaccgagggtcttcctacctcactatttcaggagttctgatccagcctaaatgttagtgatgctcccgattagactgcagaggagtgtta

SEQ ID NO: 98763 - DNA, 728 bp, Zea Mays
gtttgtccgaagcgttctcgccgagccaatcagcctacttctcctgctgacgggaaaaaacagaagaaaagacatcttcatcgagtgtctagtttggatcaggatgctggtccttccgttcctgctgctgaagaagtgcaagtgcctgcatttgctgaaactgatcccaatgggtgtaacctgcctgctattaaccccaatgggtgtgacctggatgacgctgaccccaatgggtgtgacctggatgacgctgaccccaatgggtgtactgtccgcgttgttgatgagggtgaggaggaggaggatgaaatccctctaactcggaagaacaaccgacgctatattgctagtggcgaaagtagtggtgttccttctctagccctgtccgctcttgttggtctacaagaattgtctctggccaactttgatcagactcttgaggatatggtcccagaagacctgttgtccgagccaacagatggtggcatgatggacgtttgcgctgatgtgcctgatgctgggctggagttgtctcgggcggcgtcccgcacctcatcgaccttggagcgcagtcttaagggtcaggaggttggcccggctttgcactgttcctatggaagtggttgaaggtccttcagccttagaggtggctgcctcagagggctcggccctcaaagatagcgctggtgcttacccagcccccgagggtgttgtcgaggatgattcgg

SEQ ID NO: 98764 - DNA, 741 bp, Zea Mays
gcgacggtggcggcggtcaggacccccacttgttctttctctgcgtgagcccagggttcatggtgcttacccgtgatgaagaaagctagggggcggtgctttggattatatatccccatggatgggcgagtccggaagacttggatcgaagatacccgatcgaatcaccatggaatacggcggggtctgtttagattcggagcaagactcggatcgcctggtggagcaacgtgaacctggcgaggtgggcccacgcaccagtgatagggaaggagtttgcgcaaggaaagagtggctaattgggccgaccaggccgtatttcggccccaaacagcaacatgtgagtttttcttttatttttttctattctcttttccattcaaccttgaattcaaatctgttccaaatttgagttcaagtcaaatggaaccccaacataatgtgggatagttttattaacctatttagttaccttatttattatcattattttattttaggaaatgctttcaacatggattacttaccacatttatttccataacatattagtttgagtgggtaattaatttaaaggtatattcacgagttcatattctttggttttgttagaaaatatttttttccaattgccaaacttttattaaggtttgttttactaatgatattttattatgaccattttcttagaaagggtgagttttgaagttcaattatgtatcaatggtacttattttgatt

SEQ ID NO: 98765 - DNA, 582 bp, Zea Mays
ggagtatatctcaaatcttttcaaaacttcccctatcatatcgtatagggggaaccgaagccccgccccgaagaagctcttgaacacaacaacctcatcgtcctttggctctaggattacttcttccctagcaaagcgaatcaatccatcttcattatctccaaagtagcctaacttcttcatcacaaccaagtcctctactgttacggtggatcttccaaattcaatgtggctaggtttggttgggctcaggatgctattgtcctcttcaattttgttgtcaccctcgacctcagcctaagtttgttcagcttagacattgggggtcccttcagcagtagctccctcctgcacaactagacctgagtgcctcatcacttctgatatgggcactatctcagtcacctcaatttcgtctccctcatgggacaccctggtagtagatcttactctggccattttagttttcagtttctttcagacaaagctgattttaagtgacaaagcgcttgtttgaaagcacaatgcagagagctttggctttggttaaaaattttcaatagcacaacaatgcaatggcaa

SEQ ID NO: 98766 - DNA, 305 bp, Zea Mays
tcggcatctctcactcattcacaagaggccataccttgtaagcaatgtgttcctgtaccaaatccctggtatccatgtaagtacacacagtgttgaaagccattagatacgcttgcacctcatttccaattgcaattgacggccttctaatgccgaagcgtgaccatattggacgctgaataatgcccctcacatcctccctctcgctcagatcattctttacatagaaccattgcttcatccaagaacccgaccatttcttccaaaatattggcacaggataacttgcctcagagcggggcaca

SEQ ID NO: 98767 - DNA, 484 bp, Zea Mays
cgcaccgattgcacccggattcgtggtaagttcttgtgtatcgagttctaggcacagcacggggtcgattgacggtgtttagtcgcgggaatgctgcgtcaaggcgtggatttggtttgctccggcgtggtcgcggctgtcgatttgggcggcgcttcctcgggtggatgatgggaggaagaaggtagctatccgttggattacgatccaggggatatgattgatcgggagtgtaggggtgtcctgagtcgttgatcttacgaggaacgctcgagattagatcccaggtaccagtttggccaaaagtaatccaagccgttgatcgatggatggaggggcgagaggtgttcctggcgttttaaaatccaaggcattgatctctgatccaagggctcgtattgcataccgtttcatttaaagcacgatctaattcgggtcgccggatctggaacgggcggctctgattacgggataacccttcggc

SEQ ID NO: 98768 - DNA, 586 bp, Zea Mays
aatctgactaagatttcttgaccggtttcctccactaggttggttttaacctcgatcaccacgagtaaattccaacacagccacccctatcaggtcggctccggccccgatcacgctaagctaggtcaacctacatccccgataagactctacgacctttgataaaggctacacatttatcaccaaccacttctcactccctcgactatataaaggggtgggggctcctgtaaaagctcaagctaacttagcttgtagtcccctcacacgagcacaagagcttagtgtttcaccttgtaacacccgaaatcaacaacaaagacttcaataccatattgaacgtaggggactttctcgaaccagtctaaaactctcctttatgctcgctagagcaaagccattcgagcaatagctcacaaaccccactgtaacctacaaatttacttgtcgtgggattgaaaccatggcaatgagccactgaaaagttttagtgttcaatgacactagtcgaaactcttttcctcttgtgccgttgtcgtccacttccgtcatatttgtggttcctttttatcgtggtttcagaaac

SEQ ID NO: 98769 - DNA, 340 bp, Zea Mays
gcaatagtacatattctaatatgacacatcgctccaggcgttcatccattgcaacatctatgatggtgtaacaaaagtccatcaaagatcataatccatcagggatttttcatcgatcagatatatcgttatagtctgtcattctggcataatggggatattttgctagtaacacctaaaccttataggtttcttccatcggggctttagaggataccgtaattccaaatctagtggaaaataccatgagttaaaactcgtggaatgcacatgtgcttattcggtgaacttcaaatcctttggtacctcatcttatacctttttcgggtctgtatgggtc

SEQ ID NO: 98770 - DNA, 566 bp, Zea Mays
aacagggggtccagacaagatcgaaggcaccactggagcgtgaagcggaggaggcggagcagactgaaccggaggtgcggagataccagaatgctgaagcatgagagtcatgaatgccctattctctgcccgatcctgaagtagctgctgctgaagagcatcctgcctgtcctgcatgctctgaaacatcgagagcatcctgtcggataaacgggcctgctcggctgccaggagagcctgctgctgggtgagagtctgctgcagctgggtgagagtctgaagaatcgaagcaagggcagggtccatagcctgaggatgaggaggggcagcactagaactcccagcctcatgatcatgtgagcgtggaggcataggaggcggaggaggaggaggaaccccaaaatcatcatcatcatcatcatcagcggctgtaccctgagcgtcaaactgtcgaagagctgcatcctcggccagagagtcaaacacagaagcagaagctggcactggaatctcaggagcaggacggtaagatccaaatacaaggcgtgaggcctcaagagtgctct

SEQ ID NO: 98771 - DNA, 710 bp, Zea Mays
ccaaaataaacatcagaaaagatcaacgacacataaatatcagagaactaaaaggacctccatgtgcattagtcagtcctatatgtgcatttctgatatcccttaatttatagctagtgtcccactaatacctcaagaaatggttacacatttggtaatacatacaatcttccggttacatgcctttacaatcttgcaatgttctatgtttatggtgacatcatttttttgagataatagttgaaaaggggaaataagtcataactacatattatctcttaagtcctaatgaaggtaaaagcgcaacgaaacaagcataaaattgacagttcatgtaaaaatgtcatgacataataagtaaaccaaacaaccaaactgtgctgattgatgggagtgaaagctttgtgttagccagccaattaacgctgaaacaagcacattaaaggccttattatcaactgaaccctcttgttacctgccgatcaatattcttagcaccgtcctgcagatcagccacattactgcagctctccttggcctcaacctctgccttcactggaggcgcagaggggtgtgccccctcgagcaggaggacggccctcctgatcccattgagcctcgcgtccctgggcacttcgttcatcacggcgaagggttctccgccctcatctctgaccctgaacccgacggcctccaagagctccatcccg

SEQ ID NO: 98772 - DNA, 910 bp, Zea Mays
cagtaggcctgggcctaatgggccttaacacgtaggatgtcggacaatcctccccaaccttctgttcccccagcgacgagccccatccctgtgacctctagggcagcagctgccacaagcacgtcgcccgctgcgcccgtgtcacaggactccttcattgtgttccagcagcaggtgttggactcccagacattgatcatcaaccacctgtcggcgttgaccgcccggttggggcaatcgaggtgcaatccgcgtcggcctcgtccatgattgatccttcatcatcgtcccacgtcttcccctcgactgcgcaagattaacctatggccctcccgactatgggggcatccaaaccgcacccgatgcgacgtcctccctgtcacttagaggtcaagtaaccctttctatataaggagaaggattatatcaattgaaggtaagcagaagattagaaagaaatcctttctctcttgccgacagtgggcaaagccctgcgaccgacctccccagcgccccatccttaatcgttgcgccacgtccccaataggatctgcaatcctatgaacccaccaaatccggatccctaacagtctcactggggcatgcccccaaaataaattttgttgcatcctcacgtgatgccacgatgggtcagaacaggatgcttgtcatctatggagccctgtgtgactaacaacctcactagggatgttgtcaagctgtgtgtagttgtaggtcttgatatgagtgtgtgtgcacatgttcagatactacaactgtacccaattagaaggtatcaaaaaatggttcactgcaacctcatctatagatagttcaattatagataactaaaattaaatatctctgatatttagtattatccctattcaaaattgtaagccatttaagc

SEQ ID NO: 98773 - DNA, 609 bp, Zea Mays
agatggtggtctctcacctacgggtctttgactgcctcgtgttcaccaaggagcttggccacatcagcaagctcgatgacaggagcaccctaggggtgctcattggctatgtggagagctcaaaggcctactccatccttgatccaggaacacaacgtgtgcacatggcacacaatgtagtgttcgatgaaggacgaggatgggcatgggacaaggcggtggacgacgacacgactccaacgtacgacgactttgcgggagctgagggagtaggcaactcttcttcaccgtgaaggtctaccctagtccccaagtctccaccgactctagtgccacactccccagccatgacttcagctacaatgagctcttcgccaccatgctctccatccacaactccggctacaacgagctcttttccaccatgcactccagcatcgacagtaaccccttcaggcatgtcctctccgatgctagctcgtgtcaagaatgacccggtggagctcgttaccccgctctcccacgatgaggagcacatcaacatgtgcctcgatggcgagtcgttgccgtatcatacggtggaaggccttctcatcaacccatcggtgc

SEQ ID NO: 98774 - DNA, 476 bp, Zea Mays
aagacacctgtgatttagcaattctcgtacaatactagggtagcaaaggtacgtgaagaaggattgttaaggggacatagagtgagtcctgacaccgtagagtacgtctacgaggtcatgagtcatgatatcacaagcctaatgcacaaggatttttatagaagtccgagccgcaatgtgtgtaatactctacgccctctactcctcttgttgatcatgtatctctgtgtggtgtgtccaagattacaaggaagggggaggaactacatgctttgagaattgtaggctaagataagctaaactaactcctctcggctctcgctggtttggacgggttgctttcaaggttgttgtcttgagtttggtcttgcgaatctaaattgaatgttgttctaccacctctttatagatcaaaggagtggtagtgttacaagtatatacttcttttggccttggcttgtcgtagagccaaccac

SEQ ID NO: 98775 - DNA, 631 bp, Zea Mays
atttttcctagtatacttaagtgataaagaacataggacaaatacagagaaccctagtccagagccaatccatagttaaatatttattaggcactaagaaatcaaggaaaaccatgattaaaaatacaagggccactgtaaaaagggtaaaaaaaatctcaatagactcctaactaatagaacaccactacaaaaatgataaacaccccaacccatcataataagttggttgaacaattaaaacttgattttggcctatgttctaattaaatcatgatgaagcctaaaattgtgcaacaatgggcaaacaaatttttactcaattacttatgaagtagaccaccagagaaaaatatgaaactcaactaaaaaggtaaggtaacacacattaccccctaccccatgaaaaatgccatatattccaagagtttctaccaccttttcccttaagcaaaaagttgccaactcctagaatgattgcttttgcacaaagaagaagataggaaaaattaggaatcggtcgtttgacatttttcatgtatagtggtagtagaaagcacccctatggccaagaactttagaaaatcacagtaaaatgaccaataggtattagtggctaaaacttggtaca

SEQ ID NO: 98776 - DNA, 416 bp, Zea Mays
ctggaatcttgggtacactgtagtaagtacaaagcagtaactgatccctcaagttctttgaggtcagaattcagaaatagtggcaccatttggaatgttgtttgctaagtggaaaagctggtgctttttctgcattcaaagttgtcttcaaactaatttagtgcttacattatcttagaatcctggactgaatcctatcattccatatattgttgtacctggctagtactagcagatgtttgttcatacatgaattagctttcggacctaaactgtggaatacattagggagtccatgatacaagcccattttttggaatgtggatgaagtgaaatgaatcttgctttgtcagtgacatataagacaatagtttctgatgatgggtaaaatctgaaatgttttagatattgtttca

SEQ ID NO: 98777 - DNA, 782 bp, Zea Mays
cttgccaacatttgtgcgggcgatgagtaagactttcggggacctgatcagggacagagtagaggtatacgtcgatgacatcgtggtcaagactaagagagagtcgaccctagtggaagacttaaccctggtctttgacaagctacgggcaacgcgcacgaagctaaacccagacaagtgcgtctttggtgtctccgcagggaagttgttgggttcctggtttcacactggggcattgaggcaaatccggagaagatcaaggcgattgaggcgatgaggcctctggcccgtatcaaggacgtccagaagcttacggggccgttagccgcccttagccgcttcatttcgaggctggctgagagggcgctgcccttcttcaagctgttacagaagtctagcccattctcttggaccaaagaggcagaacaaacatttcaagagttgaagcagcacctggtgtctctaccaatactggtagctccagagcctagggagccgttgtatttatacatcgcggcagctgcagaagctgtgagcatggtgctggtcatcgaaaggacgacacaagaagaccaggtggcgctagaaggccaggaacctgagggctcggcaggggtccggaccgttcagaggccggtctactacgtcagcgaggtcctccacgaggcgaagaccaggtaccttgagacgcacaaacttctctatgatgtgcttgttgcgtctaggaagctgcgccactatttccaggcacagagggtcatggtggtgacctcctttccgtt

SEQ ID NO: 98778 - DNA, 314 bp, Zea Mays
ttatagcaatcaaagttgttgtgaaggcctctagtcgccttgatctgaaagtgcagctcatgaatctgattgaaggcttcgccaaaagcatcagcatcaagttcaaccccttgactctgaacaccccaaataaaaaatttctagatgcactatagtgtttggggggagctgatgaaggtaaatgtcaaaccttttcaacatcgcgactatcgccttatgtagaggaaatctaaggccaaccttcagaaagctccgaaacacgacaacttcgtcttcctttgtattcggcactaagtcgtcacctcctaaccgcg

SEQ ID NO: 98779 - DNA, 316 bp, Zea Mays
gtctggaacaaaccaaatacaaaggactccttacaggggcgaaaacaaagaaacctaaaaggattcatctaggatacaaaacaatagacgatctttaccacattatatgacaattatggccaaagaccacgcaaccctgtggctctagccaaacaccaaagagacgcctcatctctaacttcctgaatgatcttggaatgcttggtggagccttatcaaagacacatgcattacaatgtttccacaacatccaagtcacaaatgaaaccaggtgttaaatcctttcctttatatgtgtggcacttgtacctccatc

SEQ ID NO: 98780 - DNA, 768 bp, Zea Mays
gtcagccgcctctgccatcgacgccgtgtgtgtggggggaagaacttggtggactggtgcgtcgtcgtgggctccaaccattgcgctgtgggactgggatcgtcctgaccttcattggtgcgcgtggcgaggatcaccagtcggctccgtcgcgaatcagcatcaccgaggagcgcgctctgtcacaacaactggtgagcaccccttcctggcttgcgaggagagagagtaatgggcgtaaggtagaagatggactaggaccgtccgattgataatgagcgcctcagattaggttagcttacccctttggctgggcggaaccccgtccgtcgatcccagatccaaaggctatcaccgtgtaccagtcactttaggggaggttgaatctgcacccttgatggctgatcgaacgactcagaccgcgcactgattcttatcccgcgccaatctaatctgggacgtccatattcgatctggcggctcacgatcaccgatacctcttcggacgtgccgttttataaaagaaaccccctagtttccagtattcaacccgcagtccaccacggggtaaatctgagtctagggaatacttgcgcaccagcccctgtcttttacagaatttaatgctcagtccagagaacagaaaatccaaagaattcatttagaaaatacatttttgtgtgaaaataattataggaacttaagtaattcctagaaaatacattctaactcctttttagtccattccagttcctataattttgtaat

SEQ ID NO: 98781 - DNA, 741 bp, Zea Mays
aagcaaagaaaataaatgttaacaaaaccactattaccatttgttcctcttcatcctccaaacaagttgttagtgcatttataaaacaagattgatcacctaacatgtctgcacgagaccaagcttgcatacacatcaagccttcaactgttttttggagcaagtctacttcgatgtgggctaattaccctccctccagtactaaaaacagattctgatgccactgttgtaactggaattgccatggtatcccgagcaatttttctaagagttgggtatttaattcccgcgtgttgccaccaagaaataatgtcaagctcttgggttcttggaagtgttggctcttccaaatacaaatctaactcagtgcgcatataggttgaagatgtttccggttcctctggcatgaacttatcaaatatgccaagcataaggtcatcaccttcattaacggcaacattcttagtacctacaccatcagttgttgccacaccctcctttggatcttggtactccaagacaagctcatacaacaaactccgaaccctagacaactcactacttgtgattggactctcttccccataaatggtggtaaagaaagctttcatgaatttcaatttaatcctaggatccaaaattgtagctaattccatgtaatactcaaatggtagacaataaaagtacgagatagatcttatatgtattgcctaccaagcatgagaaatttgaagaatcata

SEQ ID NO: 98782 - DNA, 652 bp, Zea Mays
gagtatcttcccgaccacgggaagtccctgtaccatcatgtgcgcgagtccgtgatggcatctgaggcaaagaaacatttgagaaaaatataacatgccaacatacaccatcatattacattacaaaaatattaccaaaatgtaattatacagactccagcgtataacttgacttcattacttattttacataagtacaatttctaaactatactattctagtcttcgtcatcctttgttgcttcatttcccgctgcaggagaccgttcatcagcaaggttcatggaaggagggggcctaaaaagttccaactccccatcaggctcttcacttgctgtccccgatggttcggctcccattgcagcagcatcggaaggcatgtccgagtgaagtcgagcatacaatacatgtacttcctcatgtaaagtattacagtacacttgcagaatatcgagggccgcactaagctctgccacacgagctcgagcttttgcttcacggtcccaagcgatcgattgtgagttgacgacccaatcaatggtcgaatcccgttcagatatctcgtactacaagcggctgacgtcagctgacaattcagctatacattggttgtcctgtgcccatgccctattcctgtgatgtagctctgacc

SEQ ID NO: 98783 - DNA, 479 bp, Zea Mays
tggcaggagccctgcctgaatctagcccgggcatcacggagcctcttgcttctcctcaggtcagattccacaacagcaaattttggcgtggaggaggccaggtccgacgggacagaggtgtcgtcagcagattcctcagaaatgaccgaatcaagaaacttgtcatcaggtcacttcctggggatgacaaaagggtgtgtctcagtctctggctccaacaaagctgaaggaatatctgaagacaggaatttttttgaccaactaaaggaatcttcgtgcatcaagttggataagaaaaaaggtgcccatttcttgggaacctgcaccgaggtcaccgagctatcagccagggcaaaatagctcgcccagatcctatagaactgagcattccttttcctttctaagtggctcagcaaaacaggatccgattgccagtcatgcgaaaacataaagttcaacctcacgttgttgtgcccatt

SEQ ID NO: 98784 - DNA, 459 bp, Zea Mays
agagcatacactagacagggtgcacagagagcactacagagtggccctaggagttaaaaggcaccgggcatattcaatgtagcaccggactccacaccggatgtggtactcatagaggttgcaacatgcaatcgagctaagtataaggcatcgaacatgtttagtgaagcaccaatgaaatcaaatatgcaaagggctcaacgatcagcaacgactagtctccaatggttacgtgaggtggaagacaccggacgtatccgatgacacactagtggcacaccggacatgtatggttatgcttagaaaatcttgtcacttttcagtggctcttttgagtgtgggggactaaatgccacgtcaactagccattttcaagtgtgggagctcagatacattaccaagaagttgaaactccattccatagctcttagacacccaagtgcttaatagaatcactcg

SEQ ID NO: 98785 - DNA, 494 bp, Zea Mays
cgtggttcgattttagttgtttgcttgtgcgtttagttgggaacttgtggcagagtttagtactttagctgtactgcattttgtattgatgccgcggttatatttttttcgccttgtttctgcgtggatatttgcttaagtattaggcgtgatctggtcggggagtattgccttgtccggtggcttctgccttagatttagagcggattagcttgattaacctgaggtttggatgtagagaatgtagtaataggctattactaatagctcatgcgagggctactagacacttgaatctttggatggctaatgtttagggcgtttgccagtgttactcttggtggatcctttcctgtagatttagttcatgcgagtgcaatgcttttgcttaccagtgtgggttagtatgtgtgctagtgatgaaatggatatggcaactgttgtgcatgtagagtacaactctatttggtaacgagtacagtttttagaacaag

SEQ ID NO: 98786 - DNA, 587 bp, Zea Mays
ttcagttcggcctatcatcctcaaactgatggttagactgaaagaactaatcaagtacttgaggatatgataagagcttgtgcccttaagcatggaggcagttgggacaagagtctaccatatgttgcgttctcttataataatagctaccacaccagtctgaaaatgtcaccatttgaagctttatatggcaggaagtgcagaactgctctctattgggatcagactagagaaagacagttctttgggcctgagattattcaagaggaagaagaacaagttcatatgatccaggagaacttgagggtagcacaaactcggcagaagagctatgatgataatcgaagaagaccactggagtttgaagagggtgatcatgtgtacctcaaggtgtcaccaattcgtggaatgagaagattcaaagttaaaggcaagttatcccctcgctttattgggcccttcgtaatctttaggcaggttgaggagatggcctatcagcttgagctacctgatcatctgtctgatgtacacgatgtattccacgtgtctcaacttaagaagtgtctccgtattcccgaggaacattt

SEQ ID NO: 98787 - DNA, 579 bp, Zea Mays
gaagagtgcaaccccttgactcagccagagacagatcccaacgactggagagagcctatcatcaggtacataaaaaatgaagaagagccggatgacaaggctgcagcagaacgcatcgcaaggtagtcagcccactacaccatcatagggggcttactgtataggagaggcgccggaggagccttcatgaaatggattcactcggctgctgggaaacaattgctagatgaaattcatgccaggcagtgtggggtgcttgctgcgtcaaggactctggtcggaaaggctttcagatccggtttctactagccaactgcgaagagcgatgctgccgagttagtccagaagtgtgaagcgtcccaattcctatcaaaacaacaacacttgcccgcgcagcagctgcagaccattcctgtaacatggccttttgcatgctgggggctggacatgatcgaatctttcaagaaagctcaaggaggctatactcatatactggttgccattgacaaattcacaaaatggatagagtacaagccaattgcctctttgacctcagccaaagcagtggagtttatccag

SEQ ID NO: 98788 - DNA, 594 bp, Zea Mays
ctgattcttccttgacatgaaatcaagcaagagcccctccagggattgcctgaagcaccctactcacaaaattctccaaatgcccgaaggtgtgacaacgaaacactacccagagaagaaaagatccatcaagaaatggtgaggtatgatgcaaaacagatctaaatttgtgtaacacttccttatataaaccaataccgtgagagaagtctaggtccgaagagcagagagagcgatgctctccacctgccatgaaagcagggaggagaagaacataagcacaaaaaagaagatagaagacaatgactaaaacaccgaaggacgggagaaaacgtggacacaaaccgaaggctatattagagtagaaccccatgattcttgcgcccaagcaggaccaccggaggagggacagacgagcgccattgatgtgcaatgttgggttctctaggagctctttcttattttttaaaggttttggtatttaaagtcattaacagttgtaaccatgtccagtgggccccacaaggttatgttcaatggcctccatggtggtcgttggacataacattattatgcctgatggttgcatccggg

SEQ ID NO: 98789 - DNA, 425 bp, Zea Mays
ttctttttttaggtggactacgtgatgtgctggtaaagctcctctttcctctactactaggtgtactagaattcaaaaggtcttccccatctccatcttcttcttgttcttcatacactctgtgtacatcaccagggatacaagaactcgacccataaacaacaattccatggaacatttctgctaattgttcaatgtatgtaggaatcgcatgttgaaacttcctgcactcttttcttttctgcaataaaaggtaacacacattttagctatcagttctaagggcttcatgtacagagatatatgacaccagtgcactaacctctgtgtgagtcttccagaattaatctgaaggtataactacaccatcagcccttcttcctaacccactttgattgttaagaaacaaccaaaaagagtacaag

SEQ ID NO: 98790 - DNA, 412 bp, Zea Mays
ctgggagagtagataactttggatagattcactgctcggcggattgtgtcgggggggagggttaaaagatcgggctcgcacgcggcactctcttaagtgcttcatgccgcagtgtcaccagcggtcgagctcttcctcactatgcctctctcctatgtggtgtccatgcgcttggctcgtactctcgtgaccgtagatagccaaccatgccatcgcgcaattgtctaccacgacgcccggccgtagtgaaagaaatccgagcaccgttgtgaacactttcatcccaaattcacgaagcacatgtgtgatcactataaattgaaggctctctctgctccaccttcttgttacgaacccaacacaccactcctcactcccgatcatgaaccatagctcgtgaagtacagattcc

SEQ ID NO: 98791 - DNA, 420 bp, Zea Mays
ggtcgaagggcccttcaccaagtggtgtgtcatcatcaattgccttcttggcctcttcgaattcaataggcccttttcccttctcctccgccaagcaggcttggaggaacccttgtcttcagctgccatgattaccgaaggagtcactgctgcaataattcgttcaaatcttggactacctagactagttttatctccaacaggcggcatagagaccttcgacactaatattgtaccaccagtgtatttttagcctcatcttggaaagcatcaaagaatgaactcattactggagctattcgctccccttcatcttcttcttcttcctcgctctatggaagcatctctaaaggtttaaccttctgtgccatcaaggcgatagcttctccaattttcacttctttggctcccataggaggg

SEQ ID NO: 98792 - DNA, 756 bp, Zea Mays
gactgcctcctagaacaattgttcagaggtggctggcactttttggagtatggctcggacgaaggctgagtcattggacccccgatagaagtcttcaattactgccgcctcagcgacttcggggatgcggttcctcattgtttcaaatcttttgaggaacgatcggagggtctcgtcattctggcgcctaatggatttgaggtcccatggctgcgccggcttatcggaaagagattggaagttcgcgataaactagcgattgaagtcactccaatcatcgatgcagtgctgaggtaggtgtcagagccactgcaacgcgtcttgccctaggacaatgggcaagtacgccgtcatgacctcctctgttgccccagcagcccgagcgacagtcgtgtagatggccaaccagcctcccaggtcatgcttaggctcgtacttgtcgacgttggagaccttgaagttgggaggccattggatggctcggagatgcggagtgagcgcggaaactccgcacgtgtccttctgccaatgttcgtgtcgtcgatcccggggagggaagttggtggtaggtcgtctcgaccgtccccgaaacagtccactagttgaggctaccgcggactcaacttgggtggcacgacttcacactggtacgccgtgatctcggtcgtactcctcccggcaccctatctcattttcatgtcatcggttgcacgaggcgctgatggtgctccacgcgtctcgtcggctgttgatggc

SEQ ID NO: 98793 - DNA, 837 bp, Zea Mays
cggtgaagtcgaagccatgtttatgatgctttcagcaacattacactcctgatgcatcaaatctatgttatggggtaagatcaatgccttcgtgtatggtagctcttagagaaaggatatgtatgtccagttgtgttctttattgtacccttcgaacccacctccttctgccagttttaggtcacgatgttgtctcatgatatcttcacctatttgtcgcttcggaggcccatctctaaccctcatgcctttccaaaatgactttgtatcttttctaaaaggatgattagagttaaggaaacgtcaatgcacatcaaaaaatgtttccttttttcgtgttttaacctatatgcttacgactcactcatacatatcggataacacagcctaccatggacacaccacccgcaccaaatgccatatgccaacagataatgaattgaccatagatatgtcacttgtagattaaatctacaatttagatggctatcataagcctccaccccttgccacaacactttcagctcttcgatcaacggttgtataaatacattgattttagtacaaggatccttagggcccggaataactagagcaagtagcgtgacctcttctttcatggatttggtaggagggacattctagggcatcatgaaaatcggccaacatgagtacggagtggaacttttgctcaaaggagtgaatccatccatcgacaaagcaagtcgaacacttctagggtcccttgcaaattctggatcaaaatggtccaatgtctgccatgcctcgccatctgatcaatgcgccatgatatccagatcttggttctgatgatcc

SEQ ID NO: 98794 - DNA, 634 bp, Zea Mays
gattactataccaaagttaaagctggattataggacaataactttgatacaggaagattagtaagtagtcatatggaaaatggagagcaaggctcctcaaatcacgctgtcagaacgactaaacatgatggccatggtacagtgcgcgaaaagatcttcaggttcactacatttcaccaccggtgatccgccgccacaattcgcgcccgcctgggagattcgtgttacggaaagagtagataacgtcggggcaaggtgaaaatatccagtgcggggtgaatccgatcgctggccagaccagccgtcgtgtcccaccgtggtcaatcacgctggcatcactagagttcaccgttatccggccaggctacgtgcctcaaagccttaccacatcgcaatagaccgctttaggtagcttgttcatcacctaagacactgccccggtaaaagccacgatagaacttgcgccagtgatttcccctctctccgaccgccaccacccttccttcaaattggacgccaccgctgtagaactctataaattgctgcccccgtgggttccactaggtatttacgcatccaacgcactagcccttgcctcggatcatccactagagccccttatcttctcatttcc

SEQ ID NO: 98795 - DNA, 422 bp, Zea Mays
gttcgtgtcgttcgccatcgcccgcgcgtcgcgcaataaatcgtcgcgtgctgttcgcgcgcgttgcgcgtgctgttcgcgcgtgtcgtcgtgcgttctacgcacgttaataattcatctcacctagaatagctcacgctaattaaatatatatttaagcaacggttattcgaacaacacactaatcgggactaagtagtaattttactcggcatgtgattattgtccgttaatatgattacgtcgaattaaatattataattcacattcgcttagtgtaaacgtgatatccctcgaccgtagcgtcagtcgtctcggttccgttctcgcgtagtcgtagatgcgaattctatgtcgcatgcatattcatttgatctatattgttgtatggtgtactgttttctaccatttcaagaatgttg

SEQ ID NO: 98796 - DNA, 286 bp, Zea Mays
ctcctgatgaaggtactagaagatgccacctaggacgctgtgcggaggcaggcaaaggtaacctgttttctttgccattaattgtagacagccacaccttcatagtcatattttgtggtcaaatgccaatgctaaccaaatttaaaatttgtttttgtggagatgttattttttgagatatccaccacaagtgtctctaccaggatcatcatttctgactctgcaatgtatctgccttgctccatttgcattctcatgtcgtataggcatttaataaaaaaactgt

SEQ ID NO: 98797 - DNA, 502 bp, Zea Mays
gcggggtgaagcttatcacctgcgcctgtagccgtgcgacgtggctggaccaccggtatcgccgtggtactccggtgacctcaattatgccacgccgtagctctttaccgtgtagtagtaaccgtggcatgcctaggcttgccattttagaaccgttgcatcggcggacaccacgattgagccgccagtgacctcccctctctctggccgccagcgcgccttcgcaaaattggacgccgccgccaatggaacctataaattaccgccccagtgagctccgcaaggtcgtcacgaagccagagaacccgcccttgtctccgattagccaccatagcctcccaatttctatcttcccccaaatcgaatttccacgctaccgtgaacgccgcgccgtggccagctctctacaggtccgttcacaccctcctcgctctcatttcaacaccctggtgtgctatggatgcttatcagcccagccaattagactagatcacgttagatc

SEQ ID NO: 98798 - DNA, 634 bp, Zea Mays
cacattttgacatggaaacgtagaatggcgtcgtctgaatgaactggttggtcccaagtgcttcgcactatttccttgaagccgggcattgaggtcaaataagattcaaaacaaaaacccttgtagaaatccaaggtaacatccccctgtaggagcaaaggggcatgatctgaagtcatggacgccaaagcctggagatcagaattggggaaaaggtcctgccattctatagagcagaatacatggtcgatgcgagacatagtaggtgtgacctgttcatttgaccaagtgtatcgacgacccctcattgctagttccactaattgcaagccatctattactcgtttgaaacgattcatcatttgaatattaactctagtgttgtttttgtcgctcatacgttaaatcaaattgaagtcacctagaaggagccattttgggtgtacgatctgtttaagatgggtgatctcatcgagaaagagaatcttgtcctgatccgaccgtggcccatagacccctgtaatggaccaatctgtgtcatcagccagtaaagtaatagtagcagagactatgtgatcagtggtatggggggagtggagttggaaaaaacgatcatgggctgccagcaaaatgc

SEQ ID NO: 98799 - DNA, 349 bp, Zea Mays
cagagattggtggcggtataattcaattgggtgggtcggtgagcttaaggaggatccaagaatgctagaacaagcagcaaagggacttgagctcacctaaaccgagctggccacggtgaggtcttctttgcggtggcagaaagttgatttgggggaaaacaacgattctccggctaggggggctaatcgagggggagagtgggtgctatggcttcgtggtaacttggcgcaacagccccggccatcaatttataggaaggtaaagcggtggccagtgattttggggaggacgcgcggcggccggaaatgaagaagaaggctctggcgcatgacacaggtggccattcac

SEQ ID NO: 98800 - DNA, 919 bp, Zea Mays
cgatggactgcgggttggtttcaactatttacagggactcatacgcaaaaccaacagccgaaagggtatcggcccatcaaagccgaccgatgaagaaaggatggcccagattagatccatcccgcggataactgatgcgagaccagtacggtcagattctgatccaacggtccaaatggatccagcgcctatacgagtctcaaccgatcgatccaagatcaacggctaacccagccccggccgaaacgttacggccaaccaatctccaccgcatagactctatccaatggctaaaacgcgtcccaccaaggatctaatctcagcccttcacagagatctaacggtccagtgatcgtcatctacattgctcatcacccgacagaacacctagccgcggcgttcactagacacggccaagccattgtcggccgcacctaaagctcgagtcccgcctgaaaacttcattccagcaaccgaaaaacgaagagctgaggattgcgagactggtataggaggtctcaccacggtttgtagcgcggacagccctggccacgggaacccgtggattcaccaacaccggcaagggatttcgcgatcaccggtgatcttccccctccccgacttctaactccatgcggcgaggttctgcgtgacgaggtgagtcaccctgaacacctatttcggtaccgaccgatggcgaggatgacatctagcatcggtggcgatctcttccctttcttttccctctctccgtcgattctctacgcgacgaaccacacggagatcgctctgctcgcacatgatgacgtccaggaaacaccccccaggcaccggattttatacccgagtttggttagaatctcaactgaaaacccaaaattcttggaattctgtttcacggttcgtctttgcgtctgcg

SEQ ID NO: 98801 - DNA, 538 bp, Zea Mays
ataagatgtctctagaaaatttatgtcaaatacacagattcagaaaatccacccactccaccaagttgcactaaacctaaaccccaaaccagacaactcgagaggaatgaaaagaaaaccaatttctaaaaacaagtaggaaaggtgtgcttacttgccgtagatctccttatgtatgcacttctcctccatggccttcgtttgtagtgccatactcatccatcttgcctatgtaaatagggctacaaccccagagccagcagcacacctgcgcacacgaccatcgaattgaatccccgtcggatgggaaataggaaaggaagagaagaaacaaatgagaataattagggacgtgaagatgttccagagatgagggacattattgacgaatagaaggctaggaatctcatcggaaggacgagccaccatatgcgtaggcgaagacagttgaaatgacgtagtggaaggtggggggatcgcggtctgcggttggggcaagcatcgcacgccgtatcgggcaagcgggccagtgttttcc

SEQ ID NO: 98802 - DNA, 346 bp, Zea Mays
ctggtttggttcaacccaacggagtaacctgctgaccgaaaccacccctacaacatcgtaaaacgacccaccctaaaattttgccctaatcttaccgaaaaaactccccttcacctacgccgccgagatccacagcggattcgtcctcctctccccaaacctacgattcaaggaaggtgtcctagatggcttcaacacgacgcccgatgccggtagcagcccgaacgaagcgccagtgtccaagcatccggttcctcactatcgcaccgccacccccataggtgagtgtaatgaatccaccgccgatctcatatcctcctctacctcgactcgctcgcaggcgaca

SEQ ID NO: 98803 - DNA, 391 bp, Zea Mays
acacatccggaaattctgacacaaccttgatagtctcgagtggatgtgcctccttgctaccaatagtcatctggtgacaacctcctttccttggctcgggcgagactagctcagtcaccacttcttctcctagtggggacaccaacttaattgtcctcttatcacagctgataactgcttggtacttatctagccaatttatccctaggataacatctattccctaagtacccattactatgaggttagcagggaactctatcccccttatttccacacttaaattcaagcaaacactataggctcgaactttaccaccgactgaatcaatttgagtgggtgttgacatggtgattattggaagattatgtgcttctacccatgatgcagt

SEQ ID NO: 98804 - DNA, 301 bp, Zea Mays
ttaatacgcaaaccacgctttcctatctcgcagacatatgggcctctgactcccaacggtgctacctcagtcccggactttgcttcatctgtatatataattctttttttactcaatcatcatatataggagtacatagactgtggtccatgttgagtaaacaaggccaccggggaaattgcctccagactccagagcccttctgcagcaggctgcaggctccttgttgtactcacggaaaccatacccatagctccaactcgaataacagaaacacctttctttatttcatataggagat

SEQ ID NO: 98805 - DNA, 557 bp, Zea Mays
gtttgaaataggggatgagatagaagaagagataagagagctattggagatagtctcgtattgtgcacagctaggagaggcacgcaatggagcccagtgacctcaagcaagttgaaatatagactcagacgagggaagaggaacccgatgacctagagatcgaacgaacatatggttattcgatctccagcagcttactcgtcatatcttttatattgtcccttattttaaacttcactttataaacagtacaatacattgaaaaacaatattttgcacattcatatacatcatttgctagagaaacacgtggagatttggacgaaacgtttgatatagaccccacttgtttcgggttatggctagattctagccattaatatcggcttctggtcaccagccgcttcttagtctgtttatgtgataatcatttctataaaaatcgctaaaacaacgtgaatacagaatccaccgagtcgtcgccgaaacaacgtgaatgtagaatccaccgagtctccgatcttcgtagaccttaaatcatggagacccctccattt

SEQ ID NO: 98806 - DNA, 279 bp, Zea Mays
ctgtgggcagggtggcgtaaaactattaggatgactgcgaaaattgtgtgtaagtcgcatctccatgttctatgtacacatagtcggacgttccgtctgtactctggatagtccgacgtgcgttgctggacggtctgagattgggtcgagaagtacggggttatacagagactgttcatccacataaggtgtcgcctaagtggccgacacgtagatcgaagtggggccagacgatccggcaaaggatgttgaatagtccgtgaggtgatcagacggtcc

SEQ ID NO: 98807 - DNA, 420 bp, Zea Mays
gtgttttgcaatttgtgttagagcctgtggaatggctcatgacgaaccgacggtgccatccatgctgcctggaccacttgcttgaaccccggcagcttggcccaaaagttctcaaaccggaaggaacgaggccgtcttgggctggtttgatttgagaggaggagcgggcagtgatccgataatgaagaagacaaggcttgcagcccatgactaccaaagagatcctcccattcaccgttgcaaaatattctatccggcctgaccaacgttgtgcgtcacctttcattgctccatgtaaatttcctattctgtaagtgtaattctttgagttcacactcatctattgcctgtctaaattgattcatgagccacaggttaagacagttgttatttttgtcccttgctttgtatatgcagttg

SEQ ID NO: 98808 - DNA, 305 bp, Zea Mays
cggcggcgaagtgcagtgtatctgctgatctttatcaggctactgtaccatcagaaccttcatcagtctgcctgacagagcatctttagaggtgtttttcacaaatttttatgtggcaacttcctaatccgtctttaacaaagttaatctcttatataccatctccaactcgaccataggaacctgggtcatttactcactctattaggcttaaatcaactccaaagtttcttagaactaactgttagtccagattcagtctcagggctaactaacagccagactttgggttcattttctccaat

SEQ ID NO: 98809 - DNA, 462 bp, Zea Mays
agatactcaaccaacaaaatcatgtgatcatagacagatgagcaaaagaaagataattcgctagtatgtacaacaaagagcaaaagaccgactcacctagagattggaaaggaacagtagtagacctagggtaggaggagctggggcatggcttgtcgagggaaggtcaacaggaacaatctgaagggcactatccggggtgacctcagccccaccagcagacagcaggctccttgcatctagctcgccgacctctaaggcgacttgtccagttaaagttgtggaagcacgtgccaccgttgctcctcagaccgaggtggggacgacccgatgtagacatccatggaggcattagaaagagagcacacctaaacaccctcggggtctaggttgtagtttgcactacccacaagagatggatcgctaccagcaacaccctcgggggttgggtagctgccagcc

SEQ ID NO: 98810 - DNA, 693 bp, Zea Mays
gacagacaaatgtaccaataacattgcagagtacgaagcattcatcctcggactctgcaaactcagggcactcggcgttaagacttgcatagtcaagaatgattccaaagtcatcgcctgccacgtataaaaagattgtacagcccgagagccagtcttcctccagtatctgtcgactgtgcgatgtctggagatgcaattcaagggtttttcaatctagcatgtggaccgaagcaaaaatgaggaggcatatattgtatattgtattttgatgattttgcgtagaaaggaattaataatacataagtagtataaaattcatgtaattttacggagacgcaacatatgtctacatatatttctaaaaaatgattggactcaagtagtggctaaatgattacgacactcgtgaagtcgtgatatgtgtggaatggtgtcttaccacggtatccgacaaaaaaatctgttaccgatgctatctgtgtccgactagtttcgtattcaacacgtggctatccgtatttgcatccgagaagattcgtatttgtatttgtatccgaagctatccgtattcgaattcaaatctaaataaaaatatgaaaacaaatatggtttctataatattcgtccgtatccgatccgattacatccctaattgtcggattcaacatggttcaccctcccattgaaaac

SEQ ID NO: 98811 - DNA, 322 bp, Zea Mays
tgagaacgacaattaaaaagggacagctgatgtatccatgttagactttgtgccatcgctcaacgagatctatttcttctaacagtttggatcacatacggcccctataataaatatgcatatacacgttctaccttatgagcacaagcaaaagaatcagatgggacgagattgacaccacgcctagctattgacgagcatggcttctaccactcaaaaaccaataatattgaatcatgaaacaaatgctagaatacgctatctctagcacccacgtccgatcaagacccaggtcaggtgggtagtttgcgttagagtgcgg

SEQ ID NO: 98812 - DNA, 420 bp, Zea Mays
aaaagatcggggggaggtgaatgtggtctctggcaccgtctcgatgatccgtgattcacttgctccgtaacgtggctgagcggccaacaacgtcgtggctgccattgatcctggtcatgccataggccatttcaccacgtacctaagacggtggcaagcagtaagtaagcattcccgagccattgtgccattgcgtgccatgacgactgacctcggtgaaaaatctaagcgccgtcgtgggaacttccctcccaaatttgcgaagcaagcgatcaatccctttaaattgagtgccctccctgctctgccctctggttacgcacctagcgcaccacttctcacctcagatcatcaaccatagctcgtgaattctggatttcgccagaatcggccggaacgcagtcgtaagacatctcgtcg

SEQ ID NO: 98813 - DNA, 655 bp, Zea Mays
ctgggagattcgtgccgcgggaagagtagataatgtcggggtggggcgaaaatatccagtgtggggtgaatctggttgctggcggaaccggccgtcgtgtcccaccacagtcaatcgcgttggcatcaccggagttcaccgttatccgaccaggctacgtgcctcaaagccttaccacgtcgcagtagaccgccttaggtagcttgttcatcgcctgagacagtgccctggtaaaagccacgatagtgcttgctccagtaatttctcctctctccggtcgccagcgcgccttctcaaaattagacgccaccgccgtaggactctataaattgctacccccgtgagttccgctaggtaattacgcatccaacgaaccagcccttgcctccgatcatccaccagtgcctcccaatttcgtgtttcccccaaatacgttttccgggccaccgtgaacacttcgccgtggccagccctctataggtcagttcaaacttctttgattggtgtcctagcctccctcaagccccctgttgctcatagacccattcgattaagctagatcacaccaaatcgtcgtgaacacctcggattgtctcagattttcgccgtcgtcgtgggcagagagattttggccaggattcatgtaattagttga

SEQ ID NO: 98814 - DNA, 343 bp, Zea Mays
aatgaccaccactcgaattttctgggccatcacccttccaaagaaaacttcgccggatacgatcaatcctctgaatgacccatttttgcggtgggaacactgttaagtggtagataggttgagatgatagaacaatctttactagggtttctctaccagcttttgataggagcttgcccttccaaccggctagtctagcaccaatcttatcaattagaggctgcacctcaattcgtcaaagttttctagtgtgtaaaggtagacccaagtattttacagggaaggtcgagatcctcccgggaaaaagatgaatgagcgagctgaccgtggcagattgacaacg

SEQ ID NO: 98815 - DNA, 534 bp, Zea Mays
ccggtaccctagaaccatcaacgacgagctcgttgagttagggcagcttcccgatgacgtcgacgacatgggagatgctgctgctgccttattcgatgtcggtagcagtcatggtgccggtgacctggaggggacaggtgccgggccggttgtagttagtgatgctgctggctctaacgaacttgattcattgacttcttccagcattggtaagcgttgatctgctatttaggatgacttcactgaagtcactgaaaaccgtaatggtaagaaggtgcgcattgctggcatttgcaaattttgcaaggctcggttgagtgctaattctaatgctggcactggacatttgcttaggcaccagaaatcatgtaaaaagaagtctgatcatgctgctatggttcaaactagactagctttgaactctgatgggtcttttagaaactgggaatatgatcctcaggtggctaagactgagctttgtcgtttgattgctatacttgatcttcctttagggatagctgacacagatgcttg

SEQ ID NO: 98816 - DNA, 412 bp, Zea Mays
ttcggttagttttgttttaacttcgctttgcatttccgtagccttggcaattttccttggagtagagcttgaagcctttaccgtttctaacacgtctagtacacttgccatccttcttcttttgggagtggccgcaaggcctttttgtgtcttcggcgttgatacttttgccgaagggctgagaacttctaacatttttattcctttagtctctggttttttggccttatctttaccaaactttgcctcggcttgctcggctaagggtgccttcagcattgtagccggttcttcagcctgttgcgtaggagcaattaactctttaggatcagcagctgaagaagtcttcccaccaaactcgggcaccacggctggctcaatataacagggtcggtgggtgaggactttcaac

SEQ ID NO: 98817 - DNA, 695 bp, Zea Mays
aagaattcaaagctggtgaagttggatcccaggtcggtaatgatgctatttggtatcccaaacctaaatattatgtcttgtatgaattcccctgccttggctgaggtcaaagaggcaatgggcttgtactctatccattttgtgaatttgtcaatggcaaccatcacgtgagtatagcctccctgagctttcttgaaaggtccaatcatgaccagccccagcatgcaaatggccatgttacaggaatggtctgcagctgttgtgcaggtaaatgttgttgccttgataagaattggcaagcttcacatctctggactaactcggcagcatcactcttcgctgttggccaatagaaaccagatctgaaagccttcctgaccagagttctagatgttgcatgtactccacactgcccggcatggatttcatctaacagttgcttcccaatagccgagtgaatgcatatcatgaggactcccgtcacacctcttctgtatagtgtgccccctatgagggtgtagtgggctgactgctttgcgatgtgttccactgccgccttgtcatctggttcttcttcattttctatgtacctgatgataggctctctccagtcattggggtccgactctggttggctcaatgtgttgcactcttctgtctgatctgagagaatgctcgggcgtgatacttcttgg

SEQ ID NO: 98818 - DNA, 417 bp, Zea Mays
caatttcctactactagagagagacggcctcccttcctctcgcttcgcttacacttctcccctccccccaacccaaacccaacacaattcccccgtgttgcctacacgcactggccacgaccaaaccctaggcgccgccgcctccggggccctcaggtacgcctctcgcttacccgccgccgggatttcgccgctgcgccgccgtccgtggctttgaacgactgacagcttcgcactagggttcgttgcgatttcgttgttaggagtgatttatgttttacttttctgtttgtgtgcgtgattggatcagggctgtcatacggggaaggaggaggatatcggtgaggagagaaggggatttatgtcccagcgaggtgacaggggcgaggggcacgccaggagacccggccggtccag

SEQ ID NO: 98819 - DNA, 570 bp, Zea Mays
tcaagacaagatagtgcttggcaatgatgatgagttatcaatcagatgcttttttctgattctattcaatcgacttcttttttttctgcttcatggggcattacaaacaatgaggtactaatgacttcaaacatggcccgaatggctgatgttgactggtgtcaactagtttacacggatttgtgtgatgctgccacacgttggcataaaaggaacaaaacaaacatcacaacaacaatatatggatgttcactcattgttctagtaagtaattcttttgtttactgtgcatataaatgatatgcaaatatttgttatgtactaattttatatatttatgcattcttttttcagatttactatcttgatcacttacatcaccctgcatctcctgataacaaatatggtactccccgcattaagttttttgataatgagaccataagagagttggctaggggtgacagatgtccccccccgtaaaactagtgaaccattcggctatgcagaggttatacataaacaatttttgtcatgttatgcagatgttaaaattttattactgctaac

SEQ ID NO: 98820 - DNA, 293 bp, Zea Mays
gtcactctcggattgtgtcgacccagagatgaagaaatctgagggtgataaaggttgcacctttgcgcattctgcaaaaatagcttgctacaatcaccaaacataggttagcccaagtttgaagatggtacctgaagcacaaacaatgaattttcctaagagtagaatctgcaaaaaatatagccatgattaagagttctagcatttaatttgaggatcaaaagtgagacttttgcaatgaacatgacaacagaagataactctcaatgcataatacttcatgcaaaaagttg

SEQ ID NO: 98821 - DNA, 403 bp, Zea Mays
cgctgagggtgaactgcactcggcgataaatggctggtcgctaggattcgtcctcgctgcgcaagctccatcggcaagccatcgcccatctcggttggagcgagctagaagaaggtccctgcactgttcattccgtgatcgatggcaatgattataagattatacccccttcattgttctgatctcgacccttgatcttagatcatagggttctaggaggctcaacatgttcgaacctctctagccattggatcgtgggagcatgaatacgattagatcctgggcgtagcgtttcatcgtccaatctgatccgttgatcgagtaatggatgacgtggattaggtcgcgcataccccttcgcatgatttaatctaggctgttgaattggatcggacggctgaga

SEQ ID NO: 98822 - DNA, 585 bp, Zea Mays
acatgcttactcgactcatggtgaccaatataccctactaacggagcaatcggcttaagtcggcaatgacttaaggcggtgtgacatgctcatgcttacttaactcagggtgaccactataccctattaacgaagcaatcggcttaagtcggcaatgacttaaggcggtgtgacatgctcacgcttacttaactcagggtgaccactataccctattaacggagcaatcggcttaagtcggcaatgacttaaggcggtgtgacacgctcatgcttacttaactcagggtgaccactataccctactaacggagcaatcgacttaagtcggcaatgacttaaggcggtgtgacatgctcacgcttacttaactcagggtgaccactataccctactaacagagcaatcggcttaagtcggcaatgacttaaggcggtgcggcatgctcacgtctactcgatccggcataagcatgtttacgattactcatcttagggcgatttttatgcctcacaaaataaaaagaagtttcaaaaccatcacactgcacttacttctgcaatcgtaacaactgttgaactcaaac

SEQ ID NO: 98823 - DNA, 542 bp, Zea Mays
cattagtacttggatacacagttgaattttagttcggcctaccatcctcaaactgatgggcagacctagacgactaaccaagtgttggaggatatgttaagagcttgtgctcttaaacatggtggtagttgggataagagcttaccaaatgtggagttctcgtacaataatagctaccagcccagtttcaagatctcaccatttgaggctctatatggtagaaaatgcaggactccactgtattgggatcaaacaggtgaaaggtagttctttgggcctcaacttatacaagaggcagaggaacaagtgcgaatgataagagagaatttgagaattgcacaatcaaggcagaagagctatgttgatacccggagaagactactggagtttaaggaaggtgatcatgtatatctgaaggtgtcaccaatccggggtatgagaagatttaaagttaaaggaaagttgtctcctcgcttcattggacctttcttgatcttaaagtgagtgggggaagttgcatatcaactagaactacccggtca

SEQ ID NO: 98824 - DNA, 374 bp, Zea Mays
ttggaattggcgagctctggtgaacaattggaggcatggcttggtggcttggtgcttgacgaccctacggacccgtcgttgtgctcaatttatagtgtgcttgagcggtggcctccaattttagattggcgcgctggcggtcggagaggaagaagggtaatggcgcatacgattggtggccgcaacagtggcaacctcaccggcgatctgtggataggtcagtatgagtcacggcggcgtggttaaagtgctgaggcacgtggcacaagaccatgaggtgtctaactccggcgagggttgattcaaggcgatcggggtagagcggacacggcggccggataaacagtgccttaagctcatccggggggagaaga

SEQ ID NO: 98825 - DNA, 448 bp, Zea Mays
gtttccattttgtgcaatacatgccacattatcttcatagatattattaggtatttgcagtgtcaaaccagatgacatctatatgtgattagtcatacattcatgtgtgtctttatataatgtggttatctccgagtgtttagtaaacatagctactagtgtatgtttgctcgatctctaggatatgacagtaccacaacaaagaaacataaagccaatttaagatatctactaggtggtaatgctgagtaaacagagaaaacatcctggaattcggttaataatgaagacacaacattatccacatcttgttgctgctctaccattttctccaacaacacaaaggacgagaccttgttacctttcaacaatttgtctagttgaatgcaggaaatttcagtcacctcttgcagtctcttagttgtatcaccttgaagctacattataa

SEQ ID NO: 98826 - DNA, 567 bp, Zea Mays
attgtaccaaaattctgccaaaggcaaccaattcttccatttagtgggttgagcatggactgcgcaccgcaggtacatctccacacatttgttaacccgctcactttggccgtcagtctgtgggtgatatgccgtgctcaggttcagcttagtgcccaacagcttgaataattgactccagaaaatactcgtaaagattttatccctgtcactgacaatagatctcggaagaccatgcaaacggaccacctgatccaaaacaacttgggccacctgtgcagcagtgaaagggtgtttcatagctataaaatgggcatacatcgagaaacgatccaccacaaccaagattgtatcatagccactggacttgggcagtttttctatgaaatccattgcaatatcctgccaagcgccttgagggaccggaagcggttgcaataaaccagccgggtggactctctctcctttggccttttgacaaattggacactgtttgacaaaatcttccacatcagtcttcatacccttccaaaaaaacaatttcttcagtcgatgataagtggtgtg

SEQ ID NO: 98827 - DNA, 699 bp, Zea Mays
gcaccaactcaagtcttcaaggatcaagtgaggtcaccaagatgagtcaagatccacaatcttggatggagtcttttcttaccccactccttcttacccaaaactatatatgctttaaagatatcattcatcttgcataataaagtggctatacccatatatacccaggccttcctaatcacccactattgtctataaaaaatatatgaaactccggatcttaaacttattatggactaaaagacgaatcacaaaccaatccttctgtatccctttccttacaaatctcgaggacgagatttctgttaaggggggtaggatttgtaatactcaaaagtgcaataatgagaattgagataatttcagtaatttgtgtcctctacttatcatcacatgtgatcaaccctagttataaatggataattaacacaaagaacacataaataacctgtgcatcatgctggagtttatttgattgtgcatttatgcatcaatagcaatgtaataatatgcccatgacatccaaaccctaaattgaaaacaaaatcatgaaaatggagaaggaaaggaataaatatggtacaatgcaaaataaatatataaataaataaattcctctcacgttttaggtatgtccaaattgtactattaatctgagagtgaaactgtcacaagtttgaatttagattaggatttaaa

SEQ ID NO: 98828 - DNA, 575 bp, Zea Mays
gacgccttcgtcttgacgatgaatggaccctcccactttggctccaacttgccctgtgactctgtccgggttgttcggacgagtacgaggtcccctttgtcgaattctcttgggacgactgtgtggtcgcactaggccttcgtttgagcttggtatctgttgagggactgcatggcgaagacgcggtctccgtcgatgaggtctttggaggttggttcgtctacgtcggggacggctgaagtgcttgtccgtggtgacccatgttttatttcctacggggtcatggcctccgatccgtatagcaggcgaaagggagtgaatccagtcgcccggcactcgatcgtgttcagcgcctagactgcttcaggtagtaggtcggcccatttacccttcttgtcgtcgagaagcattttcttgatggcaatgaaaatcttgtcgttggcgcgctccacgacgtcgttagattgtgggtgatatactgaggcgaaggcaagcttggtgccaatggagaagcagaagtccctgaagtcctggctgtcaaactgtttgccattgtcgactgtgagctcggacgg

SEQ ID NO: 98829 - DNA, 359 bp, Zea Mays
tgtctaggaataggacgcatgcaaacaagtggaggatccatgctcaacagtaggactgaactgtgtcctcgtcagcatattgtggacacactccgaaggactgtctcaaccaactaatacggaccccgacagtacggtctgcaccaccctcgttaaggatagctgggaggtccctaccaaggaaagcctcaactctagccctccaatcactcaactcgcatgagccagtgactaggttgccggagacacgcaatcccaatattttctgtgcatcctcgagggtgattgtcatctctccaaaaggaaggtggaagatgtgagtctatggcctccacctaaatgaaacaaataaccaaata

SEQ ID NO: 98830 - DNA, 893 bp, Zea Mays
ccacttgcccttttatcttctaatagtcttttctttattgatctaaagattttaccatttgcgtgctctactaccccgttagattgtaggtggtagactggcgcgatgactgcctgcgtaccgatggaagcatagaattccctgaaatcttgattgtcaaattgttttccattgtccactgtcaacttggagaggactccgaagcgacagacgatgttctgctagaagaacttttgtgctgccttcgctgtgatcgttgatatagctcttgcttcgatccacttggtgaaatattctactgcaacaaaagcaaatttgagattgccttgcatagtgggcaatggtccgactatgtcaaggcccatcgttgtaacgaccaggtatgggtgattagctttgtgaattgcaagggggcctcgctctaggtgaaaatttgtggcacgcttcgcacgagcggaccactcggtttgctgcgcacacgatggctggtcagtagaaaccctatcgcatgaccttagcggcgagggctctgggtcctgagtgtgaaccacatgttcctctatcgacttctcggaggagttcaatgcccttgaccgctgtgatgcacttgatcatatgttgacttattccctttttgtatagttgtccatctatcactgtgaagtcatggcttcgatgcttcaatctcttggcctcggcctggtcagcggggtgatagtggccttgaagatatagggttatgggtgtgcgccaggcttcagtcattattagatttacatttttgtggccctcaggatcttctatgatttgcaggtcttcggtattccttacggtcgttgtgccaattatgtggaagaacacatctgatggcaagggatcccctttcgttgctg

SEQ ID NO: 98831 - DNA, 631 bp, Zea Mays
attggatctaggttttatctatgtctagattatctctagtgatcgttgttgttctttatgttggttcgagttcatcctagtcgcctgatcgagcacgcacaacatatccaatggatgtagccctgagccctcgagtaatttcgtgaaattggttgaggtgttgccaattagtaggacttggggttttcaaaattgacccatcatgcgcatgcagcgcatctgatggtcataacccctaacccctaggtgtttttgtaaaatcgatcgagggtttacatgtttgatggcctagacatagaatttggtcatctagtcgttaggcacgctggggcggacacaaacccctaagcccaagagcgaatccatcaaattgcttagcatgcacttagtgggacgaccttgtttctagacaaaaggtttggtcatatagtcattgagtgcacatggcatagtggggcggacgcatacctctgagccattgagtgaatttgttgagtacattagggttcatttagtgggatgaccttgaggctagactaaatgtttagccatctggtcgttaagcacacttggcgagctgggacagacgcatacacctgagctcccgatagacgtgtgttatgatttgttg

SEQ ID NO: 98832 - DNA, 641 bp, Zea Mays
gtatgccccttgtcttctccacaggaaaggaagaacgttttccttcattgaaagttgaatcttcctccaaaactccttcccccctcttccacgtcttggggccggtggtctaaaggtattttgtgattgttgttgttgttgttgttattgggttcttctaggttgaggttgactttgttatccctaagcgtgattatttttgtcttcattctgatttggattatgtatggttctgatatgtcttgggttgaaccatccgctgaagccgctggtcatctcggaatatgtcaaggcctccttcctctaacgaaagtcattgtctgctctgatatactcatccatcttctaaagaagcttttctaaggactgaggtggttttctggcaaagtattgagccgccggtcccggacgaagccccttgatcctggcctcggtaactatttcatttggtactattagtgcttgagcccgaagccggaggaatgttcggacataagcttgcaagtattcatcatgatcttgtgtacactagaaaagggtctgggcagtgactggcttcgtctataatccttgaaagcttgtgatcaacatgtcctttaatttccgccaagaggttatgttcctggttgaagagaagaata

SEQ ID NO: 98833 - DNA, 380 bp, Zea Mays
acaaaattcgaattggtttgcagtttccgatattgagagcaagggatattggctgggagcatgctgtggatcttgatggaaataaaagacggtggcaatgcaagttctgttctctatgtcgaagtggtggtgtaactactttgaaggctcatctcattgatgacagctgcccaaacgttccaaaggaaatttcaaagaaagtatcaaacttcattgaagagaaaagagcaacacgccttcttttgaataattatgtctttaatgttgatgaggacttcaacacaatacttcaagaagggactgtagaatatgtaaatgaacaacaaccttcaagaaaggctacatatgtgcaaacattatctaagtgtgctattaatgag

SEQ ID NO: 98834 - DNA, 774 bp, Zea Mays
aaaaaacaagatgtggctaactaaagagagctacatggtcaggaagaaagtccaactcgagaaggaagtcgatggtggagatggaagagggagaaagaaaagtcatctcagcgaaaacaatgtgacaggagatcaagagacgatgagtgataagattaaggcaccattaccccttgtgattagggaagtaaccaagaaagacacaacgggagaagtggggcaagattatgggagtaatggtagaaaggttgtggtagcatgcaaacccaaagatatgaagatggtcgtaggagagtggtgccaaacatagtgaagtagagtataggatcacgaaacgccttagtacaaagatgatcaaggatggaggtgatgtggaggatcttagccggtagccaacatgaacgaaggcctgaaagaccaaggaacacatgatgttgttagtaatgcaaatcatacgatcatcctcgccattctagaaagaagtgtaggggcagaacatccgaagttgaacaccataggagaagaatgactgagctgagttatcaaactcacagtcgttatcacgctgaatgaccttaatggtgcgaacaaactaagtggaaaccaagcaaagaagtgcaggagagtcacaaatgtatcgaacttcaaacacaagggaaaatccataaataatgagagtgatcatcaagaacgagtagataatagtataatacttatcactaaaaacagaagaggtccacaaatcatagtgtataagaacaaaattgtgcactg

SEQ ID NO: 98835 - DNA, 337 bp, Zea Mays
caaacatgaggcagcacagtgagaggtcaagttcaagcgcgcattggctccaaatctttgagattatagccatgatcccgttgagagatctcttcccctgacattcctttgtcgtttatgtgtggaggcttgcaggttttgctgactggatcaagagatagagaggggagaaatctggtttgtctcactgccgcgcacagagagaagatcgcgggtttgacgtgtccaaggcatgcgtcccaatgccatcttctgacatgagatagaggggttagttaggcacaattttgtcaatggggtcattaggatttgagctagggatcaaggtgaacacgct

SEQ ID NO: 98836 - DNA, 435 bp, Zea Mays
gccaagctagctgagttgtatatggctcgaatagtttgtctacatggagtgcctaagaagatcatgttagactagggataacaatttacttctcggttttggcagaagttgcacgagtgcttggacacacaattgaattttagttcggcctaccatcctcaaactgatgggtagaccaagagaaccaaccaagtactggaggatatgttaagagcttgtgctcttaaacatggtggtagttgggataagagcttaccgtaggcagagttctcttacaataatagctaccagaccagtttgaagatgtcaccgtttgaggctctatatggcagaaaatgcaggactccactttattgggatcaaactggtgaacgatagttctttgggcctgaaattatacaagaggcagaagaacaagtataaatgataagggag

SEQ ID NO: 98837 - DNA, 295 bp, Zea Mays
gctggcaccacccttgaggactgggttctctgcaacaaccacctctaaggctgaaggattctcagtcacctccatggtaattgaacgaccttgaccaatctcttgggctctgaagaccgccttccaaggtcgacgatgcatgcgatgctgcccgggatacctctaatcccacatctggaatgtcagagtagatgtccatcatattaacatcagttggctcggacaacagatcttcaggaacaacatcctcaagagcctgatcaaaatttgctatggataattcttgcagaccaac

SEQ ID NO: 98838 - DNA, 307 bp, Zea Mays
gtgaagtgtgcgcttggtttgattttaggcgaagaaagtggaatttgggcactcggctcagaatcgatcgctagaaatagagatttgtgtaaaattgaagcctaggatgtcggattggcgtgagattttgcgaatatgttactggaggtatcatgaaggcgtctgaaaattttgggttcaattggagcatttttggctggtttgggtatttcaccaagcgcgtggcgtgcagtgttctaggtttagagtgaaatgcctatttgaggtggggaaaccctcccaaagggagctaggaacctgcagagat

SEQ ID NO: 98839 - DNA, 983 bp, Zea Mays
aagaagggtagcacataaccagaaacgtcagtgttctgtgcacctctgtgattattttgccccaagcctgttttcttgctgcacccatatacttgtacctcctttcttgtgccttggtccaactgttctattacattttctaggccagcaactaggacgagtacttggaacacttattcagcattgctatctgttactgacttgtgtgccacatatatatatttagtcagccttcccagaactccagctttctctcgagcagaacaggtactcctttgcaatcacactcacgctcgttggacagtcacaccgatcactgtttgccacctgcagtgctggtaaaagcgttgtaagagcggggtaagacgcttcataatttgtattccaccaccaccaccaccaccctgagagatagttgtagggttcacattgtttgttgcctttttctctctgtttgtgctaacaatgacagaaccaatgaatcaaatggacaaggacaaggggcctaagcttaacgacgatgagtgtgtctctcagctggaattgaaggagatgatgcacgcgatgactaaagcttttaaaaaataccaggactctgcggcgacatcctatgagcagcttgatcgacgagttgataaacttgttacacgcatggacgtactggaggctcgtcccccaccaacaactccagccccatatcactctcctgtggacgacgacaacgatgacaacgatgtttatgcaccgctgccacaacgcttcgcacgtaatcgacaaggtatgggaggtaatggtagacgtcgtcatcataatcctgaaccataccatgatccatttgctaagattaagttttctattccactgttcatgggttcttatgatgccgaagcttacttagactgggagatgacagtagaacaaaaatttaattcccatcttgttcctgagcagcatagggttagacaagccactagtgaatttag

SEQ ID NO: 98840 - DNA, 611 bp, Zea Mays
gtggaatgtcgtttcatcaaaagaatttgggaggaagttgctgtttgggtagctgttgagggcctgaagccgtctaactgggggcgacccccctcgctggggcatcggtgggaaaaactggtttttttgccgggatgcaatagaaaaggcatcagatcactattgatccttgtaaactgggagatttggcgagaacgaaatgcgaaaatctttgatcgcagattctcgagctgccaacaaatcattgccaaaatcaagagtgaggcagcagcctggaatttggcaggggccaagcacctagttaccccttaacaactatttagtggggtctgttttttatttctgtttacttctcttcaggttagacctttgcctagtgtttcggtcactgtattgacttaaacctcttgttattcttcttatcaatatatcttggcagacctcctgccttttcaaaaaaaaaacaggagggtaacggtaaggtcggaccgaaaacggttgtgcaccttggatgagaggtatagcatgatcacaactgcggctaggtggaagacccactggatcagaaaagacttcagcaaattcggtcaacatcctggaaatgtcagggt

SEQ ID NO: 98841 - DNA, 388 bp, Zea Mays
ggccaccttggtgagacgatcgattattacccatatggaatcatttcctttctgtgatctgggcagtccggttacgaaatccatgcctatttcttcccacttccattcgggtattgggaggggttgaagtaggcctgcgggcttctgatgctcggcctttgttctctgacaggtgtcacaccgggccacatactgtgctattttcttcttcatccctttccaccagtatctggctttgatgtctaggtacatcttggtggttcctgggtggatggagtaagctgagttgtgggcttcattgagcagggtttctcgtgcctctcccactggcacacacaagcggttcttgaaccagaggactccttgctcgtctgtcctaaggtccgga

SEQ ID NO: 98842 - DNA, 675 bp, Zea Mays
caagtgtgttctcaaaaaactggaagctaacaattttactctagttatatagttgtatagatgacacaacacaagttgcaaatctgttaattggggcttcattacagatttaagaatcaaaggtttatttcaaactcagagacctaatactaagctaagtaggtcagggatgcaaccatggtaagttatcagcaagactgtctacaccaaccaatccagcatgagaccataaaaatttaaattggcggcaaaaccattatacatgaggttaactgctccccacctgatgcaagaaaatctttaaaatcagaagcatttccagacaaaatcacaaaaatgtttggatgagaatagtggtgtcttcattcttcaaacacttctactcccgtgtttatatgtgctgctttggcatgtaatattttctagtttaacattcttccctctgcattcaagtgcgcatttatggcatgaagacgcggataacacagcataaagcaagactacacctttgcgtatcgtaaactctggctggatttggtttacaacagcaagactaaactgagcatagcggctccaaccatacggaaggctggttgagtcagcaacatccaagtacattgagaagtggtccacattgttccccttggggaaaatcagcacactcctgcatgaagg

SEQ ID NO: 98843 - DNA, 542 bp, Zea Mays
attccctatagagagctgattatgcaccattactgctgccctaagaatattaccatcgtgtgagctagtaggtgagggtgagctaaagcgagtgagtggtgatcccaatgcgatgcatacacggcgttggtggctagcgcgggcgccggccatgtacgctgcagcagctaactccagtactgccaccggccagcattcatgtgcatgcatgcagttgcagaccccggccatggtgatggtgatagtgattccatactacatgatgtggtgcttatctctctcccgctcctagttttcctcttcagcgaacagtgtcggcctgagcctctcactttagttgccttcctttatttggacagacattctatggctcgccaaactccactgctcaccgtcctccatccatttgtccattgcatcatcatccatccaccgctccatcctccatctctatggcttctctttttcctcctcgcgcacgagtactaccgcaatccatcatgtgcatctatatacatcatcgatctactactgtaccctgc

SEQ ID NO: 98844 - DNA, 340 bp, Zea Mays
cgtgtgatttgagacagtctcgccgaagtcattaagagagtctgccatgtccttcatctagtggcagtactcaatgacagagatgtcaccctggacgaaggtttggaaggcagcgttaaggtggagcgcacaggcctcacggttgtcgaggaatttctcctcaatagcaacccaggcttggcgagcaatgccaccacgctcacggatgatatcctatagctcgatgatgaccgtgtcgaggatccaagataggacaacactgtccattcagtgccaagataggacagtgggacacacgatgtcggtgaggacatgccgacgtggttgtcgagagcgtaac

SEQ ID NO: 98845 - DNA, 376 bp, Zea Mays
gggtgtgtacttatgcaaaacgagaaagtcatcgcatatgcatcgcgcttactcaagccgcatgagcagaattatcccacccacgatttggaattggcagccatagtgcatgccctaaaaatatggaggcactacctaattgggaacaaatgtcacatcttcatcgatcacaagagtctgaagtatatcttcactcagccagacctcaacctccgtcagcgaagatggctggaattgatcaaagattatgaccttgagatccactaccaccccgggaaggccaacgtggtagcagacaccctcatccaaaaacctttcgggaagaaagggaccaactttttagaagattggaagaaagcatcagctcagcttaatg

SEQ ID NO: 98846 - DNA, 623 bp, Zea Mays
ctcattgtgtttggttgtgttcttcgttctctcaccattccgtggaagatttgtttatatctttttggtgtgtggattttgataagtgcccttctcagatctactactttgaaccctgcggatcacctagaacatctcatttctaaagttaactaggtgaatttcgagatcaattcagttttatatctcattctttagttgagctcgtgcaaactggctgaaccggttttgacaccggctgaacaggttttacccagttcgtttttagtttttgttgaaaagtttctgcttgcctattcactccccccctctaggtaactttcaccagttgaaccagccctaaactcgattgaaccggcctgcactggaaaaacagatttcgaaaggaagggggtgaaatcacatggcgacttcgcaacttttcaaactagaattttgaagcggatagaaatagttggtgcataccatccttaccttgcaaaggaactaatcatacaaagatccctattactaatcaagaataatcaaaatacttggggatctctgccaaaaaccacatgcagatctttatccttttaacacttggtttcctgttagttcgtttatttctttcctatgcatct

SEQ ID NO: 98847 - DNA, 532 bp, Zea Mays
cccctttcagattaatgtactgatccaaagccatgacttcgcaagagctcaagcacggatcaccacgaacaagcaccacaggcacaccagatatcaacgagtcaacaacaaaagacctcctcgatggggatcgtgtcatcgcccttgaagcattgaacaaatctcaagcacaaatgaaggcctgacaggacaacactagtactcctaaagagttcgacgaggtggacctcgtcctcatcagaaccaacagaacagaattccgaggtaaactcgagccaaatgggaaggccctttcatcgtctagagaaaaacgtccccaatcgcctacagactcgcaacacaatccggtgaagacctcgagcactcatggaatgtagacaatctaaagaaattttatgtttaagccaaccaattctagggccctcgcgcccttgtaacatctacagacacattactcgggtctgcactcttttccttgcaggggtgaggtttttaacgaggcggtgccatgtaataaagcgctaaagaaatc

SEQ ID NO: 98848 - DNA, 623 bp, Zea Mays
tggggtgctacaaatcctaccccccttaacagaaatctcgtccccgagatttgtaagaaaaggatataggaagagtggtttgcaatttagcttttagtttctaattatttcaaaaaccaagagcctctttttttgagtgattaggaaagcatgggtatccatatgtatattcattttattatgtaggacgaaagatgggttggttaaggcaagaatatcctagtgtaagaaagtttatggtgagaaaggactccttgttgggtggtaatgcatctgaagatcgagtttgacttctctccttccttgacgaggtttatcttgtccttttcgagtcttgctctttggtgtctccatccgagtttgggacaagaggctaagatagatttgttatgtaggtcaagttgttgggtatggccgagttgatctaggtcaccagtttaagcttaagcggatttggagtatggcttaatcctttgtaccagcattaagtaacttactctacattagatcataatagattagatagaatatagattaggttggtacgactagattaaactagttaagatctcattattttggattaggtcctggtggttactttaggatcagataaatatagt

SEQ ID NO: 98849 - DNA, 347 bp, Zea Mays
ctaatcacgactagtcggacgacttgaaatcattgggcctaaccaaatcgccgccaatgagtatataacatccaatccaactaattttgatgccaagtcacatgaataggaaactattttagagaaaactaaagtagcacaattcatgcaggtcaagagaacatcaaattactttgacttattcatagacctgatcataggatgcccgactcgatttgctcgaaaaaacacgactcgacccgaccaatgcaacaggtgggtacgagaaatagtttttggctcgcaacaatccacagtctcgacacaggccatgaagtttattccaaaacctgacctaacccgaaaaa

SEQ ID NO: 98850 - DNA, 393 bp, Zea Mays
cttgactttaaatctcttcattccacgaagtggtgacaccttgaggtacacatgatcaccttcttcaaattccagtggtcttcttctattatcagtgtagctcttttgcctggtttgagctaccctcaaattctctcgaagtatacggacttgttcttctgcttcttgaattagtttaggcccaaagaactggcttcctctagtctgatcccaatatagaggagccctgcacttcctcccatataaagcttcaaatggtgacatcttcagactggcctgataactattattatatgagaactcagcatatggtagacttttatcccaacttcctccatgctgaagggcacaagttctcaacatgtcttccaatacttgattagtccttttagt

SEQ ID NO: 98851 - DNA, 898 bp, Zea Mays
tttctttccattgaagcttccattttctgctcagatggtggctcaagtgattctagacaatgtggtgaagtttcacagggtaccatagtctatagtgtcagatagagataagatttttactagtgtcttttagaagcacttgtttgagttgcttaaggtgaaactagctttaagtactgcttaccacccacaaaaagatgggcagagtgaaagggtaaaccagtgtttgtaaatgtatttgaggtgtgctgtgcaagctactcctcataaatggaagtcctagttagctatggcagaattctggtacaatacctcttatcattcatctctgggttgttcaccttttaaagccatgtatggatatgaagcttatgtgttggctgagcctcatatttagggcatagaagacattgatgtgatgcagtgggtgaatcagagggacaaccacagagtgatgcttcaagaacaattgttgaaggctcaacaacgatataagcattttgctgatcttaagaggaggctaagggaatttcaggtaggtgagcaagtgttgcttaagctccaaccttatgcccagcattcaatggtaaataggtcctgtcctaaattggcttttaagttctttggtccctatactgtcttagagaagattggtgaagtggcctacaaaatttagttgcctgaggatgcacagatacacctggtttttcatgtgtcacaactcaaaccatttactcccagttatgtgccagtgttctcagaattaccaaaggtgattgatttggggcaggaaggtgttcaaccaatggatattttggacaaacatctagtcaaaaagggacgggcgatcattacacaagtgttgattaaatggtcagatttgcaagtagcagcaaat

SEQ ID NO: 98852 - DNA, 651 bp, Zea Mays
tgtttcaaagattcatgatcagaatgaataacaaactctttgggccacaaataatgctgccatgtttccaatgttcgcacaagagcatataattccttaccataagtagaataatttagaacagacccactcaatttttcactaaaatatgcaacaagtttgccttcttgtaacaaaacaccacccaatccaattccactagcatcacattcaagctcaaaagtcttactaaaatcaggaagttggaggagaggtgcatgtgtcaacttatctttcagcatgttgaaagagtgctcttgtactttgccccaactaaaatgcacccccttcttcgtaagctcattcaaaggtgcagcaatagtactaaagtccttcacaaaacggcgatagaagccagcaagttctaggaaactccgcacctgtgtgatagtctttggcataggccatccatgtatcgcttctaccttggcttgatcaacctcaattccctgtggagtcacaacatagccaagaaacgacactcgatcggtgcaaaatgtgcacttctcagggttaccaaataaacgtgcatctcgtaaagcattaaaaacagcacacatgtgatcaacatgttcatccatagatttgctatagatcaatatgtcatcaaaa

SEQ ID NO: 98853 - DNA, 616 bp, Zea Mays
tggacttttggtacaattataagactaaaagttgaactacaaaccaatccttcagtattcccttttcttacaaatctcgaggacgagatttctgttaaggggggtaggatttgtaaagcccaaaatttgtatccaaaaaaaaatctactttgagacctagtagggagtattccaagatttaagtcttttataataagagattaaataaaagaccctcgtataagttaaatcaacctttgttgaatagggagattagagacattctccaaaagaattaagtttaagaaatactttaataaatagtatacactagaaaatctcattttaaaataaccatgaacatatttctaaacggactattcgttcaaggaaataatttttaagtgtgtgcattgaatacttaaaatgtttggataaaataaacaaaactaaacgtatatatgtatttatgcacatcctttgggagttattttttgttgcatttaatcttgcaaaccttgaactttgaatcaaattagatttatgaaattgagacttggaataaaactgaaaatgggaaatagaaaagaagaaacatgttcctaggccaaatgcagttcagcccatcttgtccctg

SEQ ID NO: 98854 - DNA, 299 bp, Zea Mays
gttcgaaggaggcacttaaaattgacactaacaagtccatatgtgtccttctttattcctctctttttattgaatatgtcaacccacttgcaacgaaataatggcacacgtcttccaccaagaaactgaagctcaattatctctgttaatacaccataatattcagcattgtcatcagttgtattcccttctgaaaaaacagccaccccactattttgtgtgcagcgatttctatcacgaatctctatacgatatctgaatccattgatgtcatagcctgcaaaacatgttgtgttttg

SEQ ID NO: 98855 - DNA, 764 bp, Zea Mays
tcccatctggtctcgcttcagcctttgaaggctgaaggtggatattgatagcaatgttgaagcatgctagaaggcctttagtactgtttgcgccttcattggcacgggggatttaattcaagagcacatatccttcagggtgtggccacttgtggagagctgggatatgccaaaggaaactactgccgaatccagtgaaggtggcctggttcgattgaaatataccttcaggtttagagagaagtttgatgaatcaaatgatgactggttgaaatgtattgaagctaccagtgacgagctgcttggggcatattccaagcgcagccttcaagggtcggggcaagaaaagattgaatagggtatttgatgcaattggcttcgtataccctgattatcactacccactacaaaggcaaggaaataagaggaagattgccgctttggccaccacagctgtgtcgaagggcaaaaaagtgaaggttctgacccaccggccgcgatatattgaaccggtcgtagtgcctgaatttggggaagggacctcttcaactatcgaaacaaaacaagctgctccgattgcgcagagcgccgaagagccgattgtagtgccgaaggtgcctacagtcgggccagccgaagccaaagatggtgcggccgaagaaccaaaagtggaaaagatagtgaaaatgccagaaattctgagcccaccagcaagggcagaattgctgaaggtgcaaaaagctgctgccgcaactcccaagagg

SEQ ID NO: 98856 - DNA, 490 bp, Zea Mays
agaaagtcattgcttacacatcacgcctactcaagccgcacgaacagaattaccccacccatgatttggaattagcagccacagtgcatgccttgaagatatggaggcattacctaatcggaaacaaatgccacattttcaccgatcacaagagtctgagatatatattcactcaaccagatctcaacctccgtcagcgaagatggttagaactgatcaaggattatgacctagaaattcactatcaccccgggaaggccaacgtggtagccgacgccctcagtcgaaaaccattcggaataaaaggaaccaactttctagaagactggaagaaggaatcagcacaactaaatgcatgtctgggaaacaacgacagtcttgaagtcaaaccaatgctagaagacctcatctgcaaagctcaacgtctagactcagagacaacaaggcttgtggagaaagcccgcaaggaacaactcccggaccttaggac

SEQ ID NO: 98857 - DNA, 472 bp, Zea Mays
cacagttgggccaaccaaagctaaagatgataaggccgaagagccatagattgaagaaataactaaaatgccaaaaattctgagccctccaacagaggcaaaactgccgaaggtgcaaaaggcttctgacgcgactcccaagaggaggaggatggccaacgtgctggatgctgcgctggagactacaaaggccttgagccatgctcctacaaagaaaattgctgaagctgccaaagcgcaagccaaagccgaaactggcaagcagaagccgaagctacgaaaactcaggctgaagccgaagctgggcctacagcgaccgtcgcggcgaaggctgacgagcctgaggaaaaaatggtagggcagattgcacctaaaaagatcgagactcctgctcccgaagctccgatcgaaaatgttgactacatcattcgacacgcttcggggaagaaattgtccgaagaagaaattctgg

SEQ ID NO: 98858 - DNA, 842 bp, Zea Mays
cgagtgttcacgggtacccgtatccgtatccacgggtacatgatcgtacccaaaactgtgcccaacgggttttttatccgcgggcacgcggataaatcacatccattgtcatccctagttgtagatggctgctaatggtcctttaccaagtgccatggtgtgccgagagacggacgttcgacaaatcggcctttgccgagcgactttgtatgccgagtattttgcactcggcaaagagggactttgtcgagtgtcgttcttcgccgagcgtaacactcggcgaataattcttatgatgatggacggcacacacactgcatgcatacaatgcatggtgctagtagatcgcacgtagacttattcaaacgtcgggtcaggtcaggttcgaatcggatcaagatcggaccgtgggttgggttggatattttggcccacgctcgattcgtacatagtgtcgggtcaggttgggttggcccgtgcctcttgattcgacgcctcgggtcaggttttttcgggttgggttggatattttggctttgggttaggttttttcgggttgggacgggttttgggtcaaaaatcacggcccgttctaggctatggattgttacaggtaaaaaactacgttgcattgatcagatcgggtcagatcagatttttttcggacgggtcaggtcaaagttggtcgagtgggggtggggaacacgatcaggtttatcgtgcgccgctttgcatgcttgccttcttttactacctttacaatttcaagtgccatgctttgcaaagcggattaaagcgccaccatggccttgccttgcttcgaccgtgctccatggatctgc

SEQ ID NO: 98859 - DNA, 411 bp, Zea Mays
agaacaatccacaaccccagcacaaatgatgacagggcaaaccacactcaaggcaaccaataaagctgacaatcttcaggaatgcaacaaacctcttacaggccaccagttccaagaggtagagaaggaagaagcttcggaggaaggtttagcactcaacccaggagattgttctgcttattctgtggggaggataagggacacacaacaaggacgtgccaagtcacgatccaaaagcaaaagaagatagctaaagctgaagcatgacagaatcagccaaagcaattcatgcatactgcctcatgctattcgccatatatccctaagtatgtgggcaaccagcaacccacgacatcagttgcttcgacaagtcattctcaagctgcatgggctcagttaccaccaccacca

SEQ ID NO: 98860 - DNA, 352 bp, Zea Mays
caaggacatgcgccacacccttcagaactgcagagacttcaagcattccgtggggaacggccgacccttccaacctctgccacctcccccaccacgaggaggacctgtagaacctcgacaaccccaacagcaggaagggggaggaggtggagccttcccacgcgtcgttggagaagtcaacgtcatcttcggcggacatgggtcacaagaaagcaagaggcaacaaaagctcaacgaccgtcagatactggtggcgaccattggtcctcccgccctgtatcgatagtccgagcacccgatcaccttcactcgggcggatcagtggctcaacttcgaccacctgggcaagtac

SEQ ID NO: 98861 - DNA, 276 bp, Zea Mays
ctgctggagcggtccaggtggtatggcgctggtgcgctgcccagcagtggacgagggcaatgcgccaatgggtggaaccgggacctgttcagaaaagaaatccaaaaaatcaaggttagtgggaagagccgagctgggaggggtctcggcgaacggaaaggaggattcgtcgaacacaacatggcgggagatgatgatacgattggtggagatatcaagacaacggtagcctttgtgttcagacgagtaaccaagaaagacacacatggtggagcg

SEQ ID NO: 98862 - DNA, 502 bp, Zea Mays
ccatgagagctggcaggggctttcctcaatcgccctgctggattgtttgggtcaatccagaagggggtataggagagatgtcttgtccctttttcaaatcaaaactgtgtaaccacttcaatcatcttcatgatgaagggggcatgaagacatcccttgagagggaagcaggcaacatggatgatttcttgccaaatcatataaaaaacatttaatctttcagaactgtttggcttcatgaatgagagcagaactttgctctctcccaggatattcatctgatttccccctttggggatgagagtcattctgcagagagaattgatgtacctgtagtacttgtgcagattggtggatttccaatattcatcagactcagagatatgaagatccttggcttcatccttggtgggaggacgaaagtcatgaatcttgattttgtctcctgagatatccccatcagtaaatcccaggatgtgagcaaacctcctgtagctcacct

SEQ ID NO: 98863 - DNA, 407 bp, Zea Mays
tcacattccttggtatacatcattctgaggattacactcattctaatgagtactcaggctcgagcatcacttcattcccagtgccatatgtgtatgctagtagatgttgcacacgagttgtttgagaaattattcacgtctcatggtgctactattggctgccttttgaaggaaattggtgagcttctaggagaatataaattgttggtgttcatggtgctaagagagctttcctgggcgctttgctgtaattatgcattcaaaatttctatcagggtgccaatttctattcctttgttgaaatattctacaagaagttggcaggatgcaagtttgtttcagtttttcaatttggcaacaacaacaaatgcacttacaggtgttgggggaaaattagaagttacaca

SEQ ID NO: 98864 - DNA, 317 bp, Zea Mays
ggcgtggaaggaaagaggtcagaggaggacattgtttagtggcttggggaagagtctgtagacctcttgaaattggtggacttgggatttctagtcttaaagaactaggatgggccttaagaatgagatggctgtggctgcgcaaaacagatccggataggccttgggcctcattgcccatgcagatatccaacaaaataaaggcctttttctacactgccctgctcaatgacattgtgaatgggtcttctaccttattttggcaagatcgttgggtcaacggaaagaatattgaagacattgctcctcgactgctt

SEQ ID NO: 98865 - DNA, 324 bp, Zea Mays
acaatgacactacatacttttgtcgtaaattagttctgtttatgacgttttccgagaggtgatccaatatagtgacataaaaaaatctctgtcattaaaatcgtcataatataaaacatcgacatctttgtgacggtatttaatgacaatacacaattatcataagagtaaatcgtcatagtacccttttgtaccatgactgtgaccatatgctgtcatttcatattttgtcatatttttttaattcatgaaacaaaaatataaaatatattttttgtacaagtgcaattatatatgtggctgtgtggcatatttggatgctgg

SEQ ID NO: 98866 - DNA, 357 bp, Zea Mays
agggtgcacgattaggtcatcgttatcacggacaccttctttgtgccatcgcatgtgcatagcggttttttagatagaaacatccgtttcactcggaggagtttagtggcaagtagcggagctgcttaagtgcaacatctgtcattcaccttctcaccctcatcattaacaactttccacaaatctaaattgtccacatttcagacattttttctcttccgcatgctccttcatgaaaagcatacaattatttttgcacacatcaatcttctcataatccacaccgagacctttgataattgtctttgaatggtatatgtctttaggcaacttattgggctttgggagcacatctcc

SEQ ID NO: 98867 - DNA, 537 bp, Zea Mays
ggcagtacgaattttggcttctaccaagttcactggtgaaattgtgagtgcctcgccgtggtctatggcgctatttatagccacggaggtccggctaacgaacaacgtccgcggattgcattgttcacgcatggttaccacatagagaagaggcacagtaaggggaaaacgaggcatgggtgacaccacggcggaagtgaccgagccacaaagaccgcaggtgggatatctccggcacgcacgactgggttcgcgggatggtaccacgtccgaagttatctctctgcgatcgactcccttcaccaaatcactcgagcacatccggttcaacagtgcctcagatcttatccgcgttcttcagatatttacagtgttttgatcttcagcattttactgaatcgaccacctatcatccccactttctcatgattcttgttaagaacagggtaacctcccttaataaaatttgttctccaaacaacagtctttaagtttgttatagggttcatggatcaattctgtatagattctaagatt

SEQ ID NO: 98868 - DNA, 671 bp, Zea Mays
cgtagttcttcttctctctcccaagtagcctcatcttctccatgttgactccattgtactttgcacattttaatcactttactccttgtgacacgagtcaatgtatcaagaatcttgataggatactcagcataagtcagatcatctcgaacactaagatcctccatggtagctgctcttcgggtaccctgagatatttcttcaattgagatacatggaagacatcatgtacatccacaagatgatcgggtagttctagttgatatgcaacttctcctactcgtttcaagatcaagaagggtccaatgaagcgaggggacaacttccctttaactttaaatcttcgcattccccagatcggtgacaccttcaaatacacgtgaacaccctccttaaactctagtagccttctccgggtatccacataacttttctgcctagactgtgtagttctcaaattctcccttaccattcgtacttgttcttctgcctcttgtataatctcaggcccaaagaactgtcgttcaccagtttgatcccaatacagtggagtcccgcattttctgccatatagagcctcaatggcctggtagctattattgtaggagaactccgcatacggtaagctcttatcccaattgccaccatgtttaagagcacaagctctcaac

SEQ ID NO: 98869 - DNA, 738 bp, Zea Mays
gacatccataacaaaggatgcaaaatcggtggtccgaagtacaaacatccacatcgtctctcgatctcaagatgttccatccagataaatgtaggcatcacttttactacatttgaatgtgtttaaagtttaaacttagagataattggaggcgactacatattagcacgaaacactgataccaaaaataaaagttacagataacttgcgagggctgcaatgactctttagtttagttaatgacagcatatcattattatcactcacatgacttggatacattcagaaaaatcgtggcaataatttgttacgtttactccttgatcacacggccttgacagaaaagaaaagctgatcagaaaggacagaaaagaaaagctgatcagaaccaaagtgtagtaatcaaccacagattcccgtagcaagatgtccgcagtggcacttgccaacaagatcggacgacgattagtgatgctgcgggttgggaccaccggggctgagcctcttcgacccgtcgtacggtatccccggcgcctcctccgaccaggcagaggctgaggcagaggtcgtgttcccttcagggcccttggcaatgacaacttcgtctcgcagccagcgtcgccccatcgcagggcggctatcagagagcgggaccggcgacgaggcgatgacgagaacgacacagatgcagaagcacaggacgagcttcatggctgatgagaagtgtgctgctaatag

SEQ ID NO: 98870 - DNA, 318 bp, Zea Mays
gtttgatttacatactgctgtttattagggaacttgaacatgttctggattgcctttgctaactactcctatgtcttttactgagttatagaggagctatttagtttcatgtccactctatggtctctactcctttaaagcacgagtttcgaccgtcgtacttttttgcggaaagcacgtatggttattcccctcccctagataagacttatctcaccagaggcaaaactaatctctctataaattgccggcatcctatggttcctatctcctcgcgtgtatggttattcccctccccctggataaggtttatttcac

SEQ ID NO: 98871 - DNA, 720 bp, Zea Mays
tctcgttttccagtcccaatcattgatgagtttctggacgagttgcatgggtcagcctggttttccattctggatcttcgtgctggttttcaccagattcggatggcgccacatgaccaacacaagaccgcctttcagacccaccatggacacttcgaattctgggttatgtcctttggattgacaggggcaccaacaacatttcagcatgcaatgaatctaacattatcttcattattgaggaaatgtgcacttgtattttttgatgacatcttagtgtacagccctacatgggaggcccatctgtctcatttggagttggtgttgcagcttttgactcgtgacaattggcaggtcaaattgtccaagtgcactttcgggcagcaacaaatcgcttatctaggccatgtgatcagcaagtctggtgtggctactgacccggccaaggtggctgcagtgtcctcatggccggttccaacctcctgcaaagacttgagagggtttcttgggcttgcagactactatcgcaaatttgtccgtcactttggactgctggccaaaccactcactaccctcctcaagaaacattctgtctttgtctggacgtccgtacagcagacagcgtttgaggccctcaagcaggcattgttgtcagctccagttttggcattgccagattttactcgacccttttccattgagactgatgcatcaagcaca

SEQ ID NO: 98872 - DNA, 598 bp, Zea Mays
cccaagcacgacaaggtccaactcctagtgacatgtttgggttggcgagggggcacagtaggctggcacggacatgtcctcgattaggttaaaagcacatttaggcatggcacacgggttcacatacccacgcccgacaccccttccctgctcctctcattctctccctctctcacgctcctctcccactcgttctctcttgaaccctctggactctagcgatttagagagctcctcctccctcgctgcctctgccgcctctctagcttgccacctcacaccttggcggcctaacatcggttccaaattgataaggtggtgaactctggtgctccggctctcttctttctctagccgtcgaggttgactccggatctggtttgaaaccgtaagttcctaactctattacttttcttgatatggtcttctcccaccactgttcttcttccagtttggcggtctccctccaactttagttgctctgatcctctccgactctccctataccggtgcctaactgtgctttaaccctaatcatcgagccgttgggggttgtatctggtgctctgactttggtaagttgctaatctggtgcttg

SEQ ID NO: 98873 - DNA, 271 bp, Zea Mays
gctgatttggagtagtgggggtattgttggggcgaataatgattggctgtttgaaagggaatgagggtggatgagaaaagtgcgattttggcttgaaggccggatcacaaaccgttgcctcttcgcctggccctgattaggcctctcaccaccgaatcccatgttcttcccagaacttgcgtattttgcttcaacagataaggctgtgctaacagcctttccatacgtcaagtcaatacaagcagccattttcctctgtagccgatcattt

SEQ ID NO: 98874 - DNA, 706 bp, Zea Mays
gcaacgacttagagtcgggcggcctgcaagatcaaggtgcatggtcgtcgaaggatggcgacggcgtatcctcgatcgggcaaggcgaatcaggcaagcatctatttggaggttggttagttatcccatgtcatcagacatcacgcaggaatcaggtcatccatcaggaagcagccagctctgcctggactaacccagggcaaaggcaaacagcaaactttccaggataagtctctgactttgttatactttcctgtgtgcaggaggtcttgaagatctggaactgcaggtgcagaatgctattgcagcagcagcagctgcagctccacccaaggaaagcaatagtgtcagcagcaacgatcctggcagctcgtcctctgtgatttttccgtctggtccagctgatcaagtccctgttcctgctacctctccagaaattgagccccgttttgcaaaccaaatccctgctgcttcttcgaaggttaaggcaccatgcctggcaggtctgttgtttgtaagcgacaggaacgagaggaactttaggttgcctagcccttctgataactgtccatggaacttattcgaagctagccgtagcgcagtcagctttctacaggagtatatgctttccggaatcgtgccactgaagttattcagcatgagatctatggttcttagactgggcatattgctgaataactatagt

SEQ ID NO: 98875 - DNA, 336 bp, Zea Mays
tcaatcacctgatggccagagtgtgttccacagctagggttactcgtgacggggaggaggccgaaggtgccgaaactgccccaatctccaaagtgatgaagcgctcagggctggtagcatcggaggatgcacctgccgttgaagccgagcaggatgatgccgaagaacttgagtctgaagatgattacaacgcagtgccaactaaacccagccacctggagttagggaaatccaccatttccgaagatgacatgccgaagctgataaatttgggctatttcagtgaagcgaagaaagagctggtttgttttggtggggaagagattactccgaagc

SEQ ID NO: 98876 - DNA, 530 bp, Zea Mays
gaaatgggaagaaactggcatggatttcattattggtctaccccgcacatctactaggtatgactctatatgggtgattgtggacaggctaactgaagtagcccactttattccagtgaagaccacatattcaggagccagactagcagagttgtacatggcacggattgtatgcttacatggtgtgcctaagaagattgtgtcagaccggggatcataatttacttctcggttttggcagaagttgtacgagtgcttggatacaagattgaattttagttcggcctaccatcatcaaactgatgggcagaccaaaaggaccaaccaagtactagaagatatgttaagagcttgtgctcttaaacatggtggtagttgggataagagtttaccgtatacagagttctcttacaataatagctatcaggccagtttgaagatgtccctgtttgaggctttatatggcagaaaatgcaggactcctctatattgggatcaaacgggtgaacaacagtactttgggccagaaa

SEQ ID NO: 98877 - DNA, 571 bp, Zea Mays
cttcgcctcagtataccacctgcagtccaacggagttgtggaacgcgcaaatggcaaaattttcacagctgtcaagaagatgctcctcgacgataaaaagggcaagtgggccgatttgttacctgaagcggtctgggcattaaacacgactgagtgcatggcgactgggttcacccctttccgccttctatatggatcggaggccatgaccccgcaagaaataaaacatgggtccccacggacagtcccgtcagctgtccccgacgtggacgagcccacttcaaaggacctgatcgatggagaccgggtcttcgcactacaggctctaaacaaatagcatgcccaaacaaaagcatggcgtgaccacgcagtcatcccgagggaattcagcgaaggagacctcgtactcgtccggaccgctcggacagagtccaggggcaaaatggagcccaagtgggagggccctttcatcgtcaagacgaaggcatcccccagcgcatacaggctcgcaacgccatccgacgaagaattggagcattcctggaacattgataatctccacaaatttttt

SEQ ID NO: 98878 - DNA, 449 bp, Zea Mays
ctccgacccccgaagttgaggacaaagcatcatcttcggccctggtatatgtcccaagcaactcgtcgctagtagcctcaatgcatttcaaccagtcatcattcggttcgttgaacttctctctatatctgatggtatattttaatcgaactaatccaccttcgctggacccagcagcagtctcctttggcatctcctagctatccacaagtggccacactctataggctatgtgctcttggattatgtctcttgtgccaatgaaagcacagacattgctgaaagccttttgacacgcttcggcatcactgtcaatcgccaccctcggtcttcaaaggctgaagcgagaccagatggggcgctggataatttccttaatgtcctccctctcaatcagataattcttgacataaaaccattcctccatctaggccccaggccatcttttc

SEQ ID NO: 98879 - DNA, 564 bp, Zea Mays
cttttcaggattatttttctagaatttttctaagttctccttgttttcatgaaataaaaggcagtgcatttcttttgtactaacagagggtctaacaaaattttccagtgaactatgttaaataagtgagctagcaaaaatgtggttgcccctggttcttattttaaactcccttttttattttctttaactttgagtcaaagtgagtttaaatggtaaacccttccttaatttggtgtattgaggggtttattatttttaaacaggctagggggtggttaagtacctctctaatttttcttaaccccagtctaaaagtgtagctattttcccttctttatttatcttttggtcagtttactatttaaatctaaaccttaaaatcttctgcaatacttatggtgtttggtatttttcctaagtagttcaccttatttagaacctagcaaaattggtttgaacaaatttagttggataaaactgaagttatgaattttatgatctctgtttacatttaaatgaataatgtttaaaaggttttatgaaaaactagtttacaccgag

SEQ ID NO: 98880 - DNA, 2780 bp, Zea Mays
gaaagacaaaaatgcccttgattcagatcgtctccagaattacactggtatcttccttctcattgggatcttgttaggtttaagagttccttcattagcattttctgaacttctgcttctggttcaagggaatgcttctcagcttctatgataaactgtcgttttctggaaatgtcatttaactgtgtaggttgtggtaccagatgaatgaacagttacaagttgtgcttaactggatgttatctgatcctctcagtctgagtacccttttcatccctttattcttctgttgatagtgaaagggcctttaactgagttggtttctgttgataataataagctactcattttctaattttcttgctgtgcttctaattgagaaataattacttgcatctctgctatggatcctcataaaaactgctaatttggaaggacatttgcaaaatgtagggccccagctccgccaacttctgaactggccacgaccactgccaattgaggaggaaagagtacgccttctccacgaggtaaaactctgtctgtaattgctccgttgaacatctcaggctctgaactttgataatacacaagttatgtggtaccatgagcttttacactgcaacccagtttgttttgactaaatttagttgtctgcttgatttctagaattatctttgttggtaggatttagtttttttctccactgtgctttactttttccagtagaactgtcttacgattaacatatttccaaccagttttttctccaccatgctttactttttattcctttccaacattactttgttttgaatcatttttttcattgtcatggcacctgtgtcaaggttgggcaggaacttaaaagaagctttggaggtcaggctgctaatctagtgaagtctgctggaaactctgctgcgactcttattgaactgattactcgacattttcctggtaaatccacttggtattatgtttatcgtctttggtcaaaagtaggcaaagtccagtttgtcattgtattgcacaaataagttcatcagctgatagtctccttttgtcccctttctgcccatatgctatagcttgctatctgatattagtttcctgtattgggaagcacagcggtgttataaattattggtccaaaaaaatatttcgttcatttgtcaaatggttatggtggtccctgttggctgtaggcacctacagtgaaagtgaaactggaatggcccatccacccactactactgtttgtctgcatatggatttatgttctgcctgctactttggatctgagagtcaggaaacagtgatgattgatgaactggtgcctcatctaggcatatgaacttcgtatgagctgggccattcaaaaccagatgattgtgaatatttgatgcttacacttacacccttacattttttcatttctcgtgcaaaacgttagtggttttcattttttagcagttggccaagaaatctgttcacatgatttcacttgaagttaacatttattctcggtgttggtgctttcgttggatctccattgatttgagacattgaacatggagtttatttcctcaaagaagaacatgaaactgttcccgtagtgtttaactgattatacttgttcgacaaatatgtccagacatgagctaatcatctgaaattccagtgatttaggagtaattgatttcaggcttccagcacattattctatcatatatggacatatttgattgcacagataggttcactgacaaacatgtacaaatcttaactattcaaccggttagtctgaattcagaaacaaggaaggatgctagttttacccctgatctggccatagccaacttcagaatatttcacaattcgttcttcgatcattgaatttaaattgtaccttgcgctcttgcagggaattttagcatgtattgaatcttttgttaataggatagcgttgtgcaacttgatggtaccttttgctaacgttctatgaacacgtacatctgcatgcattcaaaaccaggttatattttttcttgttttgtactgtcctgagtcatgacatgactcatgaccaagtgtacatccatccaccaaatagtattttaagtttccattttggcaggtttccgggaccattcactctacaaggggcaccaggttttcctgtacaagagagcccagatctttgttgctgatttgtggggcgccttcaagggacaaaactatggcgagttccacgatatcaattccatcaccatatttgctgactacattgttccagcggtcctgagggagcttggagtacttaaatatggctcgaatctatcttgctccatcgactcgaacagtgagatagtgcctggaagcgaggaggaagtggagatacgcgcgtgctccatctatgcagtggagaagatgagggacctgatcagtaagaagtttggaaagcaggtaggcgcatctgaaccagtttcgcctgactacctgagacttccattcattaggcatgccaatgccgtttgctttctgacctgcattctcggtgggccgatttacaaaaaaaaaaaaaaagaaattcactaatcttcatagccgttgaacttgaacgagttaaattaaccaactcataaagcagtcactcgatacgtgaggttcggctcggaactaacgccctcttggtctcgtgttttctcggcagcttctgagcatcgacattgatctctggctctggtcctgcggcgtgcagaacatggcgctgtcac

SEQ ID NO: 98881 - DNA, 277 bp, Zea Mays
ttagccaaaagttcagtgctaaatgtgaactgccattctctcattcaaaagggtcatttatgatagtcacacctgggggtaaaatttcaactaatcaattaaaccaaagtgtgcttattcaactgggaagccacattgtcaaaaccacccttcttgttttgggattggaaaatgtggacattattctggggtctaattggatgaccctgcaccaagttgtgcttgatgtagccagccgtaccatggaaatcaattctccgttctgtgggaacttcac

SEQ ID NO: 98882 - DNA, 320 bp, Zea Mays
tggtgcctcacatagttttgtttttagctcttggaatgctctctcttgttcatctccccacaataatggaacttctttctttgtcaagttgtttagtggtgcagcaattgtgctaaaatctttgacaaacctccgatagaaacctgctagcccatggaaacttcgaacttgactcacattttttggtacaggccagtcctttatttctttgattttgtcttcatcaacctggatgccctctgcagtcacaacaaaaccaaggaaaacaacacgatctgtgcaaaaagtgcacttagaaatattaccatataacttttcag

SEQ ID NO: 98883 - DNA, 501 bp, Zea Mays
tccttgatctttgccttctgaaggtacttcttcttgagcgcctccttgtcgaatcctcccttggacttgtacttgccggaggtgtacttgcccttgcgtcgaccagagtgatggtcgcgcgggtcagactctgatttgcccttcttggggcagctggcaacgaagtggtcgggatcgccacagttgtagcatccgtccttggacccaccataccgctagctcatacggttgttgtggaaccacgtgaaccggctggccacaagtgtcagctcctcatccccaaggctctccacctgctcctttgtaatagacaacaaagaagatagagcaaacatagcaggtgaggagttagaagcagaaccacctccagagactagggccatggtgggtgcactacggttctcaatcttggcccgagtctggtggtcaatctatgtggacttgagcttgctgaagagctcgtccacggtgagagtctcatagttgggcgacttgatgatc

SEQ ID NO: 98884 - DNA, 345 bp, Zea Mays
gtccatacctggtctggtgggatccggacctatccgcatacactcctactcctcgctcaggcggagacccgatgctaccacgtggcatactgcgcgcggcataagccaacagacggaacctggcatgacgcctctgggctacgcgcgccttcgcattcattacggataagacgtgcgcctgtccattccactgacaggcgacatgctcagtccatgatacgtgggccgtgcagttactcacacgttaccatatcaagggcaatgactcaccattactcccgcgttaccgagaaaagggttcctacctatcaatgctgcatggactgcaaccatcatgactcccgc

SEQ ID NO: 98885 - DNA, 338 bp, Zea Mays
taagtctacgcataaataagagataagtgtacttgtgtagtgtggattgattttgagtacatatgtcgcaagaaatggattagtgcgcatataggagatgaatgtgtgatgaaatggtgacatgccttcgtagtcatcatgtcgtctgtttggtgacttagctgagagtcatgaagaaatgtcgcttacctatgtgttaatattgtcactctgcaactctgtataattgccatgtgaagtatgattggattagtctatgtttgcgatgtgtggtgtggtggtgctatgaaaaaggggttaggaatcgatcggccaaatgccaagttcggttagagttg

SEQ ID NO: 98886 - DNA, 500 bp, Zea Mays
tccctccctagaaaatatcagtaaaaatgctctgttagtgccttgaggaaattacggaggactaatcatagtgtatatagattctaatcaatagcaggtacagtgcaagcgtgaaatatgaaagacagaaaaccacaatgtgcaactaacaagcgctggacctaaatatcgagattagaatatgcagaacaccagtatgcacatttgcataggtgaagagtgtgaacctgattgcagacatgcaaataagaaaaatctggattacaagtaacaaggttcccaacaaccagatcaaggagatgaacaagcagagatcaataggcgaactaacctagatacacgaaggtttcacagcacctaggtcacgaacgccatcagcggcaaagcgggagtcttgagaacggtgtccggcaagaaccccaaaataaagaagagctggactgaggacgacggtagaggtaggtctctaaaatgtcaagaagggacgaggtgtagggggg

SEQ ID NO: 98887 - DNA, 291 bp, Zea Mays
attttgttctttttattaaaacctgttttcttaaaatgtatatcatgtgagcatgtacatttatcatttaataatgtgaattagctgttggatgttgaatgttttccttcatgtcatctgttttgttaatcttaccttttaagatgacaggagggataaaacatataccttaaactgtttatttcgccttcttgaagtcattctccctatttttgtaaatattggagattttgattgaaatcaacatgggatatctttctgaagaatatacatgcatgcagaatgctgttg

SEQ ID NO: 98888 - DNA, 452 bp, Zea Mays
ttgggatgaaagtcaaccttatgctgagttctcatataataatagttatcaggccagtctgaagatgtcaccttttgaagctttatatggcaggaaatgcaggactcctctatactgggatcagactggagaaagatagttctttgggcctgaactgattcaagaggcagaagaacaagtctgtataattcgagagaatttgagggtcgctcaaaccaggcagaagagctatgctgataatagaaggagaccactggaatttgaggaaggagaccatgtgtatctcaaggtgtcaccacttcgtggaatgaaaagattcaaggttaagggcaaattgtcccctcgcttcattggaccattcagaatctttaggcgagttagggagatggcataccaactcgagctacctgataatctatctgatgtgcataatgtgtttcacgtgtctcaac

SEQ ID NO: 98889 - DNA, 411 bp, Zea Mays
gccggctgtaatgccgaagttattttcagtcaagctagttgagacaaaggctgataaggctgaagggccaaaaattgaagaaataacgaaaatgccagagattttgagccctccaacagaggcaacagtgccgaaggtacaaaaggggtctgccaaaactcctaagaggagaaggatggcgaatgtgctggatgttgtgctagaaacgacgaaggtcttgagtccagttctcgtaaagaaagtcgttccaaccgaaactaaatcgcaggccaaaaccgaaactaggcaagccgaagctgcacaaattcaagctaaaaccaaagctgggcctatcgtgacattgcctgccgcatctgaagaaaaggcgacagagcaaattgcatctaaaaagatcgaagctcctgctcccga

SEQ ID NO: 98890 - DNA, 710 bp, Zea Mays
tttgcgactgttcggtggccgtggtaggaggtgagcagttgccttcttcttctataaatagtgttcttgcttctccgacattttcacatttcttgctgctgcttgctgtttaatctcctcttcttccttccactccaccatcgggtcacgctttagactgctttatttgcgacatcagtgctttggtggtagcggccgagttattattggcgatgttggcgctttttgaagtaatggctgagtgatagcgggccacgtcggtgttttagaagtaacgaccgagcggttactagtgatgtcagcgttttagaggtaacagctgaatcctttggagccacgtcgccgctttaggaataacaaccgagtcactgatggcgacatcggcgttttagaggtaacaaccgagtgatcgatggcgacgtcggcgttttagaggtaacagccgagtgataacgggccacgccggccactttggaaacaatggccgggtgaagtctggtaacatcagcgtttttaggaataaccgctgagttaaaatgggtcgtgtcgaccgttttggaaataacggccgagtgatgatgtggcacgcccgcgttttagaaataacggccgagtgatgacatggcatgcccgcattttagacataacggccaggtgatgacatggcatgccaacgttttggaagtggcgcctggcccgagaaaacccca

SEQ ID NO: 98891 - DNA, 449 bp, Zea Mays
aatggctctctggtacgtcgctctagcgttcttgaggccgaacgacaaggaggtatagcagaaagctccaaacggggtaatgaatgatgtttttcctcgtcttcttttgccaagctgatttgatggtatcccgagtagcaatccaagaatgatagtatagagcatccggcggttgaatctaccaccagatctattctaggaagtctgaagggatccttcggatagtgtttgttgagatctgtatagtcgacgcacatgcgccaatccactttattctttttgagtataagaacaagatttgctaaccactcaggatgcagtacttctctaatgaaccctgctgcgactaagcgagctagctcgacacggatagcttctctcttgtcgggcgtgaaatgacgcaacttttgtcggatcggcctcgcctggggatagaccttcagtttgtg

SEQ ID NO: 98892 - DNA, 502 bp, Zea Mays
tgcacgatgaagattagatcgtgccgtgggaaatgatggaccatcggatctggatcaaatgggtccggtgggatcatggggatttcagatctggggcgctgatctcagaatcaagggtcgtgggcgcgtatcggtacattacatgacttgatctaatgttggccatcagatcttaatcctacgacggtcagtgtgtaccggtttggactatataacaagctaattgcggtcgttaacaatagatccatcggctgatctcatcttgtatcccttcggtcgatcccgttttgcagtttagccctcgaggtttcttgaaaccaacccgccatcccagcctgtataaagatcagtgccactaagtcctaaaatttgtagtttagcccctcgctttgaataaaaatacgccgcagtccttcagcacttagaaattatgaaaatgatttttagtacaaaaataattctagaaacttgtttaattcattttaactcctttttgatccat

SEQ ID NO: 98893 - DNA, 436 bp, Zea Mays
ggctttgattgttgcatttatgccactgcatagtgtttatgagtgcgaaatgttattagaacagattaaaatatctcgagggtattcccaagagttgttggaattctcggaacgtttctttgggtagtaaatatgaatttcagtttttattctaatattatttaaatatctaaaatttagcatttgcgaagaactataaaattctagaaactcgataatatatgtatatatttttctttcgtcgagttcgttctagatctcatgtccttttcgcggtgtcgttaaaacatcactcctcgcaatcggcgtgtcgctcgcgtctactcctatctacccttcttgcctcgtctcgatgcgcaatgcccatatgctgtgcctgcaaccgcctttttccctcacccattcctttcgctgtaatcctagacccatgtgtcaa

SEQ ID NO: 98894 - DNA, 273 bp, Zea Mays
ggacgtcaaacactaaaatcaattatagaaaatgttttaagcccatttccctttcagttgccgaatttgtgtaaaggctagagctggagcctgatagttaaatgttttctatttatgatttttgaggatgctatttagagattttgtagtcttgattcttgaatcttgattatcttattgaagggattctgttgttatgatttttgttttgaatattatgaatcatgttacttagagttggtggttgctgctgtaacaactaacatgcatttg

SEQ ID NO: 98895 - DNA, 702 bp, Zea Mays
agtgctaaagtttagcaaaaatttagcaggtgttaaactttaagtgtggttacaacaacacttcctcaaaatctcatgcacacagatgcgggagttcaaatcacctgtgaatcgatctcagggctacaaaatcaaagaggccaagcctaagtgaaggaaaactaagaatcctatagcaacgccaaagagatgactgaaacaaccagtcctcccacctatttatagggggttatttcactagactaaactacccctagatacatagaccttatccactcagtgaggggtaaaatggaccaactttaataattcttgatccgacgaccacacccacttcataaagttgcttcgccttgacgcgcccttcatgtcgacgtcacggtcgtcctcgattcctgccaaaactataccgctggattttgaggccaaatccggtgaaaccagccctccgtagcgctggatgtttttgaggctcaaccactaaaaccatagcgggtagcgtactccatacgcatcctccatgtcctagaaacgtgtcctgtcagtccacgaccgtgtcggtgacacgatccgctcctccatatcctcgctcacgttagtgtctccacgtgttagccaatatggctagtcacctagcttatttagtccctcagttaagactcaacgctcatccttcgccgctcccggtccatcgacataaac

SEQ ID NO: 98896 - DNA, 642 bp, Zea Mays
gcgatagtagtagtagtactactagtaataataataattaaaggaactgatacttttttaacaatcataaatataagatgtctatacaatttttgtccacttacactaaagccaatcgtgcaggcatctaatactgattgtacttgtgtgtgcctcatgttttggtcgtggaaaaggcttcatatggatcaacaatattcaaatacatgtgcccttgcaaatcttcacatcacctttgttaacaatcttatgaataaggtgacaacatggaagtatgtgtttggattttttttttgtgtgatctaggttaattggctcgtgcaatggcaccattattatcgcaatgaaggtccaaaggatttagcgtagtcaaaaccacacccaacttagaaacaaactttctaattcaaacaacctcattagcatgttctgacattgcaatattcttgacctctatcatggaattaaccatcatctcttgtttggaacttttccaacctattgctttttccattgaggcagaacagaaatctagactatcattaactatcatctttatcggtttggaagtttgcatcagtgtaaccatttacaatgatctcttcctcacaaccataaattaggaacatatccttagttctt

SEQ ID NO: 98897 - DNA, 371 bp, Zea Mays
accctcactttaataagagcttcgagggtaatctgatgaaggtatatctcaaatgccttcaaaacatcgactagaatcttatgaagtgggaaacgaagcctagccttcataaagctcctgaagactatcacttcatcgctttctggtagcggaacggtgtcatctcccccagccctcactatagacacatcatgaatatttccccttcatcgattcaatttgtccttacttgatagtggatttcccaaaaacaacgtggctaggtctccacggccgatcttcggcattctcaacttcactctcaatatcaaagctttcactatcgctggagttctcaaacaacccagccaacatctcattggtaatttttt

SEQ ID NO: 98898 - DNA, 307 bp, Zea Mays
gaagagcagaaggtaataatgggagaaaaggtctctaggggagaaggcccttcaacacaaggaaatgctgagacatgatgatttgtgattcatcactcatctggcaaaagcgcagagcagattatcgaaacacgtgcttttgctgagaaacttggatatccttcgagggcaatcatttttgggggtggaccatatgattatctttgttgctgccctgacaacttagagatcaacgtgtgtcgttacatgatggacgatgttagatttccgaagcttgaagctgggctatcattaatgtccttcaaag

SEQ ID NO: 98899 - DNA, 513 bp, Zea Mays
attatggcggtgatgaagatgagcgaatggagacaaggcatgatgatgtcttcatggcatgcatcgagaatagagcgagtgggggcactgagatcagaaacgcttctgtttgtgcacgaataaataatgaccggtcgcgtagcactgccgtacttctgttccactctcgtactacgacacctaggggagtgactgtaaattgttgcggttttatttatgtttgagcataagtataaagacaaagacatcttcatttgagatattatactcgtttaatttagaggagtcgcacttgagcttgttgtctttgagatgcatttgctagttatgtttttttttgaagtaacatttgctagttatgttgagcattatttgcctcttctagaggactagcaatgttttaggaggagttttcggtgctagtcttactaagaagtgttttggggttttatgtttatctgatttcttcttaaggactagctatttttgcttggttgtgacgaatcattgccc

SEQ ID NO: 98900 - DNA, 526 bp, Zea Mays
tagttggaacagctgctaaaaggcagttattgttttatgtgagtcgtgatcaagtgtatgtcgcagtcagttttattgcgttggttcagctctagttttgtttgcccagcagcatgtgatgaggctgggattttacagtaggtcctaaaagttgattatgtccttttagtcgctagtgatccactatgttgcaggcagcttgaagccttggctacctacctttttttgctgttagttcttaatttgcatcctgagtgtttgccattcctaggcttcttgctgctgcttttttagatattatttatgtgagaaatgaagccatttgttttacaatttggtttcgtgtaggatgatctgttatgttctatctgaatcagtgcgtttgaccaccttgcatagttcagtttctttgttttggctgccgtgttatgacttatggggttggaatcagggagcattactgcatctttgcactgcaccaagctccaataaggagatacaaacaatcactgtttggatggtgtgt

SEQ ID NO: 98901 - DNA, 1139 bp, Zea Mays
tgatgtcgtcgtcttcttctttgtcatcgtctgtcgcgaccgcatcctcaaatgtgccatcgtcggagaagatgattagcaatccggtgacagcagtggtgctacaaccggatcatacggttgagtttgggacctcaaggatttactcgggtcgcatccatgagatgcaacacttgggctattttgggaatggtgtaggacgggctccgggggctgaagatgtcctcgagccagagggtgaattagtagtttttgaggcgttttttactgctggacttcgttaggctgcacactggtttatagttgaagtgctgcgaaggctccagattcaaattcgtcagttgacactaaataccatggtggcactggcgaagtttttttgggcggtgacatcgtacattggggagccgtcggtcgaggttttcgccaagaattacagtcttcgctggcagaagaagatgattggagggttgattccgcagtttgggtcatgctcatttactctaaggaccaaaaagacttcgggcgaggttgttgagattgtgtcgtgcgccaaaaataagtggggtaattggtgggacttgtaacaccccagatgttacccaaggcctggctcaacacattcacttgtgacccattatcacatgtggtttagtgtggggatgaagcaccaaaatttagaggcaatgtcttaatcaagtgttggatatgctagaaggagtatcttagccttttcatgcacctcaaattgggaaaattgctcaaaaccctagaaacccccctcttgagccattagacccccaagcattggattagtgggaaaactatgtaaatgaccaattcatgacttaaaccttttacaaaagttgaagtacatttatatgtatacaagaaaaagtcagggagttatttcaaaaaggtcccacaaaaaccccaaattaagcccccaagtggagagcactctagagcaacccaatttttctctaagtcaaaaatcagccctcttctaaagatcaaaggtgttcacttagttgctggcgccaaatccacatggtccaattgacaaaagggagccaaattacccaaggcacgcccctgaaaaatttgaaaccaatccagaaccgtttgacacggcttga

SEQ ID NO: 98902 - DNA, 491 bp, Zea Mays
acctccctaacctcccgggtggaaagcctagagcaaaaagtcagggaactttcagaagaaaaggcgtcccttcaagagagcctctcaatggccgaaggggaagagaccaatacccgcgaagcttaccgcaccctaaaaatggactacgacaagaaactgaagaagcttgcccccgcaagaaaaatccgcaagaagaccaaaagccaagggtgtcagactgagcagaaggaagaaaaccctccaaggaacccatccgacaccgaagagatgtccctggccagccttgatgaccttctcaaggaatttggggacactttagagaaggagttcgggagtaccctagatagcactcgcgtgtgatgagcttgtggtagcagggtgttgtgttatgtaatggcttgatgtaatgaataaaataactagttaaaaaaaatagcatgtgcataatagtgactctctttccatggcagatggcttcggatagaaccacg

SEQ ID NO: 98903 - DNA, 758 bp, Zea Mays
tattagtggtcgtggtatgtgtttgcagtacccatcggatacatatacgttcacatccctaccggtggctgtggagcaagggaatggaggcccttgggcaggttttcttgttagcctaaccctaacacttctacatctaggcttggttgtttgaaatgagggcactacatgtgagtaaggtcaccgatcgtgatgagtgtgttggatggtagtgacaggggagcaagaacgaacttggcaatcgggggtaaggagtaaggacgacaatggtggataggaccaagggctattagtgatgtcgaacaatagcactgctggtggagggagcacatgagctatgcgatatgaggctactacgaccgagagttgaggcggtggtattggcctagagtagagtggtgcgttgggcaaagatgtgcagcgtatagagaagatcgacgaagaagaagatggtgacatatgctgtgtgggtcccacatgaaggtggcatgatggatcacaacgactgcccgtctgctgcgtctcaatcctcataccgaacactaaatatggtgttgacgtctttttggagcgccaatgtgatacccaattttctcaaaagaagttaaatgtatttttcccttttctttcgtgatctgtgtagttggggttggagtttttttaggaagcattcaccaataaaacagtagaatacttgttggatttgtgcgctggggtaaggagcagacgtgagagcgagtttgggtcgtggatctcga

SEQ ID NO: 98904 - DNA, 560 bp, Zea Mays
caggatgtctttttcttttagagaaccttcaagttccttgattttatcctctaagcccttaattatgactttgtttttttctatcttcagaatcctgctacattttcaatgccttacttaacaacatgctctgcaaaacaaaggtaaaattagaacactcaatcgaccatgaaggtaataaaaatttagacgaaggtagtaaaaatatagatgaaggtctcaccttgaagttggaataaaataggctaccgacaatgtgttgccgtcggtaacagctaatgttggtctccagcttcgggaatcaaacaatcttggatagagtgccgattatcttcgcccgacacggtcgctaatgcatcctaaaatttcctcatcaaccccaccgaagagtagaccccggctggtaaccacaagatatagcaagttctttcaattccaacttgtcttcctcagacagttcctgactgcccaagtgccgaaggtcaaaatccctctcgtccgaaggagtcttatcaatttcctttccttcatttggcaccgcggccatgttttcttctgca

SEQ ID NO: 98905 - DNA, 642 bp, Zea Mays
aattattaaataaatttaaaatatattaatagacgctaattatatgttaaaattatttaatagacactaattgcatgttattagacactaattatatgttaatcttaagcacaattttttatttgaaatatatatagcaatgtgtggtctaattttgttcgcataagtatcaagaacatagatataaaaccagtttgatgattaaatcttttaattagaagatataatgaaaaaacaaacaaaaaaacagtcttggagtgtgtgcatgaacaaacccgttcaactcccggcacgtgcgcgtacgccctcgcgggcatttcctgaggcctggctcggactgcgtcaaggttcatgtcagcctatctccaaccaaacaactgttgttttatggattcgtggatgtagctgcaccccgagagatggcaaccaagcgcttcctttgtaaatggggtttgttgtgaatggtttttgggccttctccaagctacctagtgctaggattaacaagtgtgcaccacacctcacttagcctactagtttatatctcctttatagtactaccaaaggaaacaaagtcctaaactactctaagtgtctctcaactccaatcaacacttataactagtacatccttaacctcat

SEQ ID NO: 98906 - DNA, 345 bp, Zea Mays
aacaccttgttgcagtcaagcgcatacttcgttatgttgcagggacagtgcatcttggatgtcattaccagaaggaagcgaggaaggtggatctccttggttatagtgacagcgatcacggtgctgatgtggatggtcgcaggagtaccagtggtattttgttctttctcggcaaaagtgtgatcacctggcaacctcagaagcagaaagtggttgcactctctagttgtgaggcagaatatattgcagctgcaacaacttcttgtcaaggagtgtggttatcgcgcctacttgcagagctcagaggaaaagatgtagacactatcactctgaagattgacaatc

SEQ ID NO: 98907 - DNA, 434 bp, Zea Mays
gtgcattcgcgtggggaactggtgctactgcttggtatggtgctatggtaccagggaagggatgggaaccgtgtgcttgttgtagtggtggcagctcgcagccacggcctacacgcagacgtgcaaaacaccacaccgcgtccaatcgtcttatatgtcgtcacttgttcagtgaacctgtttcagcatagattactcctactattatgatcatgtaacacttcgaatgaacctcagcagaaaagaatgagaaatctcggaccactgcctttgcgtgctacgtttcgctgcgaactttagccgcagcaggagaccagcgatgtcttccatcccgtccgtccacgcaagaagccaaacacacttcgtgcatcgaatgtcattttctacgtgccacggtcgctcgtaccgtccagtgctgtgatgtcattttcaac

SEQ ID NO: 98908 - DNA, 554 bp, Zea Mays
tttctcctttagagtggatcgaccaatgttaatatagcttggcttcgaaggtctatcctttggtaactctacaataggtcttgatcttgatgaagccctcattgcctcaaaattaggtagggtgtcttgttgtgcctctaaggaggtaggagtgatcaattttggggtggttcggatcctggccatctgttcaagacgaagattttttctaaaaagtggttcagccgaggctaactaccgaagcacgggtggatgggaagcttcggaggcacatgaaattttggcagcgtgtaggtgagggcagtaaatgagatctacactcaccccctaggctgcttttatactaaaaaccccacgcgaagcgacactagtcactaaaaatattccttcacatcacctgtggcttctcccccgccgattcgacttctggaccgcttgtttccattaaattgaatctatcttcttcgtaacgagcttcgagaaggtatttttcagatcttccgcataaggtctccaaattatattttttcgatctaagctcgttatgaagaaac

SEQ ID NO: 98909 - DNA, 502 bp, Zea Mays
cgcattccatcgcgaccagggagctcttgctacgaattctggtaagtcgctaccctatatggttagcctcgttgtcctcatcgtgtagcaccattttatgtggggttttggcctttggtatggttggagggggggcctcgtcggtgatgccccgtcgggcagggcgatgcggcgtcagccgtggagtctggggaagaagatacacccccccaccgttgatctctctgcgaatgactaggattagatctaggtgtgggtgtgctgccaccgtggatttggtagcgaacgggcaagatcatgccatcggatacctcttcggtatattaaatcaggatccttgatccatcattggacgatcgtgatcgactcggggttgctttagatctaggccgtaggtttgtgattgggcagtcttgcgctgtccacggattcataatgcactagatctaatctgaaccatcgggcgccgatccaacggctccgatcctagcgtaccccttcg

SEQ ID NO: 98910 - DNA, 317 bp, Zea Mays
gggcccactcgtcataggcacagggaggtcttcttcaacctccagccatctcctccacgcaagggagcagagaaggggccgggctgggaggtgagggaggggagacagccatggatgagggagggcgccatggggaagaaggaggagctccctgctcagccaaaatagagaagggaagggagtggtgtgtggaagggagagggtgggctgccatttatagagccaagctctggacatgtcagactgcaccagcagatgacaggtgatggcagagcgacttggggcgcccattttcgtcgttttctccttggaatcgg

SEQ ID NO: 98911 - DNA, 484 bp, Zea Mays
ttgtgctttgcacatcttagagcagatgatgtgcaaggaggacatatgggtttatactggtttagaccgaatgtcctacgttcagttgttgcttctcgtgttactatgcacatttttacaataggaggttacaaacgggtgagagaggggatgcgttcctaagtctctatgtgcgagagtgtgcatccatactagtgttcgaatgctagaactagcggtgtgggtgttccattgctcatccccctgattgtgggttgctctcgtccttgtatagactaaggcaggagtggccctattacaagtgtctgaggtcgggtgaagcagatgaggatcaggtgttgttatatagttagttgtccatcggggtttctgtcagtcaagcgaagtcgtggataacatctactccttatgtaaggataatgtagccatgcgtggggcatcttgaagcctttcgttacactttgtcacgtcctgcaaagggttg

SEQ ID NO: 98912 - DNA, 617 bp, Zea Mays
gcgagctggccctgaggagtcaaacaaaaaatttgcggagattatcaatgttccaggaatgctccaagtcctcgtcggatggcgttgcgagcctgtacgcgctgggggacaccttcgtcttgacgatgaaggggccctcccacttgggctccagcttgccccgggactctgtccgagctgtccggacgagtacgaggtctccttcgctgaattccctcaggatgactgtgtggtcacgccatgcttttgtttgggcttggtatttgtttagagcctgtagggcgaagacgcggtctccatcgatgaggtccttcgaagtgggctcgtccacgtcggggacagctgacgggactgtccgtggggacccatgtcttatttcttgcggggtcatggcctccgatccatatagaaggcggaaaggggtgaacccagtcgccctgcactcagtcgtgtttaatgcccagaccgcttcgggtaacaaatcagcccacttgccctttttatcgtcgaggagcatcttcttgacagctgtgaaaattttgccatttacgcgttccacaactcctttggattgcgggtggtatactgaggcgaaggcaagcttgctgccaatggag

SEQ ID NO: 98913 - DNA, 342 bp, Zea Mays
cagcgatagggagccaatccaagcaggtagggtagagtaccttcatttcatcaaggagtagtttcttaagacgacgttgatagtcttattctagattattgatcgtttattagtacctaaggagttccaaatcacaccgatcaaaatgggcaacaacaacaggaaggccaatccaaaaaggtattgtagagtgtcttcatcaaggactactatacaatatgctcccacattgtgcatgcatcaacagtacaaatataacaagacgtgcttgatgtattacatacgatggttatatatagagacttaactctaatcctaataaatttggtgtcaacccacaca

SEQ ID NO: 98914 - DNA, 984 bp, Zea Mays
cttggtgaagatatcaacgaggtggtcgggatgtggaggatgcgaacatcacttatagtgacatgctcgcggacaaagtggaggttgatttctacgtgcttcatgtgctggtgctccatgagattggtgttgagggctatgaatctgtaagaaaagctgatgaagcgagaatgccttgaccacattgttggttacaacgtgatactcggcctcaactccacagcgagagacaagctgtagtttcgaggactaagagactaggttggtgcctaagaacacgacatatccgaaggtggacttgcgcatgtcttagcaactagcctaattagtgtcggtgtaaacgactagctcagaggttggatagggccgaagaagatggtcatgttcgaggatgtcgtagtgttagcgaagaatcctctttgcagcggtgaggtgtgactttcgcggggtatgcatgtaaaggcacgaacataggtgatgtcgggtgggtgaaggtgaggtactggatagccctagcgaggctttggtaggttgtcacgtcgtcggccaggacgccatcgtcgttgaagaccttcgcttgggtgtcatcatgcgtgaagcaaagcttgcaatcggatatgccagcccactctagaatgttgatgatgtactagctttggtgaaggaagaggccctagggcggtgctccacgatgacccctagaaagtggtggttagggcctaagtccttcatcgtgaactcgagctggagggaggcgattgtgagctggaggaggacactatacgtcgtgagcacgatgtaatcgacataggtaggaggtaaatagattgtgcgttggaggagggcgacacttgatgtcgtgagcacgatgttgtcaacgaagagcaggaggtagagtgtatcattgtcgcgtggaaggataagcagagacatgtccgacttgtcttcgacaaaggcaaggaagaccaagtaggaggcaaagcg

SEQ ID NO: 98915 - DNA, 289 bp, Zea Mays
gtttgttgcacaatcataaaattgtcttggatgaatcgacctttgatgaaagcactctgcctttgggagaccataaattgcagcttattccccagtctgttagctaggattttagtgactagcttggccatgctatgcactaaactaataggccgaaagtccttgacttggtcagcaccctccttttttggaataagggtgatgagagctgaatttaatttgtgaaagtgaccaaacttcctatcccaaatggctgccaaaacttgcatcacattttctttaatgatag

SEQ ID NO: 98916 - DNA, 469 bp, Zea Mays
ttataatctattgttggatgccataaatttatcattcatgtcttctgttttgtgcaacgataagattgattttaatgtatatggacaagatatttagatacaatcacacaattaaacttttagctctatctgtggagcaactttactttagacaatgtatgccgccatggtaattgatgttttgttgttcatagtatgattcgatgactactatatttaattacttattgacaaaacatgagctatttcagaatacatggaattaaaattttaagacaataagtacaaatatgagttatttcagaatgcatagaattaaaattttaagacaacaagtacctggtaacaagttaatgtttttcatgttagggtcaagcttgcagctgtatgaagtttttttctgttgtattatgtctccatgacttcatagagtgtcttttttcatgtttaatcattacttaggttttat

SEQ ID NO: 98917 - DNA, 415 bp, Zea Mays
ggcgcttggagcatctctaccaagagagggcaacatcattcactggcgtgctgctactttctaggaatatgattcacaacgagggtaattataaaggggagccattatttctgaattacaccaagtcttctatcctgtcggaggctgacaggtaggcccaacctagcaggggcgggcccaacacgacagggttgtggacgttcactctaggcctttgctctcaagaaagggttggccttagtgcgtccgatcttgacgaaaactttgagacacccttgcttgggggatccttcgccaatgatcacactcgctccccttaggtggtggtgagttgactcctcatgggatgaaggcccttgcctcttcaagtgtagaggcgaagaggccttcaatctccgcaaacgcccgaacgctc

SEQ ID NO: 98918 - DNA, 528 bp, Zea Mays
aatggaaacagcaagggtgcagaaaaacattgaagaacttcgggattccagagaaaaatgcttcgaagtatctatggattgtgtgaggaaactaaaagatagttttgcaaaagtgggtgcatactcatcagagcaaaaaattatccgaggcgatcccgaaggagttattcaatggatcggcgaagaggtcgaagcttttgaagaaatactcagcgaccgcggggatttttgtgccttcgtcggtgcccgaggggttgcagcagttttggagaaaactggctatgaacatgttaagactgcagcccagacagaagccaccttctctgtagacgatacgaaagaaccttcaaccgaagctactttgatgggcggtaaattctattccaatgtttggatgaagggcggtcatgaaatggccgatgaagctataaagaagagtgagaaagaatcgcacgatgcccgagtggaggcgaaggaagctgaagaagctgctgaacgcgcattgattataggtatccttttaaaaac

SEQ ID NO: 98919 - DNA, 733 bp, Zea Mays
taagcgcgagcatgttgcaccgtcttaaatcgttaccgacttaagctgattgctccgttagcagggcatagtggtcaccccgagttaaataagaatgctggtcaatcatgaacaaactgagtattcttgaagccttttttattgatgacatatttcccattttatagagtacattattgtcccgatagcttttgaaatacagctaggggtaaaacttcctgaggtgttctatattccagatgttcccaatttctataccgtccatttgagtgagacgatatgatcccggccgagtgacttctgctactatgaatggtccttcccataagggtgacaacttgtgtcgtccctcccctgttagaattcggcggaggacgagatctcccactgaaaaggatcatcgtcgtacggccttgtcgtgatagcgtctcagagtttgctggtatcgtgctgattgaattactgcgttcagccgttcttcttcaagtacatcaatgtcctccagcctagtagcttcggcttctgctatgctttcgaagaccaaccttggcgccccaaacttgagatcagcgggtaacactgcttctgacccatagaccatgaagaaaggagtgtttccatgcagagctcggctcggttgggttcttaggctccaaacgacgtagggcaattcccttatccattttcctgtgaacttttcatttttatcaaagacctttttcctgagtgcttc

SEQ ID NO: 98920 - DNA, 374 bp, Zea Mays
agcacttcggcaatcatcttgttcaaagggaatcttaaaccagctttaaaaagacttttgaaaaccactacttcattctttcccggcttcgggatagtttcttttccaccaaaacgaatcaactccttcttctttcactaaaatagcccaacttcaccatcttaaaaagatcagccttggagatggtggactttccgaagtccaggtggctaggtttactcggcactgcactgctataatcatcttcggaattagtttcttcagcatcagcccgtcctgcttcggcggcaggtatatcctccgatgttgccagcccagaccgcctcattgcttcagaaattggaacagtttcagtagcttcggtctcatctccc

SEQ ID NO: 98921 - DNA, 358 bp, Zea Mays
tgcactaagccgcaaggtttcctgccattgtcttacggtgaagacctctgacaacactttatgtcaagagatggagaagctaaacctgggaatggtccaacaaggaactttgaatcagctaaagcttgagtcagtcctcttacaaaggataattgatgcccaaaaggataatgagggtatgaaacacattcgtgagaagttgagggatggaaaagccaaatgtttcaaagaagatgatcaaggcattgtatggtttaataaccgcatagtggtgccaaagaatgaagagctccgccagcaaattcttgatgaagcacatcttagccgctactctattcatcccggaagcactaagatg

SEQ ID NO: 98922 - DNA, 1064 bp, Zea Mays
tgcacgagccaggatttggacttcccatcaccgctaccatagcctggtgactgatcaagagcgccaggtgtgtgagtggagacatactgatcagcaaaaggggaagtaagtgccaacaagtctgtcggcatgcccaacggcagcccttctggacccaaacccgttcctagcattgtcccattaacaatctgattctcaagctgagacaccaaccccatgtcacaggccccatcttgaggcttcttagaatcaccatgcaaagagttatcttccatgacagtatcttctgctagctcctccagctgaaaagaatcatttccatgtttctcagagtaatcttcatcctctccttgctccttatcatctccgtctcgattacccatgttatctgtatctgtccacttccccgctatgagaaccttgtcaactttgaaaaaaatctcatataacccttcaccaactactatttcagcagactccggaatatgatttacattagtcactgccaccaaaatacgaaccacccccattttcctagtgtagcgcatatcaactttctgagtagcacccaaaatagtgcctattgcccataaaggaagaaaggagcggatttcaaaaggaaccccataaacattcacccaagccttctgcagataagaaataggctctattttttgattaacctcctgaatcactaagataccttctcctcccaacgtatgaacatatttcatagcaatcatacgttgaagctcaacactgcatgggaacggtactataaagccgtcagcatgcctttggaccgaccaattccacttcactggtataagtcttgagagctctgacttaacgagatcagcagagacattaccttccttcactgtaatgaaagtcgtaacaccatccgacctcggaattgcacccttagatccccaagttgggatttggaagaaaccagactcaccgcccgcaaaaccgcatagagctgcctgcggctttggaccattaaacaccggacactcctcagggacatgattatcttcacaaatttcgcaacaaagatc

SEQ ID NO: 98923 - DNA, 428 bp, Zea Mays
ggccaatacagctgctggcgtgcccagttcttactgacccttggcaagttctccctacaggatcacgtccacctgacgcccccggttccctcccggattgggatcggatggattgtgtcatcaagtcatggatccttgtctccctcgccgatgacctcgccgaaatcgtctcctcccagggcaacactgtctgggacacctggctcgctgtcgagtcccagttccttgggaaccgggaaacacgtgtcatccatcttgaaacaaggttccgcaacttcgtctgtcacctcaagaagatggctgatgaccttggcgccctcggggaggtcatctcggaccgcaccctcgtcctcaatgtgatctacggcctcaacgagcgcttcacccacgtcggcccttgcttcgtcgcgctcggcccttccccacct

SEQ ID NO: 98924 - DNA, 1021 bp, Zea Mays
ccctgctatgctaaatccatggagttatgaaccctgatctctatagtaaagttgtagatcatacattaatgtatgacttttcttaagaagcattggtctgttgccatatgaaatgatgaaataaagggggcatgaacaggataggttcaggtgggcagtagggcgtggaatcagggaagttcagtgttaatctgcaattctgaacaagatattttggtactattgttagcggttgtttttggccagtggtgttgtggataggtgtgagcatcggtgaggaggtaagggtaaactttgtactccaaatatctgaaaccagaaagttctaaagtctatcttaactgctgccttaaccagtggtatgcacctttattaaaatactactgcccctacggtttctgttgctgtaacttgcccttacgtgggtgtggatgccagggccatgaatggtaaccctgctgtgctggcatctttgggatttctcttcatcgggttgtggttaagcttgatggttccctcccccttgctctgcatatattcggtggctgcaaactgaattcagtgaagcccccctttctacacttaagtctagccaaggttctctgcatatgtgaggtgttcctggggtcttcaagactacacagcccctccccaatatcaaagtggatctgctctagaattcgagcatcagttcccgtgtctgtggtgagttggtgacaatagccgccatcctcccacctcaccgtggccaggtaatctcaaaggattcctcaaccgtgctgtacacgtttcgtgctcttcattgatcagtgaagctcaccatgttcgccgcttcaactctattgtggtgtactgcccagaacatggtcgcgccgccgtggatcggcgttgaagacaatcctactgtagacccgtcaactggcactttctctagtcgattttctcgcaagcactgaagcctaggtatgtcgttgatgctcaccgcaacgtttggttgaactctactgttttgttccttcag

SEQ ID NO: 98925 - DNA, 506 bp, Zea Mays
ctctcagctggacatcaccctgccctgtgcttcaatgcttctgctggttagacttgcacttcagtggccacatttggacttcctcccatctcagtcgatcttctccttttgtcgcggtacatttattgtggatattttatggatatgacttctgcaaaaaatctttaaaaattcctggcgacacacccaatgggtgtgcccaaggggtgtcttggtacgcagattgtttaccacattgtcctggagtagtaacttgatgtgacttggggtgtgtaatcatattgcctaagtagttgaccttggtccaaacggtgccgtgttacgcgaagcggtgcctattacctgactcattttcaggcggcttgaattgcttattgaattcttgtgactgtttggcgagcgtggtaggaagtggacggtcgcccccggcctctataaatagcctacttgccccgttgttctcttcactcattcttcgatcatctgcttttctcttcttcttcttc

SEQ ID NO: 98926 - DNA, 658 bp, Zea Mays
cactactttgacgaccacaatgtcatagtagtcacaggatttccaataggcgatattttcacaacaaggaagctgctgggagaatagccaagtgggcgtgcgagctcggagctcatgatatagagttctgaccctgcacagcgataaagactcgagcactggtcgacttcatatcagagtggactgagcaccaggttccgaaaagcccagaagtcgctgaaatatagaggatgtacttcgatggctcgctgagactacaaggagcagggacagagattctctttatctctcccggaggtgaacaactcaagtatgcgctccagctcctgtttctagcatccaataacaccgcagagtacgaggcgctggtccatggactaagcatcattgtttcactcagaatcaagagattaatggtgtacgttgactcactggtggtcataagccaagtaaacaaagactgggattgctcgactaattcaatgaacaaatattgtgcagcggtgcggaagctggaggacaaattcgaaggattagaattccaccatgtggaaagggatcgcaatgcagcggctgatgcactatcaaagttgggatctagtcgggcccatgttccacctagggttttttccaagaaatacaacaaccgagtgtcgcc

SEQ ID NO: 98927 - DNA, 286 bp, Zea Mays
gatccacctcgtttttaaactggtttccatatctggtttctagaaaatgactttttattaaaactaggagaaggtgtttggatccacatagtttcttataaaatagttttagctaggtgagatcaacttcttggtttttaagaaactagaaactgaataaaaaactgacctatttggaaaccttttagcttttaaaaaccagctcctaagaaactaagtggacccaaataggccctatttaggagggcttcattttaagaattgtagctttgatttttcagtttca

SEQ ID NO: 98928 - DNA, 647 bp, Zea Mays
tcaacctaaattatttaagattaaaaagagataaacaaaacaaacaagaaagtactatatctttatatatccatcctatcctactaagatccatcttgccttaaaagattccatcttatcataatagattcatcttgttgtaataagcctacttatcccaacctagagtaacaaccatgacctaatccaaattaactatattctatcaagtctaatctactcataccgatctaatctagatcccatctaatcagattagattgaatctaatgagagttacttaaacatggtagttaatactggtgaaatacactaggctctactcctataaacatgatttaacttaattcattttaccttaaattcatggcatagcctagctcggccatgcacaaccacctgacctactaaatgagttgcctaaatccatctatcctaagctaagaccagaagtaaaccttgtttgacctacctcattttttatagccatctacctagctaaaatcttatagacaagatggagacaccaagaccaaagatgatcaacctagtcaatgaaggacgagagtcaaaccgagaccccaagattcaccacccaagatgaagtcttttctcgccataatctttcttaacctaacttatcctta

SEQ ID NO: 98929 - DNA, 360 bp, Zea Mays
tgaaatacagctagggataaaacgttctgagttgttctatgttccaggagttcccgacttctgtgccatccatctgagtgagacgatacgatccaggccgagtgacttctgctaccatgaagggtccttcccataagggcgataacttgtgtcgtccctcccccgttagaattcggcggaggacgagatctcctattaagaaggatcgttgtcgcacagccttgtcgtgatagcgccttagagtctgctggtaccgtgctgattggattactgtatttagccgttcttcttcaagtacatcaatgtcctccagcctggtggcctcggcttctgctatgttttcgaagatcaaccttggtg

SEQ ID NO: 98930 - DNA, 919 bp, Zea Mays
ggtagcagtacactcagtaacagagcaatgatgaattctgggaagtatctctatctaaactcctgaacaaggagaactgcttacaagtagatgcccctgttgatccacacaacattcctcttgctgctgtggttcgggaccgcattgactgccgcctgcacggtcgtgaagtcacagcagccattggggtcgacgcagaagatcgacagtgctggcgtgtcggccggggggaaatccggtgggaagtcatcgcacagcgggttgtatctacagccatactgatgatggatagaggtggaatcagccgaaagtgggtacaatgggggaggcattgtgagatcaaagagggttccagccaacggagtggttgaggagtagagatgagcagcggttgggaagtagaggtgagtatagaaaagaaatgcagcagctgctgctgccacaatggtcttggcgctcatctgcatacatgaactgagctcactatttggtcgttggatttgggggtattttaacatgatgaaatgcaccgcgccaagcagcttgaattgcattgccttgcaaacaatctatctcttttcttcaaggttaagacgccgctcaacgcagcctgcacaaccacagcatttcatagttggaaaatccttttcaggtcgttgtcagaatctatgcgtgatctgaccaagctgttgcttccaaggagcaagttccagcagcaacaactcttcatagggtataccccagaacagaaggaataattaaagtacacttaagatcgagcagccgttctaaattcacattttgatgcatttgaaggtcattaacatgcaaacttgccttggttccagtaaaaagcacataaatagggcaggccaccatcacatcatggcttaaaaagagcctacacgctattacttca

SEQ ID NO: 98931 - DNA, 375 bp, Zea Mays
ctgggctgtaaggagtaaggggctagagccaagcgcgaagtgcttctgcagtatgcacgagcttttatatgagacgaaggctactggcaaagaacagtaccacaacaacatcggttgttatgaatttattgctcgccccaatgcaagccacccggtgccaacatttcagaaaagatggcccagggcctggatggaggagtggttttacgttaaaaatgatttaaaggcaagggaagacatcaaataagtcattcagcgccctatctggtcttgcttcggcctgtgaaggccaaaagtggaaattgatggcactgttgaagcatgtcagagggcttttagcactgtgtgtgccttcattggcacaagggatttgat

SEQ ID NO: 98932 - DNA, 417 bp, Zea Mays
gccgattgtgcgcacgacctcacccttccatgacatgtatcgtctaccgcaagtttcttaaccaagcacgagggttaccactacgtcgccgcttcgggcactagcgttgccattcgttgttgcccccatcgttgcatctacatcgctgtcaactcagtcgatgcgcgtctcctccacacggtcttcgagctgtttgacacctacaagctgcttcggcaaacctgtcgatatgtgttgcacctgcatgctgcgttgacaccctccgtcactggtctgcaccacgtgcatcattgattggcgcgccccacttgtctcatcgagtctcatcttcctgtgtgtcgtggttatcgccactgtgactccaggatcctcgaagcatcgccacgcctacctcttcgagcacaaccttattgcaag

SEQ ID NO: 98933 - DNA, 410 bp, Zea Mays
cacccattggggtcagtttcaacaggatcacacccattggggtcagctggtgcacggatacactcgttggggttagttggtgcatggtcacacccattggggccagcttcagcaggtacaccaccattggggtcaacttcagtaaagacctctgttgatacttcttcgcaaacaggagcagaaggtccagcatcctgatccaagcatgacagttgtcgaagccgtttctttttcttcttcttctcctcagcaggcgcagtcgggcggctgacctggcgaagacgctttgggcgagtacccttaggctttcgagtgtccattgttttgtcagtatctggtataaccgcaacaaccattgtttcagcaggggccgagtcagaagattctccagccaacatatcgagtacaac

SEQ ID NO: 98934 - DNA, 517 bp, Zea Mays
gccgattccagtgagggtggtttagttcgactgaaatataccttcagatttggggagaagtttgatgagccgaacgatgattggttgaagtgtattgaagctactagcgatgagctacttagggcatactccaaggtcgaggataatgccttgttcgtagcttttgggggtcagaagaaaaaaagattgaacagggtatttgatgccattggcttcgtataccctaactatcactacccactgcgagagcaaggcaaaaagaaaaagattgccgctctagttactacaattgagccgaagggcaagaagatgaaggttctgactcaccggccgcgttatattgaaccagccgtgatacctgaatttggcaaagggacctcttcagctgctgaagcaacagaaaccgttccgattgtacataacgttgaagagctgactgtagtgccaaaggtgcttacagtcgagccagttgagaagaagattgatagggctgaagagccaaagattgaagaaataa

SEQ ID NO: 98935 - DNA, 502 bp, Zea Mays
tcggaggcagcatgatggcctacttgatgttctctatgacgacacgaaagaatctaggtgagggagcaaagaccaggaaagaggtggaaaattagaggttaatatacaacggcaacatcaatgaggaagagatcgtggtggttgcacggtgggttgcgcatgtaagatataagacttatattatctcgttataagatgaaacttgaggaagaaaacaatattttatatcaacacatatttagtcatgttggcatctagtcggaggctagcagaatgacctgctcgatgtcctctatggaggcgatgaagagtgctcatgatggttgcatggttggttgcgcataccagagatacatgttagagataaaatttctatggttgttagataagacatggtgaagaaacagatctatgcgtgtaaagcgctcgaaggaggccacaacagaggacggggcatacgtaaagtggattaattttgaaaaaatgtaatagagtttttaaa

SEQ ID NO: 98936 - DNA, 332 bp, Zea Mays
gttccccctcccagctagcagaattattcatctctagtgcagcccctacatcaagcctcatgcgcttgctgctcatcccttgatcaccaccactttgcagcatgctcccttgtgatttgtttgttccagcagcagttacgtgtccatgccctatgtttggcttagctggcacttcttcacccttctttgtgtaattcctagtgacagccatctgatcattctgctttgccacctctgcctgggaaccttctgtagcatttaatatgtcgtactccactgttcccactatgatttttgagcagctcttgctcagtggctcatctcgcccatca

SEQ ID NO: 98937 - DNA, 420 bp, Zea Mays
acttgtacactcttgtagtatgatgaagctaggagaaatatgaaaccatccttgttccttgagtaatcttatcttggaaatcaaaaagttgtgttcgctctttatcttaatgtcatacaagcctcttatgcagtctgtctcactaacccttttaccctctgactagatgatgaaccccaatggaaatgaagtaaatgatgccaacgacaaaattcctaccttaacaactatgaacgagaaaaatgagtcatagaaatattcgatgaatggaatgaagaataacaaaaggaatagaaaaatgtttggatacatgattagtccacctcaaccacaagcaaaagccacgaaacacatggatacccaaacagaagaatcaagtcaggctcagctatatgagatacagacacccaatcaaccctc

SEQ ID NO: 98938 - DNA, 648 bp, Zea Mays
gtgttctagcttcgtaacaagctaacggagcaggccgcacactcaatttatagcatccgcaagcggtggctccaaattcgggaaaggtaagctggcggtcagagaggagatgagtcactggagtttgctaatgtggcatttacttggtaaaagcttacgaccgtcacgggctatccttcccaatccatgacgatgtggtaagacggtttaaggcgtgtcgtgaccgaaggaaacgacggcacgatggcggtggtcgcatggccacgtctccaatgcaagtggttacgacgactggacaatatagtgccctaagttcagcctcgcgcaagatcttttcactcgccacgattatccacttcacataggcacgaatcacggcggtcgacgtgaatcgtggcacagagatgaccagtggtgacaggttcactaaatcagtgatctgatttaggttattgtaccatgggagctccattcagtgcgcctaaccgagcaagttgaaaagccccgttctctaatttccatgtaacaaccccctattttatctgtagcaaaatggttcttctacaaaccatcttgaattttgttatagcaacctcgatcaaacatccactggatcctattccaaatcgatctcaaagtccatccgag

SEQ ID NO: 98939 - DNA, 737 bp, Zea Mays
agggacaccaggtgctgcttcaactcctggaaggcttgctctgcctctttagtccaagagaagggcccggacttccgcagcagcttgaagaagggcaacggtctctcagccagcctcgaaatgaagcggctaagggcggctattgatcccgtaagcttctggacgtccttgactcgggccgggggcctcattgcctcgatcgctctgattttctccgggttcgcttcaatgccccggtatgaaaccagtaatcccagcaacttcttagcggaaatgccaaaaacgcatttgtctgggttcggctttgtgcgggttgcccgcagcttgtcgaagtccagggttaagtcctccactagggtcgaccttctcttagtcttgactacaatgtcatcgacgtagacttctactttgtccctaatcaggtccccgaaggtcttactcatcgcccgtacaaatgtaggcaaagcgtttttcagaccgtacggcataacaacatagcagtaaagcccatccactgttacaaaagcggtatgcttcctatcttatctagacatctggatttgatggaaaccagagtaagtgtctaataatgacaataggtcgcacccggaggtagaatccacgatttgatctatacgtggtagtgggtacgagtccttgggacaagccttattcaggctggtgtagtcgatgcacatccgaagcttcccattcgccttggggacgatgactgggtt

SEQ ID NO: 98940 - DNA, 488 bp, Zea Mays
ctggtcgaataaatcttcaattctgggtagggggtacttgttcttgatagtaacctcattcaaggcttggtaatcgatgcacatcctcttcgtgccatcctttatctccacaaacatcactagggctgcctaaggcgaggtactcggtctgatgtagcctttctctgacaactcatcaatctgcttcttgatttccaccaactctggtctggacactcgataggctctcttggaaataggggcggtgcctggtataagctctatggtgaattcaaccttcctttcaggtggcatacccggtaactcctcgggaaacacatatgggaaatctgatactacattgacagcctctgatggtttaatctcctcaatagaagcattgacttggtgacaacttccttttcttggtccagacaagaccaactccaccaacacttcttctcctgataaggacactaacttcaccgttctcttgtcatagctaagac

SEQ ID NO: 98941 - DNA, 325 bp, Zea Mays
cctacaatattcttctggaatgtcgtttccatggaacttgcgtcctgggatcgcaaggcctgtggctactttctttgtacgctgattgttaataccatatcttataactagtgtgcatgccacaagccttgtgatgtcatcaactggatagcggaccttatttcccgttgacgcgacagagcttggatggtcgtaccctcggtggaagccggcgtttgagctgctggaattatttgcatctgtggagtggtcatctgttgaacagacatcgcactcgccatcgccaattgctgcatcaattctagaggaggattcgatagcattt

SEQ ID NO: 98942 - DNA, 733 bp, Zea Mays
cacatgtaatttcttttctccatatattgattgttggaacttttaaatctatgtccctaatttaacaccactgctccgcggtgctaaactaatggcacggatttaaaagtctcactattaaatgccttgactagtgtctaaataaaaaaaatgaaaataatgcataaaatggttgctttaattcatcaaatgactctagatgatgtgacaccccttaaaggtaacaaaaagctctccaattaagattagcctataggcaaagtcaacgtttaccccgcttgttcgaatacggagtaattccaaaggtaaaacatgtcccatatattctatacgtcactcaatgggcaaaactgtcatttttaaccctagctctacctagcaatgtaagggcatgtttggatccatctggaacacttaaactgctaattttagcatcttgaactccaaacagattgattaataaataagctaaatgttagctagaattatttactcattaatcatttgaccttgctattaggtgttgatagattattaaattctctccagaattcctggtccctcttagagctagtatgagaactttatttttttatgggatttttattttcctaaaaaaataatttttctcttaaaaaatggaaattatttgagaaaatgtggttccaaactaacccttaatgctcagaaatctcagataaaatttaagtttctaaacaaaactagcctttac

SEQ ID NO: 98943 - DNA, 426 bp, Zea Mays
cccatcctctagccggtgtccttgatcgtgtagctgcaacaaaaccaccagttaggccagatcaacaacatcaaatcacagccaacacaaaccagggaaggattatcctacaatcaggaacaaacccaagagcgacaaagggggaggaccaatagaggtcgtggccacgatagagtttcttgtcaagagcgcaagccatattgtgtattttcatggcgaggacgtcgggcacactaccaaggactataccttcactaaaaatacaaagaaagaatgacaataacgaactaggaataagcatcgaagactatcgtctaaaccttgtaccaacatacatatcaacctcattaccaaaatctccaaccatactacccacaattcaccctagctcattaacagccacaactactacaccaagaaagacta

SEQ ID NO: 98944 - DNA, 475 bp, Zea Mays
caccggtcttgacaccgatcctacgaccatctctaataagctcgacctcatcttggcccagatcgtcaccctcaacaagcaccttgacgctcatgaacgacatatcgcaggcgtggaacatgtgctcggcgtcgtgtacggcctactagtatctccgacccgacacccctaccccaacaattgtgacaccaccagcaaaaggccatagatgcaacaacttcggcaatctcatcaccaacttcgccaacactagcatcaccaacacaggcgatcgcccctacaccaacattggaggtcatggtgcctttgtcattgcctctaccaaccacatcactgatccttttcatttaccaacggtgcaactatcacgagcagggtagtggctatttttgcacgcgcggattccctaccgactgagtggcatgccttcaaagctccaacgtctgcttggagtatgcctctagcacaaccccac

SEQ ID NO: 98945 - DNA, 773 bp, Zea Mays
gcacagctgaggtacgaggaagcaagtcaggtagcaacggacgcggtcggtggcatcaggaccgtggcgtcgttctgcgccgagagtaaggtgatggacgcctacgagaacaagtgcgagtcgccgaggaggcaagggatgaaggaaggcgtcgttggtggcttggggttcggcttctcgttcgtcgtcttctacctgacgtacgctctgtgcttctacgttggcgcaaggttcgtccaccaagggacagcaacgttcccagaagtgtttagggtgagaagacgaatcgtccttatcatcatatagtacagttcgtcagtcagtcagtacgtgcatgcagcatatttatccagaacagtggcttctcaggttttcttcgtgctggctttggccacaagtggggtctcgcagacgagtgcggctggggcagacagtgccaaggccaacgactcggccgtctccatctttgcaatccttgaccgtgaatccaagatcgactacagcagcgaggagggcgtgaccatcgcgagcgtgaggggcgacgtcgacttccagaaagtctgcttcaagtacccgttgagaccgaacgtccagatcttcaaggatttttcactgaggattccttccggaaaggttgctcctttttttttaataatttggacacatttcttccacctgaccgacgcagagcttgatctcaataatgccattatatatataatatattatcctcgctgcagactgtcgcgctggtcggagagagtggaagcggc

SEQ ID NO: 98946 - DNA, 694 bp, Zea Mays
cgtcaactcgcgttctttcgcttgggaatgcgaagcgaaagctctagctcgtgtggtagagcttagtgcgtccctcgaaagcctgccggtgtactgtaatactttacatgaacaagtacatgtattgtatgctcgactgcacccggacatgccttcagacgttgctgcaatgggagttgaaccatcgggtacaaccaatgaaggacctgatggggagctagacctttttaggccccctccttccatgaaccttgctgacgaacggtctcctgcagcaggaaatagagcaacaaaggatgaagaagactagaatagtatagtctaagtgttatacttatgtaaaataagtaataaagtcgagttgtacactggagtctgtatattattacattttggtaatgtaatatgatggtatatgttggcatgttatatgtttccaaatgtttctttgcctcagatgccatcacggactcgcgcacatgatggttcgggaacttcccgcggtagagaggatactcctaacccgataccaataccaccaactttggctgaggctatcgctgctctggtcaatgccaccgctgataatacacgcttcttgcgcgaaatggcaggcaaccagttccaacagcatggaggaagagctcctcctcaaggaccgtgtgatactacatatctggaattctctaaactc

SEQ ID NO: 98947 - DNA, 801 bp, Zea Mays
tttgccctgactaagtcagactagaacaaacgtacctaggagttcctcaaattaggttcccctaatcaaggtgccttaaggaaaatctttgcccaggtccccttggtcagtcggtctagacctaggttgcgctaggtcagtctaaaaggacatcacaacccaagagtgtcgtaagcctttggaaagggatagcatatttatgaccctttgatcgttcggtgcatgtccatggtcgaggtgtgataggaacagtgcgaagggcctcaaattatcctctacctcactatctcccttttgacaaaggttctgcaagtcatggagggtcccacttcaggaaaaaaagtcaatgggacatacatgaagaaggaaaaggggaagactctaaggcgaactgctcgtacgggagcttacccagtggcaagattttggatgcctgattggatcaaggatgacaaagcaaacgcacatgtggtgacataccatagggactagatgtctgaagataggaatgacatgaggcaaagcaccatgaggagtagtgtcgataggtagtttcccaatagagatagactagcaagatgtcgacactctttatggccatctaggcctattcggatcaatttcaatagtagctattatgaaatcatgctcaaatctttattggtacaagcatatcctccaatagaccaaagtagtagcaccatcatcgctagtttagatggctcctccttctgctctttagactctagtggcccaagctatacagctcataggactacactatcagagcctatattagca

SEQ ID NO: 98948 - DNA, 589 bp, Zea Mays
aaagaacttctccctttatataatgaagaatgttggctctatgcatatcttttgcctttctgatgccccttcgtagccgatcaacaacttgtatttatgtccgacgcagccgttgttcttaggagtaattcttgagtaacgacttgttattgtcgggtcgtatttaattctgcctgtgttttatgtggagaaaaaaacggctgagttactgttggtgcctttaaaggcaatatccgagtcatgccagatcacgttggtgttttagaagtaacagtcgggtgatgcaggaccatgttgacgttttagaagtaacagccgagtggtttctggtgacgtcagcgttttagaggcaacagccgagtcatgaagtccagcttttttcccgagtgatgacttagcgcttttagaaacgatatctaacccgggaaaaccccatttgcatcatgtcatcatacgcctcagcgtcctgagccctagccttacttttttgcctccaaacatcctctgttttcctttgatttcgcttccgcccaatttgccgacgggattgtgatggcgcccaagcggaagagccagaattctgctgctg

SEQ ID NO: 98949 - DNA, 632 bp, Zea Mays
attttagtgatttttgattcaaatgtttatttgtgtctgtgtggccactataatataggtcctaaatgccaccaaggaatcaacaccgaccgccggcaacactactgaggaaaagaaagaagataacgcgaagaaaaggaaggagattgcacctagatcagaagtatggtctcactttgtcaagatttgtgttgatggacacttgaagaaagggaaatgcaagtattgtagccgtgagatcaagtgtgacccaaatttgaatggtacatctgccctacgtgctcattttaatatttgcaagtgcaatcctcataaaaatagagacccaaatcaaagcaatttacaattatctcatggtgaaaacgttgcaatctataagtttgatcctgaagcaattagaaaagcattttgtgaaatggtcattgaagatgagcaaccatttgcatgtgctgaaaaggctggctttagaaagttcatgtcaattgcttgcccacgttggaatgtgccatctagaagaaccctcactagagacactgtgtctacatactttgaagagaaagcaaagctcaaaaccttttttaagcaacaatgtgaaagattttgtcttacaactaatgcttggacttctcaac

SEQ ID NO: 98950 - DNA, 465 bp, Zea Mays
ttgccaactgggtgcaccaggtcgtccatcgtggcactcgtcacggtgctgctggggctctagccttcgtgcagttccggtcgggctatgagctcggtaccggtgacctgtgacgccctagagaactttgagttggcatggtcgttgaggctgtggctgacatcctcccactagaggatgtaatcaacggatctccctagctagggtgcagtcgcaggctgctttggtcatgagattgtctaggcatgtttgtccctgaacttttgcaatgttgtcacatctctttagactgatttggaagcgacccccctctttatccctgtcttcgacgtcttcctagagtttggcacggaaaacgggcatggacgtacacatttaaggacttcgcttgctggttccagatcatgcactaggtggcattggaagcaattcgcgagctccaaccgatagtctcatgaacctctg

SEQ ID NO: 98951 - DNA, 399 bp, Zea Mays
ccttgttttgtcgtcccatcgccattttgatgggaaatcaatgtatgttagattacgtgcattttcattttgtacattagttgtaaaccactctgtcaacatggtttttctaaggaagttttctgataatatttcagacatgttagctgttgcattgtaggtgatgtagttctcatttggtagatgaacaggcattctttcaactgcagggtagtgtctgtgaatttcataccctaatatacgccatgcagaatctttgtcacgaagataacgactatccagatattcttttacttcattctttgcatccgttgcttcgtcatatggagcttcttcgccatttcttagtttctgtaaatatgctttgctgcaatctggcccttttgtgacatatttgaa

SEQ ID NO: 98952 - DNA, 373 bp, Zea Mays
gtgagtttagagaagatttggggtgagaggaagttaggcaaggaagactcttattctgggtggtggatcttgattcatttgaagatctatttctactcatatccttcattgtcgaggttgaccttctcttccttcttgggtgttgtcatctgtgttagggacatgaagctaggacagatttgcaagtaacccaaatagataggtagtgtagctagcttaggagatggctctgagttaaataagattagtcagaatctgatttggttgtttgcttctagattagttggataggttatgtaacctattatgtaggtcaagttgttgttcatggccgagttggtctatggccccaaagttaggttaaaacaggttt

SEQ ID NO: 98953 - DNA, 391 bp, Zea Mays
ataaaacccttgacttcttatacttttgtttccttgccattgtattgccacccttgcgcaatatctaccttgatgtatgaaatctttgactctctactccttgataatgctttctccctaactcactttatatccttggttgtatcatttatcttgactttaatagttcatgattatcttatttcactcttggccaccaacaaatatgtcttgtctaactccttgttaattcttacccaactccttgactttataatatctttctcaccttttgttggttgaatgagtagaattggattgtgttgtgcgggtatgtttgaattcattgtcctttgtgttcatgtttgatttgcttctttgaaatgattgttggtgtattgtgtgacttttg

SEQ ID NO: 98954 - DNA, 521 bp, Zea Mays
atgcaattactcacaactttagataccaattactcgacttgtggaggtacccaggtcctgattgctccatttcttgctcatcttcccttttccaccttgagactatatatgatcactcaagaaacagttagtctcaaaagatacaagttatgtgtgctccccctaaagttgtgcatcaagtatttgaatgacttgcaccttgcacattctagcgtcctcagaactagaggggatcacaacataccttggtctaggcataatatatcaattgcatcacaaaaatataccaattgaaaagatgacataatacaacttatgactagtggaaacaatgcatgcctcaagatatataacattttaaaagcaacctaggcacgcttcacacatgatgatcattgcaacacatataccaattgacaaatgacaagatcgtgcatataaagcacaatgtctaagcacaccatgattaagaagtattttcttaggtacaccaaaggaaacaacattttaaagcataaggc

SEQ ID NO: 98955 - DNA, 491 bp, Zea Mays
ccaacgttctacccggggtaaagccacacgtactcgtggggtcaggattgtctatttcgtatttaccatggcggatgacgtgaggctgcgatggtcccagacgccatcattttggctatgccgactcctgacctccgtagcctggggctcggcgcggcccatcgtgaggtctgcatactcaggcctaggccatagaccatgagtgcgctgtagactgaggggcgcacgggcctttaatgtgtagcagtcctgggggcttgtagaccatgagtgctatgcgatccagtggatcatgagtgggaagcggaccgacgatcgtgttgtggctcggtgccagacatagttaaatgcagtcgtctatttatggcgagtcagtttaggggcggacacgagatccactcgagtggttcccttccgacacgccccccgtaaggtttcgccacgcttgatcctaggctcagtgccccatggtccgaccgagggcgagctct

SEQ ID NO: 98956 - DNA, 977 bp, Zea Mays
gagaggtttccgtggccgtggtggcttctaccatcaacagcagtccccacaaggtggtcgtggtcgtggaactggctactacagtggtggtggtggtggtagaggtggacgtggggcagtcccgtccgccatagctcccgagctgcgccaagcaatgcaaacttcaaatgaacctgataacatcccagcgccagaggcaggctcccagtcccaggatgcgccgtcaccaagcgaagaggctgtggatcagctgaaaggcttgtctgtacaggacattgtgcaggcgtttccagtgtcgagcaagttccctcaccgcccaggaaatggaagcgttggcaccaggtgtttggtgaaggcaaatcacttctttgctgaattattacctgccaagaaggatcttcatcagtatgatgtatgttgttctatcaatatccctttcaacgttttctcttgaatctacctaaatgttttttttactctgacaggtttcagttaccccggaagtgacatcgcgaattgtgaaccgttctgtcatggaggagctggtgaggctgcacaagctgtcatatttgggaggtcggcttccagcctatgatggtagaaagagcctgtacacggctggacccctgccattcacttcgaaagaatttcacatcactctactcgaggaagacgatggttctggagtagagaggtatctatactatactttatttctgtttgacatattcctgttgtcgtttttgtgaagaatttcacacacaaaaaaatgggtttagcatgttcctgtttgacatttcctgtatgtctaggcgtaagaagacatacaaggtagtgattaaatttgccgcaagggctgacctccggcgtctggagcagtttttagctggaaggcaggcagaggctcctcaagaagccttgcaagttcttgatattgttctgcgggagctgccgacaacaaggtaattaaattagac

SEQ ID NO: 98957 - DNA, 435 bp, Zea Mays
tccccccatgcttcaccttgaactaataggacttgtgacattccttatggcatatgcagcaaaccatggtttctacttcataacctttttccctcccttgatggtgttatcttgattaggttggtaagattagccttgcctttcttcttggttaagtacctagtgaggcgagcgacttcttgcttgagttgctcattctcccttgcaatttcttttgagtatgtttctcaatgacattcttaacacaatcttgttttcaagggggcgagtttatattagttaaatcaatgtatggagtacatctatccttttgtcgattttagtttttctattttaggtgccttaggggggttctacctgtagattctagcttgtgtgttagctaattattatgtatgttgatgattttcattttgtttagcaaactgtcatata

SEQ ID NO: 98958 - DNA, 371 bp, Zea Mays
ggacgggacaatattgccatatcgggtgtatgcgtacgcatgctggaagtgacatgggaaccatgacagaaaacaaagctgcaccaagcacgaccttgagctccaccataagtctaccctatgggacccaccagatgccactacatcaacatcgaacttgctacaaggacccgtatgccaagtggacaaggcggtatggcataccataagtacgacagtgtatgacccaacagacaacgttaggaggactacgccatccaagggcaaccgtccggacacccctcgtagaatacaagcctccagtgtaaagtcatacccttgacgtataaaagggcaagaccactttctttctagacacacgagcacaccag

SEQ ID NO: 98959 - DNA, 826 bp, Zea Mays
aaaaggagcacgtggcttcttctggttctctcctatctccatagttggtcttctacagattaaggccaagtcttttctaggcttagggttgtcttttgttttttcagtgatattcatgcaagtgctgataatgctttcacccatatttcgttcctggtgcatcacatcaatgttatgcattagaatcaaggctttcatataagggagttcccatagaccacatttgtgagtccaattatgctcggttccataaccttcaaaacgatttccatgttcgtttagtttcaaatcattaagtctcgcgataatctctggaccactaagacgcttgggtggtcccctcgtcacaatcatgtcctttttaaaagcgttcctatcgaacctgaatgggtgatcctctggcaaaaaacatctatggcaatcgaagtaacatatctttccaccaaactttagtcgaaagcataaagtgtctttaacgcatatcggacatgtcaaaatcacatgacaactccatccagcaaagataccataagccataaaatcgtgaatagaccacaaaaacgcggctctcaggttgaacttctatttcttgtaacaatcgtacgcctcgactctttcccacaaaattttcaattcttcaatcaggggtctcatcatcacatcgatctttgttccaggatgatccggaccaggtgttacaagacacaagaaaataaattcatatttcatgcaaagagctggtggaaggttgtacggaacagcaaagatgacccaacatcagtagaacattgcagttagattgaaaggcgagaaaccatctattgcc

SEQ ID NO: 98960 - DNA, 680 bp, Zea Mays
aacaatgtagcccgtgggtggggtcggctcctcctcatccctaggggcaagccacttggggtgcgccccgaaggagcggggacggagcaacccctcgtcgaccaagccctgcaagtctacatcagtcacggaggagaagggtcatgggtcgcggggagcgaggacgttcagcttctcaaccatggcgaaggagggaggtggcagagaaaaggtgagcgagcactttttcgctcccctcatctcagtgcgtcattcttggctatggcaggaaagagtaaaagtggataggactgagaaggcaagagcaaggtaagagtcaggagggacccccttctggatatatatagggaccaacggacccgctgtggtcagggccaagccccccccatcaaaagatcaaatttggaaacagattttgtctcttcgaatcccacacgcacacgccccacaacagatagcccatgagctttgtgtcacgtcgcattaactcccacctaggggccacacgtcccattcggctaacacaaccaacagacgcctctccgtctcctcaaggtaggcgcataaaaaggtgagtgtgtctctctctccttttctgcttctccgcaggtgacagggaaaagacacctcttcggattgccttcccaacgaaggaaatgaggtctaagccttttactgat

SEQ ID NO: 98961 - DNA, 727 bp, Zea Mays
ggggtatcgggtaactagagccgttggattcaaaacttgtggccaggattagattccgccgcggctgactcggggtataaccagaaccgatggatcaggatacgacggcgaggattctagatctaattctattcgtccgatcgaagatcaacgaccccgatttaatgtcacgaaggggtatcgccagcttctaatcatagctgttcctggtgcatccgatggccaggacatagtcttcatcccctccccggttctctctctcatctattcttctcccgtggtgacccgagcaacagcgcccagccaaaacggcggaaccgcgccggtgactcacccaaccacgacccggtgccctagactaacccgaagggtggtgcgcgtggtacgggaatctacgaacctgacgggggcataaacatactactggttcgagtactgcgtagtcctgccaatgacaaagtacggtgtcacggtgcttcctccacttcagcgagaaatcaacagcagctcagttgattgattcacccgtggcggtcacgaataggtgcaggatgacacagtgactcgctaggaccatccggaacccagaatcggcggcgcgggtgagaggaccgcttggcggcgaccgtatccgccaacgacgacggtggcggccagtcctgatcctcgatgcgcccggcgatggtgacctcggctggatatacaaggatgtggcctggtcacgcat

SEQ ID NO: 98962 - DNA, 762 bp, Zea Mays
gctgaggtgatttcttttgtgcagcaatgtttggtgtgtcaacatgccaagtcagaaaggattcatccacctgggttgctccaaccattaccaattcgtagtgggcttggcaagatctcaccatggattttattgaaggattacctaaatctgagggctatgacactattttagtggtggtggatcgttttttgaagtatgctcatttcttaccactaaaacatccattttctgctgctgttgttgcccagggttttctggataatgtggttaagcttcatggagttcctaagacattagtgtctgacagggataaggtcttcactagtcaattctggaaagctttatttcagacattgggaactcagttggctttatctacagcctatcaccctcagtgagatggccaatctgaaagagttaaccaacatgttgaaatgtatttgaggtgtgccatttctgatactccaaagaaatggaagcactggttacccttggctgaattgtggaacaattcttcttttcattcagccattggatgttctccttttaaggcactatatggctatgatccagctgtttttggggagtttggggttgctggtactggtgagcatagtgtggatgagatgttggctgaaaggcagagttattccaggctcttgcaagacaagttggcagctgctcgcaatcgtatgaaattacaagcagataaacatcgaactgatagagaatttcaggtgggcgaatcagttcttctta

SEQ ID NO: 98963 - DNA, 409 bp, Zea Mays
cgagagcttaggtgcatgacaagacaaatgacaaggtactgtagcttcttgttgtgcatgcccatcaagctacaagatggggatatttatagggtcgtctaggggtagatagctcgaagtacatattgctgccctcggtcaacggtcacactcttacaacgcgaactgtacaacagggtaattacaatgtcatagctgaaggattatggggaggctacactagcgcaaaacaaaattttcaaccccataaaactagaaactactgtagttatagatcatggaattaccactagacacgtagggcagcagaaggcgtctcgatgtagacgaacgtgtcgagcagtgttgtgcagtccccagcgaccttaacgtcctcgcgtggttcgtcttagtgctctagctgcagcac

SEQ ID NO: 98964 - DNA, 460 bp, Zea Mays
cggtgagttccttgttgaatttactcccgctactgtactttttgatttaggagcatcccattcttttatatccactagttttgtggaaaagcatggcatcccctctacccacctagaattcccttggtcactcgaaccctagggtcagaccttctatgccagctcaaatgctcccaagtcagaatccttttaagtggggtagtgttcttggcagacttaaccatcttgccatcccaaggaattgatgtgatcttagggatggattggttaaccaagcacaaaggcatcataagttgcgcaaacaagacagtccttctcacggaccaccaaggaaagtcagtctcttgtcaagctcagccacccgccaatgatccaatggtgtttaatctagcaacagaaagcatgtcagtggtagaagaattcatggatgtattcccagaagagttgccaggaatgccgc

SEQ ID NO: 98965 - DNA, 709 bp, Zea Mays
tgtacgtactatgcatggtatctagaatatctattagcttctagagtgagttgtaacgtgtttacaagtaaccaagctgataatagttgagtagtattaacatctgcacaccattttaattcactttaattcaccagagcacattacagtttggtagtagttgcttgctaagttttttagggaaaatagttggaattaaaaaatttatctatttttagtattcatttgaatatgaggaaggggtgagaactgagaagtgcacaattcaggggtttcctagggtgggaaaaagcccacgatccaatggctatgttccattgttcaattatccatgttaagtctatttgtcattcgatgagccttttctttttcttcatcagtccaagttgatagagtgtcatgttttgttttatgtgcaaacaatgaatattccatttttactgtttcaggtaagattccactctcaaattggattaggtttccatgaactgagcaccgagttctttatgtcttctctaattaagctgacaggataaaaaactcatttttcatttggtggtctcaaatgtctaatgcagtaggtgatctgaaactaagtttctttttgtcctgtagtttgactatggcaatggtctttgttagtccataggatcgttagctgtggcctacggatatgttagctactttctttctttataaacatcaggta

SEQ ID NO: 98966 - DNA, 656 bp, Zea Mays
ccggagagggagagaccagtctctcctcgagcccaagtacgaaagcgtatcaaaagaagaaaggaacaaggtgggggaaaaaaactaggggggccgtatcatatatctggtgccgaaaaacgcccttggaacggagaaaagcaaggtcgcggtgaagtgtgagcagcctctcctctagtggttctgctgggacgacaccaccagcactgcagtaccactactagttagtaagtacgctgctgcacacaacaatattcttttttctctccataatactacaaatactgcagtatcaatgtggctgtccctcctcttttccgctgatggagttgagatgttctgcactacttttccaccccgaatccggatggcacccgtaccgtagtgcttgtatgccttctttccctttcttctacttgtacctacatgctactacaggtgtactacgtattttgctccccccacttggttttgcaagcaagaccagcgtaaaagcagaggagactgtcagattcctctttcgctttattctcccgcccagcctcacacacacgtagttagtgttgggctactcacacatgacacaacttcgcctccctccaaatacccagagttttgaagcagggaggaaggaagacagagcagaagcagagcgc

SEQ ID NO: 98967 - DNA, 338 bp, Zea Mays
aagaagaaggacaacacttggcggtttggtgtcgagttccatcatttgaacgccattacagtgaagtctgtgttcccagtgccagtgattgaggagttgttggacgaattgggtcaagctgcatggttttcaagtttggatctaactgctggttaccatcaaatcctattgcagtcatctgatactcacaaaacatcattccaaacgccttgaggccactatgaatttcgtgttatggcttttggactcttgggtgctcctagttttcaaaaagccatgaacgccaccttggctccactgttgcggcggtgcgttctcgtgtgctttgatgaaacttt

SEQ ID NO: 98968 - DNA, 365 bp, Zea Mays
aggaggtgatcaatggattccttttcctaatcgtgaaaaaggcatttctccgaatgatcaagaactcttatttctagcctatcggctgtccaacacatccgtagagctactagccacataaagtagtgggcatttgggaggtgtccaagatttccaaattctctcactgggctcaaaataaactgacccctggaataacccttcatatgctacctttgccgagtactttccattagctgctaactggaacacaaagttatcctccatgtcaggctgcaaagtataatctgatataaagtcccaaaggtaaagaaattctataatcacatttactgagagagctccttggatgtctagcacccaaa

SEQ ID NO: 98969 - DNA, 482 bp, Zea Mays
ccccggctatcctaattatatagccttagccatatgtccttaactcggatgacaacaagaataaaggccaaagaagaccaaccacgtcaaagaaagataagcatcaactcaagtcttcgaagagcaagctggatcactagatgaatcatgatccactgtctaggatggagtcattcattaccataattctggttatcccaacctatccattcgttaccccacataatattggttagatatctatactctcctgatcaccgattaaggatcattataaaaaatggactcttaattttgaactaatgggaaactaaaagctaatttacatcccaatctctctatatccctttttttatctaatctcggggacgagatttctgttaaggggggtagaatttgtaatacccaaaatactaactttaagaatatggggaattctcctatgttttagacaaacctattatctaacaatagattagaaa

SEQ ID NO: 98970 - DNA, 476 bp, Zea Mays
gcagcttgtcaaagaccagggttaagtcttccactagggtcgaccctctcttagtcttgatcaagatgtcatcaacgtatatctctatcctgttcctaatcaggtcaccaaaggtcttactcatcgcccgtacaaatgtcggcaaggcatttttcagactgtaaggcattacaacataacagtaaagcccatccacagttacaaaagcggtatgcttcctatcttgcctagacatctggatctgatggaaaccagagtaagcatctaggaagaagaggaggtcgcacccagaggtagaatccacgatttgatctattcgtggaagtggatatgggtccttgggacaggccttattgaggttggtgtagtcgatgcacatctgaagcttcccgttagccttgggaacgatgactggattggccagccatactgggtgatggacctcttcgatgaagccagcgcgcagcagcttccgg

SEQ ID NO: 98971 - DNA, 818 bp, Zea Mays
atcagcaaccctaacgaaggtggtttggttcgactaaaatataccttcaggtttagagaccaatttatcgaaccagacgacgactgactgaagtgtgttgaaaacaccagcgatgaactacttggagcctactccaagtctgaagataacgcactatctgcggccttcgggagccgaaaaaagaagaggctaaatagagtttttgatgctatcggaattatgtatcctgactaccgctacccgtcaagggggcagaagagaaagagtgcaacttctgggaaggatgttacttcagctgctccgagtgagcccgcgccgaagaagagaaaagtgaaggttcttactcaccgaccgcgctacattgaaccggccacagtgcccgaatttggcggtgagacctcttcggctactgaagccaaagaacatgcgcttacgcagaagattgaagagccggctgcaatgccgaaggcatcctcagccaaaatagctgagccgaaggccgataatattgaaggaacaaagatattagaagttataagcccttcggcagaagtgacagtgccgaaggcacaaaaaggtcttacagcgacccccaagaggaaaaggatggtcaatgtactagatgcgctggagacgataaagacttcaagctctactctagggaaaactgtcgaagcttcaaaagcgcagactgagacaaaactaaccgaagccgaagctgcaaagagccaggccaagaccaaagctgggccttcagagcccgccaaggagaaatccttggaaaccggagaagaggaaacggaaaaagaagctgcaga

SEQ ID NO: 98972 - DNA, 417 bp, Zea Mays
gtagatgcaagggatgaggtagatcctgctgtcgtgcatgtggtttggttgcaagatctccagatcttgcgagcatgtattgcgggcccatgtatttcttgggatactcgatatgtgatattgtgaggagtactttagcagtagaatttgtgtgagtccctcatcatggggttttattatggtctggtaggtgtactggagtggagtttgaaaccacagtaacttccattgttatgttggtctacatatgtgtttggtgatggaactatttgttggagtctgatgttgtagtgttgtacgttctggtgttttcccatggttggagttccaaggtgcgaaaggtgttctggtttagttctgccaccatgctttattagtttattgttacaaggactcctgaacatgccagcatttctt

SEQ ID NO: 98973 - DNA, 672 bp, Zea Mays
ctggattgggcatcaaatagtgaagagtacaggggctacggtgtaaatatttctaagactctgtggactgtttctgagtaccacaggttaattcctaagaaatccaggggctcttaagaaaacgtgccagggccaaagaggtatcgagggttttcagccgcacgatcaagattctagggccctgattagatctagcttttaatgaatcattatgcgctgaggatcgtcgattacgccttctacggtcaggattttatgagacgaaagggtacgccaaatcagatcgtggccacccaaatctaatccgacgctcagcatctaattcgtcaagatctaatcctagctgttcactgcgatccgacggtgcacgcaccatcttccttacggcgctccctagaaccgcatcaaccatccgaacagcggcactcccaggtgagcccactgttgaaaaccgatcccggtctgacctgcgccgctttcctccctagaaaatactatacggtgggcaagccaaggcaaattgatcccaacaatccctaccaaatttgtcggcacaaagaatcgcacccacacgagtaagcggcatgacggcgaaggcgcatccccgatgagcaatcagggcggcatcagtgcaccaaacgaagcccgattcagtgctaaatgaagtagaga

SEQ ID NO: 98974 - DNA, 389 bp, Zea Mays
atcggatataattatttcctggacagcatcacaaagattaaaaaactcatacagcccgacgactgataaatttccttgaatgtcattaacccatcggttatcctctagagcctcggccaccaatctcttactcttgatcttttccggaactgcagtaataagagaaggagctaaatctgttactctgcagcccctcatccatttatctgaccaaaacagtgtgttattgccattgccaacctcggaacagacagccatagagaagagtgcagtggcattgggatggatatgaatttctaatcctttccaaggcctcatagcatcaatcttgtctttctacagcatcggatttgcaaggcccaggtcgtacgttccaaattcataattcc

SEQ ID NO: 98975 - DNA, 370 bp, Zea Mays
ccttaacctaaggatactaaggagtgggggcgtatcagtgggagcaatctagaacacagagagatcaacatctgagtctatgttagggctgctactgaagttgtctctaaagcgaaagttagagctaagactagcactgatggagctatcggctgagccagtgtgactgataccgaggaggtactgatagcagagcatatgatcatcacatcagtcgacgtactcccaattctgacagcatgtgtagagaagtccaaacctgctggccagagaggggagatggagagtccaaaagtctgactaggtggagtgctagactgtgtatggttggcagttggcacgacgactgactgtctgaagaggtggaggc

SEQ ID NO: 98976 - DNA, 496 bp, Zea Mays
aggggaagcaggggcagcataggaactcccagcctcatgatcatgggagcgtggaggcacaggaggaggaggcggaatcccaaaatcttattcttcatcatcatcagcagcaagaaccactgtgacctgagtctcgaactgatggtaggtcgtatcctctgcctgagtgtcgatcactggatcaggtaccagcattgggtcctcaggggctggacggtaggagccaaagtggaggcgtgaggcctcaagagtgccctggaactgcggtggctggatcagctatgcaaaaatgtggcacagataatgagcatatggcagctgtcgccgggcacgaagtccatccaataccatgtcctcgatctcacatataaggaagtcaacaacatcaaactctgaatgagagatcagggcaccaagtagccagagctggatatgagtggtggcctctctataacccatccgaggcagtagcgttcgtctcatgagctgatataag

SEQ ID NO: 98977 - DNA, 618 bp, Zea Mays
ttttgtttttgtgggatattctggatccaagttatatgcgaagtttttttggatccacacgaacaaggacatctaagaatcgcttctacgaagtaaatttgtctatccccttggaagctcacagatctgattgattttgtgtcttgaaggaatgccctgtctgttgtagctcttgatttggtagtagtagatcccggtgtttgtctgtttcctttcctggatgacgatgacacttgaaatccttctctcgttacttaattagtaaaacattcatccaaagtttggtctcgttccactttgattcgaccatgttttgatcgaattttcaaatttgcgagcagcttttcgaggggccagcagtccggcgctgcaacaagcaccgcagcgcaccacaccacaccggaagggtctattttcagtctgcaccggaccattcaatgcctgttgtttttttttccctcggaaccgcattggccgatcgacggatagtttctctgtgtgaactgcgtccgtacaggttgttttcctggtacccaatctaagtccctgcggcagtagtgcagcagtgttcagtcacagcagaatgcagtttggttgttgctcgctctctgtagtgta

SEQ ID NO: 98978 - DNA, 533 bp, Zea Mays
gtagcacgaacattgccttcgtcttccttggacagcacctgtggcgtgggcgtggtgggagtggggctgggagacgtggaggcttcgacgaggatgctcgcgagccactatggcttgtagtcggacttcgccgagctcgtcttgggaatgcagatggagggggtgtttggaggacctgaagctgttggcatctttagagcctgcagttgcttgctcaggatcgtgatcgtctcctaacacttggcaagcttgtcagccgctgcgaggatctctgagctctacatgaatgatgctgatattgtgagttcagttcctgatggtgtactgataactgtagacagacaccgtaacttaacttactgttgctaaatgactttcctcttacgctgcccgatgttccacacttgcctcagaaagcagggttgtatgatcaagaacatacatcaaaaaaattgttgacaacattttttaaaaaaggtgacgagtacacgtagcagcatataaatcaacctttgcatctcacagtatgccgc

SEQ ID NO: 98979 - DNA, 544 bp, Zea Mays
tctacatttgacccgaccgtttccgtatttacggaaaaatatggaaacgggacggaaacgggagagggcttattccgtccattttttgtgggatcccgtttttttccggattaaacccgtatttattccgtatttgacaaatatgggacgagcctaatatgcattagtatataaactaaatcctcgtgcatttaggtgacaaattatagcacaattggccattgtaaccaccggctcttttcaaatgacaagtgatctaaagtcttaaacaacatcggatgtagctaaatgtacacatttagcaaccaaacaacaataggatgttgtctctctatatttatttgttatatgttattgttctgccaatcaatcactagtcaaacatcaataacatttctatttgtattaaattatgagtttctgttagtatttctgtttctgttcgttttcgcaattccgtttatcccgctcccgtttccgttcccgactattccggacccgatcccgtttcagatgataaaatgaggatacagaaacgggagag

SEQ ID NO: 98980 - DNA, 578 bp, Zea Mays
ggaaaagagctctggcgtatgacacaggtggcctttcaccgtggcaggtgctccggtgatcaccggacatgcaccacatgattcaccgtgatgagagctagcgcataagcacgtggcgcgcaacggcgacagctcgacggcggtgagagttatccgagcgaccggcggcaaggggggtacgtcaagcttagccgcaatccgagcgcaagttgatcagatgtcgagatctttattcggctgagcttatctgctgaccacggcgcacgaatcatggcgaacaatcaaccactggcgacagatcaccggcgagggggggatcgtgatcttcttcagtttgggacttactgtaccatggcgtttgctcttcagtcagtctgacagacagagtttgggcctcattttctctcaaatttctgtggcaacacatccagatctctgcagcaatattatagtgctataaaccagctacaactcaactatagggattaaacttagttgagcactggatcaaggttgaatccaagtccaaagttagctctgttacactgaaattctgaattccagagttcatcagcctg

SEQ ID NO: 98981 - DNA, 846 bp, Zea Mays
agctgcttgtttcagtattcctatagttaaggtcaataagtctacaacaaaattggtacgcgttcttttatttttatctgcaaattttaatatggatcagtatgccatgcacaagagtttcctaagctgtaattgttggtattttattttttcttgtcagtatctgtactaccagtaagagtgggtacagatataaattctaaagtttgtgagtaactacacagctaatttgttgagtctctatgcttcaataatgcctggctacattacagatgagttctctccagtttctactacaacatgtttaatgttggatacttgtaatcccataccaaatcatgcattagattgtactttattctactataaggaaataattattgagcacagtagcacagtaaacattgttatttctttgtttcattttgttacgaatcccttagttaatcttttgtgtgtgtaagcttcctttcttttcttttactagattccaaaattcatggcatgctaatgtctgtttttagtgtcacatacttgataagttgtttgtgttgcatacctgaatgactcatgctcagaaatgtttgttgatactattatgcttatcatttctcttccctcaattcagttgcagatagaaaaagacaacacttacgatcaaatggaaccatcgattttggcacttgatcgcaacaacacatgtgtaagccctactttattatggactctcaattcagtctaaaggcatgtacatatcttagaagataaacgaaggaatggtacaagtgccgcacagaatagctatgaccagccagctaccaccctgatgccgccacaccatggcat

SEQ ID NO: 98982 - DNA, 441 bp, Zea Mays
gcgtcaattataggaaagcgcaggggcctcagtgaaaaagagtacaaggctcaggctatcactggactggaccgcgggttaatttataacaataacagggactcttaagcaaaacgtccacggcgaaggggtatggtggcatcttgaccatgggatttgatatggagggctcggattaaatctgcataagcgctgaaccggtacacgatcgtggtcgtcggattcgcgatcaatggctatgcttttaagatgatgcgatatactctggatcaccggatccaaatctaacggcctgagttcaatccaggtgaaggggtacacggttctaatcttgatcgttcaatctaaatctggcggctgcaacatcatcaaccctagatcaaatcttggcccttggtttgcgatgaacggttaggagtgcttctcccacctcgcaaccac

SEQ ID NO: 98983 - DNA, 394 bp, Zea Mays
tgcagaagtttctcggcaaggtgaattatttgcgaaaatttatttctaacctagccgggaagattggtgccttcacccctatccttcggcttaagaatgatgccgaattcacttggggggcagagcagcaagaagcatttgatctcattaaaaaatacttgtctttggctcctgtattaaaagcaccacgcgcaggagtaccattccgattgtacattgcagctgaagaaaaggtcattggggctgttctgacacaagaaactgagggaaaggaacatgtggtgacatatttaagcaggaggttggtggatgctgaaacaaggaagcagtgttacctgtggaaataaatttgaatgctgtcaggtttgccagacaaaatgatctaactgctact

SEQ ID NO: 98984 - DNA, 458 bp, Zea Mays
gtaatgatgatgacaccacgtctattgactggagtagctttataattgagaatgctgaaaataagataatggggagacgggtgatatgtttagaatctgtgatgaggatgagatttgagatgtatgtgttcttgggacttgaagatgaggatgaggagatgaatcgaacccacccagaaccaagtaactttgcatctcatttttcatcagaaagtaatagttttgatccaagtgatctagatactgccatgccagttgatgatgaaaatgcagaaatggtgaatatattgcatgatgttgatcaccctgatctgaagttgggtactctctatccatcgatgaaagagtttaggctagttgtgaggcaatatgctataaatgaggagtttgagcttggcataacaaaatcagatagaagtaggtatagagtgtactgcaaagggaatgattgcacatgc

SEQ ID NO: 98985 - DNA, 343 bp, Zea Mays
agtttccaagcttgttggcctatctgaccatctccacattggacatcagaactggcatgatggtgcctcgattttagcatggctatctttgttaggcccctcgacgtcatggaggctcttctccacgacccttcgatgcttgagcttgatgtcggggaggcagttgtagaatactgtcgacaatatgtccccaagttcatagatgtaggcatgtaacctagtatggccttgggtcgtctcaaaccatgcgaacacatttagtgagggctgcaattaggcgtgaagtgtcatccacacgctcttatgcaccatccatggttcgacatggttcagttcctggagt

SEQ ID NO: 98986 - DNA, 1296 bp, Zea Mays
tttcattctactgcttgaacaggtctactttcattctactgctatgagtagcaattccccgcgcgcgctctctccgccccggcactaggccaacggcaatcaccactcaccaggtgccaaggtgtcttgtcggccccttcaccaagtgttagtcgggtccttcgccggcgacgggcaccaccaggtatgcgcaccccctccccccttccagctgcgcgaaaccgagcaccgaaccctaactcagcctatttggtatttgtattcgggtctgatcccaccttttatttttgtgtgtgcgtgtgtgtagtttttttttctctagtctcatcccatgattcgcgaatcgagaagggatgatgccatgccattggtgatttgcaatactgtagtcgtgttcacgtcataaacgatcgctccttaaggggaggatcgagggcaaactagagctgcatggggatgatactgtgcaactgtagcactttactcttagtctcaggcaccctgcacatgcagatggacttggttcctgagtcgtgagggacctgcattagttgaagcgagcgagctgtaagctgtatccttatgcatagggtgtgggtactcatatcatggttgttgtctatgcatttcatgattaatgcaagttgtgtgataatgatttgtgtgttgtgtatgtcaatagttttgcataaatgctgttaaaattttgcaaaatttgtcaaaatttgcaacatttaaaatacatgcagccacttgtgttaaatgttgttgccaaaatccttgtcaaatctgcaaaaataatgtcaaaacctttgaatccaaacatgggtaaaagtaaaatcacaaagaaccaacaaaagcgagggcaaatctgcaagggcaaaattgttatctcacgtcaggattaacactgttataatgacttaacagaataggggcaaagtcttgcttcgatttgaaataacaggggcaaaaacacaaagttcaaaaaataggttcaaaatcaccacaaaccctaaaaccgggggtatgaatgtcaaataacctaaaattttttaaggtgcattgttcctctcattgttgtgccacttacataaatgtttagacttagttattggatggtatgaattgaatacaagcaacatctctaagagagggaagcaggtgatccaaactatttgcgactagtagataagctattctgcttgtgttttttgttctgtttggtaagacatgttttattcatcatcactaagatgattttcctccccacttctggattagtttagtatcaac

SEQ ID NO: 98987 - DNA, 564 bp, Zea Mays
aaaaggtgaaggttcttacccaccggccgcattacattgaaccggccatggtatctgaggttggcgcagggacctcttctgctttcgaaagaaaagaaattgtcccgactacgcagagcactaaagagtcggctgtaatgccaaaggtgcttacagtcaagctagttgagacgaaggctgataaggctgaagagcccaaagttgaataaataacgaagatgccacggattctgagccctctaacaaaggcaacagtactgaaggtacagatgggttctgccgtaactcctaagaggagaaggatggcaaatgtgctggatgttgtgctagaaacaacgagaaccttgagtcccgctcctacaaggaaagttgccgaagcttccaaagcacaacctgaagctgatactaagcaggcagaagtcgaagctgcaacaattcaggctgaaactgaagctcggccatcagttcccaccgagatggagcgtgttgaccctaaggaaaaatcagcagagcagattgcaactgaaaaaatcgaagctcctagtcccgaagcgttgaacaaaa

SEQ ID NO: 98988 - DNA, 682 bp, Zea Mays
ctggcggcaggtgcagcgcgtggagatgtagcgtgtggtgtggcaggagtagccacgtgaggcggtgtaggggcgacggtcgtcaggcatgaaggagaggaggaggtggaatggatattcgtgcctgtgtcgaagaactactcttgttgtggaggctgtttaagtgttgtggtctggaagttggctgctagagcctgttgatcccagccttgagccaaagcgaggaggatgggtggagggatgccccattgaccagtccattggccaggaggatcgaagacgtctgactgtggcgcctgctaaaagagattgtatctgtgtgcaacagtagattgataaatgagagacatagatgttacaatctatagggggtgaggcgatcttgggcaaaaggaaacccatacacaagatctcctcaaggatggaaagccccaattaggatcctgcctactaggtcctactaggtccagctgactacagagccagacgcaggtcctgtatatggtagggattcagctgtctaacaccaggattcctccctacgcgtgggctcttcaagccgtcgggggctccttaccctaccacggattgtgcctcctctgcaacctggcttggccaaccagcgtgccacgaccttttcaccgccaccgcctctttcccacatagctcgtgtggtgcagcc

SEQ ID NO: 98989 - DNA, 468 bp, Zea Mays
ctgcttgtaaccccttttctttctctaacgcacaggaaagatgcgcatcattatattaagaagaaataagatggtccaaaatggacccacatacaagaattcccttctaaggaggtctaaagcaaagatataggaaactatccatgaacttagtaggaacaaatacatctggtgccggtatcgtaagccaccgaagattggagtagggatattcgacccgaactaatataactcttgtgtccgcctcgcataccatccaggcctaaagcgtatcacaaatttacttggcgatgcttactcgaaacaacgacacttgtctattagatccaccattaatgactgagtgtaattccacctggggacaacacgtccaattgtgtgaaaacatagggattctttagaaaatagtttgagaagacgtgggattgcacttggccatagatggtggatcttatggacaagttttaa

SEQ ID NO: 98990 - DNA, 499 bp, Zea Mays
catgcaaacagccgggcactgctgcgtctgcgtgggccatccctctctcgtttgatcggggacgcaacgcagggcagagcagagcaacgcaaagcagagctgctagctagtatccctctcatcactagtagtactatcgtacaaccagtccagcagcagcagactcttatcattatcgtaccactaccagccctgcagcatcactgcatgccggctacgctgctgctgcattcccgcatgcttgagcaagttgtagctgtagggagggggaatcgcatcacaggagagctgaggtggagcgcctagacgataggatcacgacatatctattttacctgtgctgatttaattagtatgcgtgcggttgtaataattaataattaattcagaaattgaggtgtggacctactggatgctacctcgcgctttgggcgttggactgcaaaaccaggagtagtagacacaccatccgaggaagcctgcaatggccacacattct

SEQ ID NO: 98991 - DNA, 636 bp, Zea Mays
ccgggggaagaaaagattgaatagggtatttgatgcgattggcttcgtataccctgattattgctacccgctacgagggcaaggaaaaaagaggaagactgtcgcttcggccaccacagctgtgccgaagggcaaaaaggtggaggttctgacccaccggccatgatacattgaaccggtcgtagtgcctgaacttggcgaaggggcctattcaactgccgaagcaagacaagctgctccaattgtgcagagcgttgaagagccaactgtagtgccgaacatgcctacagtcgggtcagtcgaagctaaggatgataaggctgaagagccaaaggtggaagaaacaatgaaaatgccaaaaattcggagccctccagcagaggcaaaattgccgaaggtgcaaaaggctcctgccgcaactcccaagagaaggaggatggccagcgtgctagatgatgtgctagagaccacaaaggccttgagcaccgctcctactaagaaaattgctgaagctgccgaagtccaagccgaagccgaagttaggctttcagcgcccattgagacgaaggttgtcgcgcctgaggacaaggctgatcagcaaacttcagggcaaagtatggcagaaaaagcaaaaac

SEQ ID NO: 98992 - DNA, 489 bp, Zea Mays
gatttgtaagttctgtaacttcccttaatgaagaaatgattttgtctcctcctgtgttgattattttgcttcatagtcggttgatgattgtcgcgatatttattattcgtgatgttctctatctgttatgcttgtgtcgtaacttggagttttcgaatcattcctctgtttgccttatctgtgaagtcgattcctctggaattgtagctgagtaactcgggcatcatatcgtcgcttttaggggtgatggccgagttattattgtcaacattttacccttctgaagtagcgtccaaatgatgacgaagccacatcagcgttggaatgactgatgaccgcgtcgacgcttttagaggtaacagccgagtgatttatgacgacgtcggcgttttagagataactgccgagtgactgaagacgacgtcggcgttttagagataactgccgagtgactgaagacgacgtcggcgttttagagataactaccga

SEQ ID NO: 98993 - DNA, 786 bp, Zea Mays
ggaatttctcccaaagggcagcccatgagtcaatcatcagcgtaggcaacctagtttaccaagttagagcggggccctccagggcgatgataaaggactttgccattgtgttgtcgtctccgccagatgaagccactgcgacttggtaattcatgataatctgcgaagggtcggccttcccattgtattttggccagtttccgaccctgtagttgcttggccaaggcgtcgcctgcagcctggcggagagcgggcacctattgtcgatgaaattgaaagcctaaaagacatcattttgcagaggttgcctgacttcgtcaaagctgctcagccttacatggccttgtgaagggtgagtggggtcatgtgcctgtagttgcgaaatttcttgctcgagggccaggagatgctctttttcttgctggatgaggaggcggactctggcttcggcctcgctacgctgctgcttggcggcgatagcatctctttgcttctggagattggcattgtgcatgcgaaggcttttgagtaagagttgctcctcgatgttgatgccgaggtctcggctgtcctggaggtctgtgttgtcgtcttctagaggcattccgaatgggtgatgcgagtggcatgccgtggcgtcaaagcctgggggagccgggtagattcctcgtcaagtctggccagattttggctaggtagggcagactttttgggttcagcggacggtcttgtgagtcctctgagctggtggtgtggacttcgcactcttgctcagtggagactgtc

SEQ ID NO: 98994 - DNA, 497 bp, Zea Mays
gagcagtcgtacaccgattgaaggaggagcaaagggggaggcgttggaggtagcattagactatctccagcgggtactgtaaaattacgggacacagaactgtacatgacactatttgcacagtgaagtttgaaataagggatgagatatggtatatgctggagatacccttagaggaggaatggagaggattggagaggattaaattcttaatctccccctaatcagaattgaatagaatacgtctcttatggttttacaattatatacttagatactttctaaaatacaggtcattaatgtgggttgtatatgctttaatggtggtgccgcactgtgcacatctaccactttgtggcggctactcgctgactctttggtggtcctacctaggggtgataatgagctcaaaattctatactaatctcttaagaacctaatatgggcacctggtgataccacggcttcactctccacgctgacactctggacccacc

SEQ ID NO: 98995 - DNA, 1290 bp, Zea Mays
tcaagctgagtgagatttgcgatttggtggtgcgtgcaggtgggcggaaccggttgcggataaaccccaagtttctgcactccaatgcgacttcccacaagtgggcttttggcggtatgggacgatcccctcattgtctcgggtgtataattggctatactacgcaaaacaactgttttttaggaattgttttggcttcattagcatgaataagataatctacgtatttgttcccctgtactgctaactctgtctcttttaaacgatgcgaacttgtagtttggattgttatatgttcccttaagaaaattgaactatcacttctgaatgaaatgaagcactcacttcagtgacacaaaggacattaaatattcttcaacaatgctagatgactaatagaatagaattttgtatttgtcatataaacacctatttgtttttacaatggttatgcttgaaaattaggcacccttttaaagttcgggactggttccacaagcctgtaccaaatgatgcactcctttctcatcattcataagtagagagttaaaccattgtacgcctatgaaaaaacattagcattttcacaatctcgcttgttgtcttggtttttgcaactttccaactgtatcatttttttggacaaatcaaccatatatggcatcctagttcgaaacctgttgcatgcttttatattgtacttgtgcacaccaatttgttcaatgttgttttccctcaatttcttgcagccattgccgagctccttgacaatgcaatcgatgaggtaatcattaaggtttttttcgacatgtacagaaagaaactaagacataacatgaagctaagtatggttgtttctgtgacatattttctctcaggtgaacaatggggcaacatttgtccgtgttaataaatttaaaaacccacgagatgggaacccctcattgttggttcaaggttgctgtttttaaggctatgttaatctgtttgttttcatatgaactgttatctggattgtaactttgttgtgttttacttttacattaataagatgatggaggggggatggatcctgaggcactgagacgttgcatgagcttcggattttcagataaacagtctgatgctttcattgggcaatgtatggtcttgggtatccttccttgtagtttcttgtgaatcagttgtcttgagcccctgaccgttgaatttatattgtttcttggatcagatggcaatggtttcaagactagtacgatgcggcttggagcagatgtgattgtttttaca

SEQ ID NO: 98996 - DNA, 278 bp, Zea Mays
ggctgtgcttctgccttcgaaacctgaatatatctaagtttaccactctcattctcattcttttttcttgtacgtgtacatccttattaacctagtcctggttgtgcgtcacctacactacagcctgacctcacagcatttatgagttttcactggtgaaattttgcttcatccgatcttaccaggtttggagtggagatttctgagggtttcaattgcatggtgatgagggttactttctaaagtgctaggtccactagattggtgcaacagttttg

SEQ ID NO: 98997 - DNA, 615 bp, Zea Mays
catgtcgcgaggggaaagaccgacaagtggtatgtgggcatagtggacatgacggaagacataagcgtgagacggccagcccgatttagcatgcttcctttccatccggccaagcggttcccgattttctcgatcagaggttggacatgaattctctagagcgcccgggtgtgaagttggaggctaaggtaacggcacgggaaggtcccccgggtcccttggaacggctggagcatgtggtctaggtcagtgttttcacatcttagcgggtggatagagctcttctcaaggttagtgaccaagcccgaggcacatccaaaagcgtgttggatgtctttgaccgccaggaggtcttctctagaggggttgataaagatagcagcgtcatcatcatagagagaagtccttagttttgctgtagttagcgaaacgggggaaaggatcccatttctggctgcaaggtccaggatacgctgcagcggatcaatggcgaggatgaacaacataggggaaagggggtctcgctgcctaacacctctcctgtgctggatggttgctctttatcggccattgaggatggctcgagacgagacagacccaaaaaggatggaaatc

SEQ ID NO: 98998 - DNA, 704 bp, Zea Mays
cggaggcgcggggaggtggatctcactcccttgtccatcgacttctcctttgatacctaggggagtccttgctccaattcctgatgtggtaggcgtggttttatctgaggccatctaccagaggggagaaaggattactactatgcatatgccatcattttttctcaaacatgttattttattcagcactccagttcattacaagcataacaacccccacagattacactacacatgagcgttatccactaaagtgtccccaaactctctgagaagatcatcaaggctagccatggacacttcctcgatgtcgaaaaagttctctatccctagggaaggtagtgtgggcagggcttcctccttcaggtcagtctagcatccttggctcttgaaacactttcggatgttcttgacaggggcgagcttcttcagcctcctagcatagtccatcttcagggtccggtatgcctcacgagtgttggcttcctcgccttctgccatctcgagactgtcttaaagagcgaccttttcctccttcaattccttgatttgctgctctaggctttccacctaggagtttaggtgggtgcagtgggagaaaaggtcgtcaaagtggttgtcaagggtgtggagatatccggccatgtagattacggtagggtcatcttcattatgatctcttcctgacaaagcctggagtcttt

SEQ ID NO: 98999 - DNA, 320 bp, Zea Mays
cccaaacttagtaaaacccgccattcataacactaggtgttttttaggctcaatcactaaaccaccgtgagtagggcaccgcatgcgcatcccccacatcctagacacgtgtcccgctagtcctcgaccacgccagcaacacgacctgctccgttacatcctagcacgagtgcgtgtcctaggtgtcagtcaccatggttagtcacccgacggctctggtccctcgatcaagtcacaacgctcgtctttcgccgatcctggtacatcgacacgaaccctcatgacctccacctttcatggtcaaccactgcacctatgat

SEQ ID NO: 99000 - DNA, 382 bp, Zea Mays
ctgctagagaaaaagaacaagttaaagttgaatcttctaaggttgaaggttgtcagagaaaaagggtcactagcacccgaagaagtgctactcacaacccacgaatacattattcgtcatgctttgggtgaaaaattaactaacgagcaaattgctgaaccttagcactatgccaaagatctaaagtatcatgtgagctctcttgtgtatggaggcaatgatgaagatggctatctatactgcctaccggatagtagagagattgaagtttgccgtgagatgatggacaagatgggctatccgaagcttgaacttggattatctgctatgcctaaggataatcttacgtattgtttagcatataatagtttgaaggtttgca

SEQ ID NO: 99001 - DNA, 605 bp, Zea Mays
gtttgcggatgataagctgaactaaagtttagcttggtatccatggactcatgtagtcttttccaaaagcacgaggtaaaatggattcctcgatctgctacgatcttctttggtactccatgcagacaaacaatcctcgacatgtataactctgctaactgggctcctgagtaagttgtattcacagatataaagtgtgccactttagtcaacctgtctactatgacccatattgaatcatagccatcccgagtacggggtagtccaactatgaaatccataccgatttcttcccatttccattctggtaccttgagaggttgtagtaaccctgttggtctttggtgttcggctttaactcgctgacacacgtcacacaatgcaacatgagtagcaacatctcttttcaaaccgtaccaccaatacttttcctttagatcctagtacatctttgtgcttccagggtgaatagagtaagccgaatcatgagcttctctcaaaataagttggcgtatgggttcgatttccaatacacagattctcttcttaaaccataatgtgccttgatcatcttccgtgaaatatggggctttacccaacccaat

SEQ ID NO: 99002 - DNA, 444 bp, Zea Mays
ctttaaaaagcttttgtaaataaccatctcattttcttcaggagtaggggcggtgttgtctcctccaactctcataatagacatgtcacgaaagtatctttctctcatagcgtcaacatgactttgcttaatagtcgactttccgaagatggtatggcttggtcgccagggccggtcctcagaatctttatctccactttctacatcaaagtcatcactatcatcagaatcttcagataaatctgccattatctcctttgtgattttctctgtatttgtttttgccatggattcgtaaaacccagcaataaaagggtccgcaaccttcttctcctcatacatcttctcctcctctgatatcttcttctcctcatacatcttcttctctttagacatgaaacaaacacttatctttaagacgaagctcgaaaatcaggcgagaac

SEQ ID NO: 99003 - DNA, 312 bp, Zea Mays
gtacaacttggttactacttcttttccggatggagacaccaacttaactgttctcttgtcacaactgacagtggcttgatttctgtgtagccaattcatccctaggatgacatctaacccttgagttcccattactactaggctagcgggaaagtctatcccccttatttcaatccttagattcaggcaaatcctatcagactgaacttttcccccaactgaattaactcttaaaggtgggatcattggttctatggggatgttatgtgattctacccaagatgtagaaacaaatgaatgtgtggcaccagt

SEQ ID NO: 99004 - DNA, 610 bp, Zea Mays
cttggaacccaccaggcagtgagcgcgctatgggaagagcccatgatcactggggcccattagtaagtcggaagaggtaggcgcgccaatcctggaaggacccatcctcagtcaaacccctaggcaccaagcctggggtcgagcgtggcagagcctaacgatggaggactggtgtgtcggaagggaaccactcaagtgggtcccatgcccggtcctgaactgaactaccacaaatgacttgtcgcattaaccacgcctagcactaagccacatcgtgggtgccggtccgcttcccactcatgatctacgaacccctcgagtcgcatagcactcatgacctatgagcccccagactgcgacacattaatagctcatgcacccttaggttgtggcgcacttatggcctattggactaggcctgagtgtccagacctcccgcaaggcactacacgacagacagcaacgagccccaggctatggaagataagggtcggcatagccggaatgatggtgcccaggaccatcgccacccccgcgataaatatgtggcacaggccctgcgagtacgcgtgaactcactcggggtaaaactctggttttatccttgcct

SEQ ID NO: 99005 - DNA, 433 bp, Zea Mays
ctccgatgtgtttgagaaagcaaaggggagggaagatgcttgctacatctcgaggaggtgaaggataggcatacctgaatgctccttgatagagaagtcgctgggaagctggtgtagcggcggcagcggtagccgagtcgtccgtcgcctgtgcgaaggggtgggggagaaggaggttttgggaaaggaagttgttttgcttcaatactgtgttgcgcagctacacgggcggaggaagcaaggaaaaccatttccttttgtctgaatctggatgtttcctggatgttctccacttactattcaagattcgtatgaagtgttggatttccatcagatagtcagttattcagacgttgactaggcagattatgttgataaaataaaatccacttcttgatatagcttcacatttgttgagggtctgtttttggaa

SEQ ID NO: 99006 - DNA, 282 bp, Zea Mays
ctccaaaccatagtacaggttttggtcccaagaggccggtaaggctatttttggcctcccacgacacatgttttcgtcgtcgaacaccgatttcatgcctcccgtccgccacccatgttttggccactaagacgggtaagactatttttggcctcccgtgagctacaacacacgctttcatggccaaacaaccaattttatgtcagtgctctgccacccgcgttttggtctccagagcacggtaaagcagtttttggcctcacatgattctagtgtccaaac

SEQ ID NO: 99007 - DNA, 1556 bp, Zea Mays
tccagcacgctggccattcttctcctcttgggagtggtggcaggagcctttgtaaccttcggcagttccgctcctgctggcggacttagaatttctagcaactttgttgccttttccaattctggctttttggttgcctcatcttcggcttcaactgtctcaactataggcaactttggtgctatagttgattccttagcactctgagtggtgggagcagcttgttctgcttcggcagcggaagatgtttcttcaccaaattttggcactgtggttgtttcaatatatcttggccggtgggtcaagaccttgattttcttgcccttcggcacagcagaaatgaccgaagtggcacctttcctcttttttccttgcctccacgagggatagcaataatcaggatatataaaaccaatcgcatcaaaaactctattcaatcttttcttgctccgacccccgaaggccgaggacaaagcatcatcttcggctttggtatatgccccaagcaactcattgctagtagcctcaatactcttcagccaatcgtcgtttggttcgtcaaaccggtctctgaatctgaaggtatatttcaaacgaactaatccaccttcagtggacccgataacagtctccttcagcatttcccagctatccacaagtggccataccctgtaggctatgtgctcttggatcaggtcccgcgtacctatgaaagcacagatattgctgaaggccttgacatgcttcgtcattattttcaatcgccacccttggccttcgaaggccgaagcgagaccagatcgggcgctggataatttccttaatgtcctccctctcaattagattattcttgacataaaaccattcctccatccaagccccgggccaccttttctgaaatgttggaaccgagtagcttgcattgggacaagcaatgaatccataacaactgaagttgttgtgatactgttctttgccagtggccttcgtttcgtacaatagttcatgcatattgcaaaaacactttgcgctcagttccagcccttggcttctcacaacccaaacaaacatccccattctgattatagcttcgagggtaattttatgtagaaagatctaaaatatcttcagcacttcaaccacaaatttgctcaacggaaactgaaggcctgccttcataaagctctggtaaacaataacttaattttcttcaggtgcaggggcggtgttgtctcctccaacccttacaatagacatgtcacgaaagtatcttcccttcatggcgtcaatctgactttgtttaatggttgactttccgaagatggtatggcttggccgccacggccgatcttcagaatcttcatctccacttttcacatcaaaatcatcactatcatcagaatcttcagataaatctgccattatctcctttgtgatcttctctgtatttgtttttgccatagattcgtaaaacccagcaataaaagggtccacaaccttcttctcctcagccacctttgtcacctcagacaccttcttctcctcaaacatttctt

SEQ ID NO: 99008 - DNA, 1232 bp, Zea Mays
acaggaagccatggagacggacacccttcaaacacagatactcctcttgtggcatggggtgctggaattagaagcccaaagttcctggcttatacagagaaacctgatgacggctttcggtttgtagataaccacaaacatgatacacccactccaaaagactgggcccttgaaggatttgaaagagtagatgtcaaccaggctgacatagctcccctaatggtggcttgaaaatctccatgtgcaaccatatattcagttcttaattttatttagatttcttaagtaaaccctttttcttttctcaattcttcacaacttttgcaggctacacttgtgggtttgccatgcccgatgaattctgtggggagcttacctactccttatttgaaactaaggaaggtcagaaataactgtatgctatgcaaaaaaacctgttgtgcttggctcaacactgcttgttaaagtttgttccctatatacaggctgatgaagttgaagccgttctggccaatacaaagcaaattcttaaccagtttctccgaaagtcacgtatcctttcaaaacaatttttgttacatacttgaactgcagaattttcctactccatgcttataagcttgtagtatggtattgtgaatgggtgctagagacatcattattgatctttaattagagtcacccataacagtaggctactccatgctgttagctataatctcagcagtcattcaatttcttttttccttaatgaaaaagtatgatgaccaagactaccaaattaaacaacaaaccatactgttacccctaagcatgtcttcccttatcgatctcagagctgaaggaatccagttcactctacttcaaaccttttaagccactggcgaacttttctttagtgctcagtcagattgaggatcttatatctggaagggactatgaaactgccatggagcaatctgaggagctccgaaggctggctcttgctgggcttcattatttccaaacatatgattggttcatgttaatgactacaattacccttggatatattggatggatggtgaacctcattatacatgtgctacagtcttatacatcatatcctgtaattcttctcaagagggctcaattgtatcctaacaatacctccatgaaagtatggtagctttccactgtttccttattatatttatgtctactgttttgtgtaacaaaatcatatgtttctg

SEQ ID NO: 99009 - DNA, 450 bp, Zea Mays
aggcctggtgtagttgttcctgatgacattattgcggacatcaaggctacacctgatgcttcgagtcacccttcctcctcgattgctcctgcgaaagacattgccaagtagagatgttttgctgtgtttagaagatactgaatgcatttgtgaactatatgtgtgtgtgatcagcgcgcttgaatattcggtaggatattagaatgtgttcttggcgctgaaaactataacgttttgtttctgttgttagaattcaaaagttgtcacgaatgattgtagaagtaagtgtggtgtgctgggtttggaatcttttcctaatttatgctaattgatcagctggtagggcatagagatcgccctaatatgagtaaatgcgagcatgttacactaagtcgagtaagcatgatcatgttgcaccgtcttaagtcattgccgacttaagtcgattgc

SEQ ID NO: 99010 - DNA, 459 bp, Zea Mays
aagcaaccactggaggaactaggaagggtagggaaacgagtaccaggggcacttagctgattggtcggagcgggggcaggagtgggacgaataaatacgggtggtttaaatggatatgtaggtgggcgaggtgaagaacggtttggattgaaaggtcggattaccaaccttgttctcttttcacgtccttgagttgatcttgcacccgcatatccctttgattttccgtgtcccgtatttttggcttcaactgccagtgatgtactgacaaccctcctgtatgtgaggtctagacacgttgccatcttacgctggagtctgtcatttagtccactcctaaaacaattcttctttttcaagtctgtatccacttggtcaatggcgtactgggagagatgattgaatttattgagatactgcatcacagaatctcccccctgcttcagtcggatgaactct

SEQ ID NO: 99011 - DNA, 367 bp, Zea Mays
ccaaaagaaaaccgaaagaaccacaaactagaagttggattttctccccctttttggcaacaagtaccaaaaacggagagagagacaaggatacaagaatcaatatcctccaggaggatgatatgacggaggataggatggaggatatgaagtgtaatcagggaaaaaacagatgccgaaggtggagtcctcaaaggtggagtcccgaggtggctcatcagccgccgaaaaaacagatgccgaagatgtacgatgatcaggaggaggtggagggtggtggtggtaaccagagccggatggcctagggtcaccaggaatgggtcccggacctgggtaaggaggcggagggtgggaggatgattgaccc

SEQ ID NO: 99012 - DNA, 401 bp, Zea Mays
gagctgcgaggtgcattccttcgagcaataccacatcgtcctccaaccgctggcgtcgaggcggatgcaactgtagctttcgtgttctcttgcaacgccaacctgtctacaacatatgaagcacacgacgttcagtaagtggattttgcctcaaccttcaagtagataactgactgcaaatttaatgttgtatcttggatctggaaatccatcgagcataatcactagaccagattggcgtgtctgatcgagttccaggatctaaagcgttaggtgcatgtatttagtaggttttgatttgtgtattcagtagtttaaggatcctgtgccataacctctgatttgttgttagctatagcaaattatcaaagtgatttacaaccatgtatacccacttctcc

SEQ ID NO: 99013 - DNA, 550 bp, Zea Mays
cttcagttgtggcaggttcatcccctactgctgctagtaactcttcaacaagtcccatgccattttgcactcgagcattgcctaaacccagaatgtgttcaagagtcttgtatctgcgtggagcatcatcatcatgatctgcatcaaggtcgggggtcactgttggtggtgttgcaaactccacaacaccggttgttgtaggggtctacagttactgattccacctggagtgattgctgaagattggactggcatgtgcaatgtcgtggatggtgccctggatggtccagcaaagtttttctccctgactggtgtattgtccagctgctgatcgccaccaatttgcatgaactcaacacagaaaggattctcatagtctaccttctcggcatcaccccagtcccatgcccgattttcttcaaacacggcatcacgggataccatcacacgctttgtggcagggttgtagaactgccaagctttgctcccatgctcatagtcgatgaacacaatcggcgtgcttctgtcctccagcttcaataggtgtttg

SEQ ID NO: 99014 - DNA, 357 bp, Zea Mays
tactaccgcgtagtaacaagcttcggcgtggcgcaaccgaggtcaccggcgcttccacggcgacttcggtagtccggccacgtcgcagcgactataatcacggcgataaattccaatttccgatcctatccattccccgccgtgagatcttttctttgccgtagttatccacccgccagtgaacacaaatcacggcggcggcgtgaatcacggtgtagagatcgtcggcggcgaggttgctgcgctggcggtctgatccactcaaagcactgtaccatggcgaatggcattcaattggcctgacagaccgatttgaagcatgattttctcctatttttatttggcaacccatctgag

SEQ ID NO: 99015 - DNA, 471 bp, Zea Mays
gtgaaatggtgatctaagagtccaatctgatgggagtgtatattgatggcaagcaactgaatctcacagaaaatctttgtgtcactttctcctattggcttgcactctcaacactcacattttattttttatagtgtgcttgtgttgttgcttgatagttctagttcactagtttgttgaatatagctagctctgttgtttgttgtactaaaatattttataatttagaaaggagatagtactactacttccgtcctaaaatataattcgttttagcattgtttggtttctttagtgcagaaactaaagttttgtttagagactaaagtttagtttttactctgtttgaatatagggatttaaagtattcagaatgtattaattaagggaagactaaaatgatccttattattctcgcgctattaacgtcactgaaataaataaggggcaaaagtagaattaatatgattt

SEQ ID NO: 99016 - DNA, 448 bp, Zea Mays
ctctagcttcgacaggaccggagcgacagggctcagatgcgtaagaagacccctcaatcagcttcgacacttcggccgtttcaatatgcctgggccggtgagtcagaaccttaatatttttttgacttcggagtgctagaagtcatcgaagtagcagttttcctcttcttcccttgcctctgcgtaggataacaatagttcggatacacaaatccgatgacatcaaaaaatctattcagtctcttcttgcctcgacccccgaaggctgttgtcatagcatcatccttagcccttgagtaagcaccaagcagttcatcactggttgcgtcgatgacattcagccagtcgtcatttggctcatcgaactggctcctgtacttgaatgtatatttcagatagactaaaccaccttcgctggacccagtggtagtgtccttcggcatctccc

SEQ ID NO: 99017 - DNA, 414 bp, Zea Mays
gacgtaaggaggaccccaccaccaccatcctcgcaagccgctcaggacttttagttgcttactcttgtggtggcaaggcggagaggggaggaggaaggagcagcgatgggtagggtttggtgtcgcttgagccatctcatgggagacgatgatgggattggaattgtggtttctcacttggaatacaaattgtgtttatgcatgttacatggtagacgtgttgggatcgggcacaacgactagttcaaatagagcataaatcattgtaaaggcctagaatgtgtttgaacaattatcccatttaaacaaggtataccagtgtgtatatagaaatcataacaacacaagagcacctaactagtctaagggaatgggagagtcctaacgatgtatagtatgcctactaggtcatga

SEQ ID NO: 99018 - DNA, 300 bp, Zea Mays
ctgaaagagagggtggcaccggtccggtgagcttgttgtccctgacattgaagatctccagctgtgagtttgggtcaaactctgggatcgggccggtgaacaagttggactgaagccacagtgtcttcaagctcggcaacttcgccacgacgtcaattggccctgacagcttgccatccgacttctggttgtttagctgcagtgtctccagcgcacccaacgcctctaaccccaccggcaggaccccggtgaggttattgtacgacagccgcagcgtctgtagcgatgtcaggttggcaa

SEQ ID NO: 99019 - DNA, 296 bp, Zea Mays
cacaagactgcttctctttcttttcgttttggcgacacaagtgttacgaattctgattcatcccatataagttccatgcacaactgtgacatgctatttggttttgtcagctcccttggagctctggcacacctaattaatctatcgaatattcgaattgtaatacgaaggcctcctgtagcaggatatatgattttaaacgggtaaatagcagtgtgttgggtgcatggcctacagtcgcccactgaattaggaggtgtttgagctaatagttagctgtgctaaaattagctgaa

SEQ ID NO: 99020 - DNA, 416 bp, Zea Mays
cggagtgggtccagctggtctaatgaagcttggtcccttgggtggaaacccaaaggatcgagttctctggtgccggtcttgctgctgagctcggaggacttggaatttcctcttgaggtgacctttttcttcttcccttgccctttccacttgcatggctttgtttgagaggtgcgagaagttgaggaagtcttggctagctaggatggtcttgagttctggtctgagccccttcaaaaaacgggccatcttcttggctttggtgctgacatcatccggcgcgtagcgggccaattcggtgaatttgtgcacgtattcactgacagatcttccatcttgagttagttcccagaattcatcttccttgagctgaacgatcccttggggcacatggtgctcttggaaagcagtttcaa

SEQ ID NO: 99021 - DNA, 341 bp, Zea Mays
ttttattaaacaaaagagtacatgtatagcttcggcaccacgagattacaagaaggaggaaatatagctctttttcgattacaaaaggcgcccttattcgatggcattgtttctctatttataggcacgatatacaacttcggtgaaattataattatgcgctcaagcctatacatttggactactaaatagattgagggtaacactatcttttcccattgctattttggttatcaagctccaaagatttcccatatctttgttctgctcctttgtccgaagctgatacctttcgttctcacatctatggttgtttcctatgaagatggtcttcagcgttg

SEQ ID NO: 99022 - DNA, 580 bp, Zea Mays
tgacaagtagcattagctgacaaatggagctgaggtctcagcagcactgacgttagtgatcgactttacagtacagttattatctatcgacccgcatcatatattgtttgtttttatatatatccagtgagatattcttctaaaccgcccgtccggttaatcgtccctcttgatttcttgcacggaatccattaataaatcctgtacagattttaggcctgcacgtacaacgtaccatgcctggaagcgtttaaactacgcagtacgcacgttcttgatcgagctctcgaaacaaacctatatatctgtttgaatatttgttccagcattctgggcgttcagttttctcaggctggggtggtacaaaacaaacacgtacgcgcgagcgagcacgagtctgtagctctcaagcatacattcatatacatgcatgacatgtatgaatggtgaagattaaagtattaaaccctagctagaccaagaacagtatttttcgtttatttatatatgaacgtaaacttgacaaaggtgatgttaatgtgtgtcaattcattcgcatagttagtttgtcataacgcag

SEQ ID NO: 99023 - DNA, 521 bp, Zea Mays
caaggaagttcgttggatagtgtggagcatgtacgaagagttgctgagattggagatcaacggagatgaccagaatttctcaccgaagttgagcagtaatgatggatctgcatcgcatcatggccgaggcatatgactacacaattcacggtgagttctctcccctctatttcgctatgacctgaacttctttccgcatgatagggatcgaggtctgtgctcgagggcatgtttcacgcggtctctggccatggcaccactgtggctagccctgctccaccatctaggtgtcgggggataagagtgcgggactgggaccgttgatccttgtgggaacggctccgatcaaaagattgagtaccccttcgtgagattcaaccatagcactagatctttgatccattggccgtgatcggaacggaatcggtggcgtggattgatccacgcctcattaaaataaagtcgtcaatcttagatcctttggctcagaccatcctataccccttcgatgatgcaagtta

SEQ ID NO: 99024 - DNA, 481 bp, Zea Mays
aatacatgtcaggatatcacgaattctatgcagaggttaaaattgtttagaaattagttgatcatgagtagctaatctttgataaaccgcggcctagtgtgaggatatagatgaaagtattctcagactgtttgtgtttttagattgacttttgattgctgccatatcagtatatctttcatgaaaatccaggttaggataaaatccattaaagttagtatattcttgcctccagagactctcgcgaagtaagaaattgaaactaatggactaaaacacgttttgttgcattgcatgcataattgggacttatcagatcacttacgtttaccactctgtaggagttcaacttggtaactctgacctagagttacacctacctgctctaacttctgtccacaagtccgcaaccacctcgagtcctccacttatttagtttttctgtggatgttttgaagtattggtcactatctaatatgtg

SEQ ID NO: 99025 - DNA, 365 bp, Zea Mays
caagggccttgtcatcccgaagctcaatttcaatggactcatgactatagtcattagcttctcccttctcttcccgtctacctttatgtaaaaccattcgcttgtccaaccagtcggccacttggtacgatagccgagaactaggccttcgtatccttccgatttgcaaagttgcagcagccgaagttcttatgaagaccatctgctcttgccttcgtttgatagtgcagctcgtgcacccggcagaaagcttcggcattgggactcataccctggctttagagagcccatatgtagacactaagtctaacgattgcattgggtgtcagctgatgaaagtatatctcaaaatttttcaaaacttc

SEQ ID NO: 99026 - DNA, 604 bp, Zea Mays
aacgttgccctaaagctcggtctacatatacccatggagcttgagtctttcccattgtgttcccaacaacacaatacaacaacatacaaattgggggcacagtaagctttagcaacataccaggactcaagaacaagatctaggaaggtaggtggaaggatagaacagcgggtcgatggaggaggtgttcatggcggcgcagagagtggatttgggggaaattccaaattagggcgctatagtggacgattgggcacgaggagtggttcactgggtttgtaacaagtaggcggaacaggccgaggcatcaatttatagaggacggtcatgaggagggcgaatttggacggggaagagtgcgcggtgagaagggggaagagtcaccgaagtttgctaatgtggcgttcactggtttacggtctacggtggtcactatcgagtcttcacggcttgcgacgagtggtgagatgacttaaggcatgtcacaatcgagctagatggcggcacaacgacgacagggcaaaacaatgccccaagttcatccccttcgcgagatttttcaccctacgtagttatctgcactccaccgggcacgaatcgcaac

SEQ ID NO: 99027 - DNA, 320 bp, Zea Mays
gaagcaaccacaacattatagctcaggtagatattcagaatatgttccagccatattaaagactcggtaatattacactaggacaggccatgctagcgtttaggccatagtattacagtttagagtcattttttccatctacagaacaagcatttccctcttctgactgagtatgtttcttttttagtgcaggtcttttcattgcgccctctccccatcaactgcaactcttctggctctaacctattttttgtctgcctcctaactccacagcaggacaaggatcaggtgtcacacaaaacaagggggttgccttcatc

SEQ ID NO: 99028 - DNA, 701 bp, Zea Mays
atgctaaagcgtggaaactggtggggtagtcaacattatgtcatcaatttataaaataaggtaagtagtctttgaaccatgatgataaacaaataaggaggtatctactttggcagtgttgaaaccaataggatacatgtaagttgcgaagcggctactccaataccgaggtgcttgtttgagtctgtagagagacttagtcaagtgatagacatgattgggcaaggataggtcatcaaaattagatgactgcatgcagtacatagtatcaatgaggatcttagagaaaaaaggtattcttcacattgcgttgatgaatcggctaactcaaagtgagaacagtggaaacgtggcaagcttcaccataggactaaagttcgcttcacaatcgatcatcatcactatgtgaatccccgaagaacctaatgatccgtgtatcaatgaagagaaccataaaagcaaagtttgcaatgaaaacctattttctagtggcaacatttactccatgatgacgaggaatccaagtattattagcatgaagtcacgcaaaactcctcgaaattcaagtgttattagcatggagggctgcaaattcctcgacaagcgtagcaacaagtgcaacacgaaaagaagcgggtagtggagaaatcactatggcttggagattcatgtgaaatcaccatggcatggataaatctgaa

SEQ ID NO: 99029 - DNA, 545 bp, Zea Mays
aattgccaaaggtgtcaaacatccctgcaacaactccaagaaaaaggagaatggctagtgtgatggatgatgtaatggagtctgtgaaaacatcaactcctgcttctgctgaagcacctaggacggaagctaaagtttcaaagaaatctgacaaaatcggaatagcgcagactatttctgaggctgggccctcagtttctgctaaagcaagaccttcggaaattgcaccactaatcctagaaaaagaggatgcccctgagaagtccaggtctcctactccaggagcacctgttgaagagctggagttcattgtgcgacatgcttcggggaagcaattatcataagagcaaattgtcgaaacgcaacattatgctaaggatctaaagtatccccgagggtccttgatttttggtggcaatgacgaggatgatttcctttaataaagagataaatgtctgctgggaaatggcggacaatataggttacccgaagcttgaactcggcttatttgtgatttcgaaggatcaacttgcggacaaccttgc

SEQ ID NO: 99030 - DNA, 737 bp, Zea Mays
gtccgcggcactcttccatggatggcaccagagctactgaatggcagcagcagcaaagtctctgagaaagcaagttttttttctgaccatgctcctgatagctctttgcatatggaactatgacaggctaatacctaatgagtatttggtttgacacatgcaggtggatgtgttctcttttgggatagttttatgggagatcttgactggtgaggaaccgtatgcaaatatgcattgtggtgctatcataggtatgtatccgctatgcccatccaaccttttgtttgcctttaagcattgatacatttctcgaatgcgtcagcattgatagaagtgattacaagtcgggcgaccagctggtcgtgctataggaccgaccaggcgcctaatcgtgattagggtaacgattaggacgcctattcggtcctggtaagtgtgaactatgcaatctacagacatcctgtgaagtgtgaactataggattccagtggacagtggtaactggtaactggtaagagataggaaagggagaggaggggagcaggtgctaccttcagatgacgagctcatctggactaagggtcactggctccctgttgttggtctgctcactgctggactggagacgccagcgcaggtgactagagcttggagacgtcgcccagattgacgcctaatcggacgacttggacgactagacaatctgatcgcgtcgtcctcctagtcgcctactacct

SEQ ID NO: 99031 - DNA, 472 bp, Zea Mays
tagagatcttccatcgatgtccataggggccaaagaactagacaacctagacggaagaccatgatctccccccggggcaaccaccaccctgagaaaggacaaggaagattgaaagggacaagagtgatacgacctaacgaaaaggaagaaggccactcgaaccaccgcctcgaagggccaccccttgaaaaaccacctcgatccatgacagcgagcgactgatcgagagccaggcctgctaaggaaacccacggggtgcatgagcatgtggtgcttgccccacgaaagtgagtgatccaggaacccattcctctttaaaaggataacaccctacgaagctagcaggaatgggcctatgggccccggtaaggggaatggatcgacaaaagaaacccccgggcctcataaacatggttgcaagaggtcgaaagatagcatagacaaagaaacaacttttcttatattctctcac

SEQ ID NO: 99032 - DNA, 532 bp, Zea Mays
tttggctgagatgaggattgcaatcggcttgtattcgatccattttgtaaatttatcgatggctacaagcacatgtgtgtaccctccctgagatttcttgaacggcccggtcatgtctagtccccagcatgcgaagggccaggtgatcgaaatagtttgcagctgctgcgctggcaggtgttgttgcttggccaaaaattgggatgcctcacatatttggactaggtcgactgcatctttctttgttgtcaattaataaaaacctgctctcaaagccttccccacaagagtcctagatgttgcatgtactccacattggcctgcatgaatttcttccagcaaacgcctcccaacgcctgaatcgatgcatttcatgaagactccagcagcccctctcttgtacagtacttcccctatgactgcgtagtgggccgacttcctcgcaatgcgctcgatagcagccttgtagttcggttcttcctcgttcttgatatatctaatgattggcaccctccagtcatttggatcttgt

SEQ ID NO: 99033 - DNA, 522 bp, Zea Mays
ttgaagtgttttttgaacttaaagtgataaggcagccgaacgagttcaccctctttcttctcttcttcaagcttcggcataccccacttcctcaacgttgggaatactctgttggctaagtattcctggactagatccctagtcccaatatgttcagacacaattctaaactcatacacagcatcttggcatggatcccctggtgtcatgttgcactgaggcctagtcagcccgaagattagctccagcgggctctgaactagcttctcattttcctcatcaattttaacataaaaccatttagatttccaaccagtcggccatttagtacgatagctgaccaccggtgtcttgatatccttccgataagcaaaattataacagctgaagttctcatgcaatccgtcttctctagcctttgtctgataatgaagttcatgtactcggcagaatgcttcggcgagcggctctaccccttgacttcggagagcccagatgtacacgctaagcctaacaatggcg

SEQ ID NO: 99034 - DNA, 350 bp, Zea Mays
gtcaaaaacaggagcagaagctggcacaggagcctcaggcgcaggacggtaggatccaaagacaaggcgtgaggcctcaagggtgccttgaaaccgaggaggctgaatcagctgcgcaaagatgtggcataagtagtgagcatatggcaactgtctacgagcacgaatcccatccaaaacggtgtcctcgatctcacaaataaggaaatccacgacgtcaaactcagagtgggagaccagggcaccaaggagccaaagttgaatatgtgtggtagcctccctgtatcccatcctcggcagaagagtccgtctgataagctcaaataagtacttggctgctgtagtaaagt

SEQ ID NO: 99035 - DNA, 336 bp, Zea Mays
gtgccaaagagttaaggccgaacaccaaagaccaactggactattgcacccgctaaagataacaaaatggaagtgggcagagattggtatggatttcattactggattgcctcgcaccccgaaaggatatgattctatatggatgattgtggatagattgaccaaagtggctcacttcattccggtcaagactacttataaaggctctcagctggcaaaattatatatggctcagattgtgtgtttacatgatgtaccaaagaagatcgtatctgatagaggttcacagtgtacctctagattttggaaaagttttcatgagaatctggatacaaa

SEQ ID NO: 99036 - DNA, 673 bp, Zea Mays
agtactggaggatatgttgagagcttgtgcccttcagcaaggaggtagttgggataagagtctaccatatgctgagttctcatataataatagttatcaggccagtctgaagatgtcaccatttgaggctttgtatggcaggaagtgcaggattcctctatattgggatcagactggagaaagatagttctttggacctgaacttattcaagaggcagaagaacaagtccatataatccgaaagaacttgagggtagcacagactagacaaaagagctatgctgataagcaaagaagaccattggagtttgaggaaggtgatcatgtgtacctcaaggtgtcaccaattcgtgggatgaagagattctaagttaaagacacattgtcccctcgctttattggaccctttagaatctttaggcgagttgaagagatggcataccaactcgagctaccggatcatctatatgatgtgcatgatgtattccacgtgtctcgacttaagaagtgtctatgtgtcccagaggaacagctaccaatggaagagctcagtgttcagggtgatctgacttacacggaatatcctattaagattcttgatactttgactcgagttacaagaaataaagtgataaagatgtgcaaagtacaatggagtcaccatggagaagat

SEQ ID NO: 99037 - DNA, 433 bp, Zea Mays
cgggaatcctatattttttgccatctcccggcaaacagatatttccttattgtccggaaggcagtacaggaagtcgtcttcatcagtgccattatacaccaagggtgtttacccgaagcatgtcgtatgaaaaaatctagcgcttcagtagatgcttcgggggtaggagatttaaccttcttgggtgcgccttatttttccaagaccagagcggcatccgaaggtccttgttcagtatcattttcaacagtttcaacaggccttgtttctgcgggaactaagggcccaacttcagcttcagcacgagttgtaacagcttcgacggtctcctttatattttctaacttaatctgggcacttctgtagaggcaggagttggtacctttgtcgactccatgatagtgtctagtacgctggccattctcctcctctt

SEQ ID NO: 99038 - DNA, 593 bp, Zea Mays
ttaccagcactacaggtggcaaacggtgattggtgtgactgtccaacgagcgtgggtgtgattgcaaaggagtacctgttctgctcgagagaaaattggagctatgggaaggctgactaaatatatatatgtggcacacaagtcagtaacagatagcaatgctgaataagtgtttcaactactcgtcctagttgctgtcctagaaaatataatataacagttggaccaaagcacaagaaaggaggtacaagtgtctagtgggaatggcaattctgtaaatagggcagatttttcagcactagtagaaatcaaaggcacgtttcaaaaggagtaccatcaaaagagctcaaaatattctgaattgtttaccactgatccaaaaacacaaaggatggaagcacacaaaatttcactcgaaacagagttgtattgtggcctagagaaattcacaaaggatctcggaaattcctgaaaacacttaaacaaattttttaattatcttcccgattttttttttgaattttttgaccgaaccaaacaggccgtagagaaaagtttcgatcaccccagtatggagtcaggaatcttctgta

SEQ ID NO: 99039 - DNA, 484 bp, Zea Mays
ggctgagacgagcttcaatagtgacgccttcaggaagggaaagacgcctaggacctcatcgtcgctcgtttgagatagactgtacttttcccatggaagacagtggtggggaaatgtgacaccctcaacagggaaagtgacacccatggacacaccgtcattgaggctttggcctagaatgtctgccagcacattgccaggccagaacaccctcggtcaaagcatgcaacctctccgtcgttgtcgccctggcattctacacaaacccctctagaggggcatcgatgggtcggctgtcacagcagccacaaagctacatcggccgccacccctccatctgggcacatggaaccggacaacaccatgtcgcgtgcgacacactaccacacgccagagaggatgtcggttgtcgacattagccttggcacccgcgagcaccgaaactagctgctactgagcgctctgtctccatcgctaccatcat

SEQ ID NO: 99040 - DNA, 425 bp, Zea Mays
aagtcttcagccgagccatccgtatggcgccgttcctggcccggttttgtgccccgactactatcactaagtatttgggagagaccaaactggtgctatggctcgctgactatcggctggcctgtcagctcagggaaacgagtgatgacaacctcatcattcataacttgcccctctttttgtcggactccgctcgagcgtggctggagcatctcccacctgcctagattcatgaatgggaagacctggtcaggtcttcgaggggaatttccagggcacaaacgcgcgccccataaattcttgggaccttcgaagatgctggtagaagcaagatgaaaccgtgtgggagtacattcgtcggttctccaagcagcgcaccgagctccctaacatctctgaatctgacgtcatcggagcattcctcg

SEQ ID NO: 99041 - DNA, 332 bp, Zea Mays
ggacaagccttcagaaagctatgggcaccaagctagatttcagcaccgcgtaccaccctcagacagatgggcagacagaaagggtcaacaaagtccttgaagatctgttaagagcatgtgttttagcttttgatagaagttgggagtccagtctaccttacgcagagttctcctacaacaatagctatcagtccagcatcaagatgtcaccattcaaagctctgtacggacgaaaatgccagacccctctcatgtggtccaacgtgggggaaaaagcactagaaggacctgcttttgtcaaggaggcagaggagaaagttgcactgatccgc

SEQ ID NO: 99042 - DNA, 292 bp, Zea Mays
tcctatggcatcttacccaaagatctgcatcaaagttgtagagctacaaaccagttacacttcggctatagggactgaactcagttgagcactagatccaggttgaatcctagtccaaagatggctctgttacactgcaagtctgaagttcagagttcaatcagcctgacagccagactttagacttaattatctccaatttctccataacaaccttgcttacactcttaagcaaaattgttcccctatgttaggtctacaaatttgatgtggtgccctaaggtgaattctc

SEQ ID NO: 99043 - DNA, 799 bp, Zea Mays
gtttgatacacttagagtgcattcactaggcaaaaatttcaagcaagttgtattgttatggcattttgcaaatagaaccctggaatgggggacttaaccctaaatagggaccaggagggtaaaacatgacccaaattgagaaaaccctaagggttaagtaaaacaatcataaaatgttaccaaagatggatctacattacattcatacccctgagatactagaaaccctaattgaaaccctggaaaaccctaaatccaaaccctaggggcctatgtgcaaaaatagtgcacaattggactaaagtgtaaaaactacaatgttaaagcatcttgggtcatttggttcacaaatatgtgggtttgcaacttgaaccctaggttttgggcctatttgcataaacaccacttttgtaaccatatggcgaagtctgattttcagaaattaggttcaactttgggaccttgtaactttcaaacaaaagggattttgctctgggtcaccacatcaatattgtagatctatcataggggaataactttgcttaagagagtaaatatggttgttatgcaaagttaagagaaaaataggcgccaagttgggatgtcagtcggtttgctgactgaaatatggtcaccagtggtagtggtcgaacttgtgatcagatttgagctaaatccagtaggaattcgactaggattgctataacaaagataaagaggatctataggactacaactttgctgcagagcctcggataggttgccatggaaatttgagagaaaattgagcccaaacatt

SEQ ID NO: 99044 - DNA, 378 bp, Zea Mays
gtggccatcgacaaatttacgaagtggatagagtacaagccaatagcttccttgacctcagcaaaggcagtggagttcattcaagagataatgtttaggtttggaatacctaacaacatcattactgacctggggtccaacttcaccagcttgaagttcttcgatttctgcgagcaaaggagcattcagatcaagtacacatcagtggaacacccaagagctaatgggcaggtggaaagagccaacggtatgatactggatgcactcagaaagaaggtgttcgataaaagcgagaagcttgccgggaagtgaatcaaggaactaacatatgtggtctggagcctgcgaacccagccaagccgagctctgcatggaaac

SEQ ID NO: 99045 - DNA, 384 bp, Zea Mays
gatgtgtcgaaagtggaaaggggtatggctactgcagtgcgtggaaaagttgaatgttatgcataccaacctattttggatatgtgtatccatacggtctgaccttggtagctatacagtccagtacgacgttggacggttcgacgtaaggtgttgaacaatccatgatagggctggggcagtccgtgtttgtgtccgtactgtctagtcatattctgcattgctagcatgtcataatatgggctcggtgcagcactggatagtccgacatgaggcgtcagacgattcacattggggttggaccgtttgagatcgtacatgtactgtacggatgtgttcaatgccaacggtccgtcgtagcaaagctagtggtggttgttgttg

SEQ ID NO: 99046 - DNA, 280 bp, Zea Mays
ttgaaacgcgggatgggatggttggatgggattatttcttctcacgaaggaggagactgccctgtttgtgaaaagcacgtgtggactctgtactctccattcgatgccaactgcaattgcatgcatgtccatccatctcttgcctgagagcctatcgacagatgagatgagtatgcatggggaagttggggatgggcgcaggatgatcggtaacaatggtgactttggggggagagacaacgagagctggaggtctcaggtgtggaaagcaggaaaaaga

SEQ ID NO: 99047 - DNA, 307 bp, Zea Mays
caatccgtacatcttgccttgatgcttatcctaggtctgcattttagaaatctcctctctcctatctcaatttgagagcattgttttactaatctcacccttggctacatcttcttctttaccgcatgcaagccctgtcttaactccattcttcgtggtgcttgtacccttggttctcctatgccttatcttttctcttacacccttgaccttatcgcctctccttgtggtatttatgtctttacctagatgctccctttgaacttatcctttaaagccttctcttttccaacctagtttgagagtg

SEQ ID NO: 99048 - DNA, 448 bp, Zea Mays
acgaagcaaaaaaatcaggagattagagatgatggatgggattatttattgtagaaaatatattccttttgtgaagaacacaatatacctcaattaaatatggaagaagagtatatttattgacataaacaaagggaaaagtcaaactgcaccaattatcaacactatatatgggattgtttgaaccctgatagttacctagagggggtgaataagcgacacctaaaaaatcacaactgaacacaaacttgaatcacttgctcttaggatgcttgggttctcgaagaggctgatgggagaggctatttatagcccaaatggccaaaagagtcattgaagaattgctagacactttccttctgtgggcgcaccagactaggtcctaaagctggacctctcggatcctaattggcaccttccaacttgggctagcaccagaccagtcttg

SEQ ID NO: 99049 - DNA, 538 bp, Zea Mays
gctgaatccatctgatgtggattaaggttgtcagtgaactagacattaggacaatgtacttacatccattgagatactctacaaaaatagggttgcaactacaatcataaagatactcagattggcaatctatggaataaaccctgaaccctaaatacgacggatagaacatatcaatggattgcagttaactgcgaccaacaattggtactatcttctgtattcaaaaaaaatcatccctcccacaataaaaatgttgaagcaattgatccctaccatttagattagttctctttatcctaaccgtggaatcattgttcaggtctagtgacgtttatgaactaaaacaaggccatggatccacgttcttcgaacacataaactgcagctatgctgacaaataagtcaaacagaaattgatattgacgttaccttagcttcagtggaggttggaaccgaacctagaatcccagttgaacttggatccgaacaccttgacctcgacttgatacgaaagtctgtaggcggcaatgaagac

SEQ ID NO: 99050 - DNA, 616 bp, Zea Mays
agacagtataagaaatcatcttcattgcttccgttaaaaactaaggctcctttcgaatattttaatttttgagcataatgccttgcttcagcgatttcatcttcggacaatttcttccccgaagcatgtcgaacgatgtagtcgatattttcaattggagcttcgggagaagcagtctcgaccttttcaggtgcaatctgccctgccatctcttccttaggcgcggtaggcttcgtcgcggcgggcgctgaaggcccagcttcggtttcagcctaagtttttgtagcttcgacttctgcttgcttagtttcagtttcggcttgcgctttggcagcttcagcaactttccttgtaggagcagggctcaaggccttcgtagtctccagcacagcatccagcacgttggccatcctcctccttgggagtcgtggcagaagccttttgaaccttaggcagttttgcctttgttggagggctcaaaatttctggcattttcattattttttcaatctttggctcttcagccctatcaaccctagtcttgactggcttgactgtaggcaccttcggcactacaatcggctctacagtactctgcacaagcggagcagcttcc

SEQ ID NO: 99051 - DNA, 386 bp, Zea Mays
ccctatgtcttgtgtggtgctgagtattggattgctctgagttcgaagatttcaagtgattgtgggaggtggaagatgaagttgcctatcaatttaatggagtgttctctctttcttgtatgggtacctctgcaaccttatatagctgactggagagatattcctttatagatcattgagtccactcgagtctacttcatgttgctacaagtattcctattctttcggtgcttggttgccttctctgggttatcatctgagtgattcggcgctctaccacactcgggacgcgtcttcagagttcaggtgatccctccgtgggacacgcgcacggcgcaccaccggtatacccgtgcagtatccttcgagattttcagctatcacgc

SEQ ID NO: 99052 - DNA, 518 bp, Zea Mays
cgggtagaagaagtagcgactgaagcttcagtcgggtctgatgtactagcagcaggtcgctgcttatttacagggaatgaacctatagaagctgccatctttgatgtaccattggatggagaagacctagctacatttccttgggatcgtcctccaccaaaagaagcactggattgctgtttgcgccatgggacaacattataatgacttgcataagattttccacgtgactcttgttgaatttttctctctgtacgcatttcttgatcaacttgatcttgcaaggtatggtatgggaacatctcgacaaatccagaaatctcttcattgagtccgcctagaaatcttgccatggttgactcgagatcttctctgattctagttcgcactaacagcaactccatctccttaaaatattcatcaacagatttctttccttgcttcaataattgcaatcgatttcaaagatcacgttgttagctggaaggaacaaatcgcctcttcatcactcgcttcat

SEQ ID NO: 99053 - DNA, 695 bp, Zea Mays
gaaaaatctctaagactcagcgcgccactgctatggacggcgggttaatttataacaagcccggggtttattttgtaattttggacggccgaaggggtatcgtgcactgtgggccacacgatcaggattcactggcctggattgaatctagtctttactgaaccggtacgcgccgaggatccttgatcacgaaatcgacggtcacgatctaatgcgcgaaggaggtatactaccgtttgatctgagccgcacaacaactatcccacgatccaaaccctatctaaccctaggtcgttcatcctgagatcaacggttctggtgctttctcctttcttccgctctctcccggtgagccgagcaccctctggcagggaatgcccacggccgcgccatatggccgacgaggtccgcggccccaaacccaaatcaaactagtctagccataaacggaactcaaggaaaacacaggggaatgatttcgccgaccgccacgcagccgaacacccccgaccatgatacgggcggcgcccgaacgacattccccgcacaaaggccaaatttgtgcccaattcgcccacgattaactacggcgagacattagctaggtaagggaatacggcgagggtaaagaattgagagctcaccgaacgcggaggtcgaattggcgctagacttcccacggtggatcaatgggt

SEQ ID NO: 99054 - DNA, 539 bp, Zea Mays
ccgtctcccttagtccgccattttttcagcaagccgtcgagccaccctctactgctctgtccggacgttagcttgaaatatgctccctttggctgccgatattctcccgttccttcaccgttgcgcagcaatccacgaggcgaattcacttgctccgtccgagcgtccctagctgccaaatgcgatgacattgctgtgtgggggaattttctaggaactcactagcagatgagtggaagcagctgcaccgaaattcctaggggcgtggatgagcttccttctgttgtccattcttccatcccctacgatgtcaactgtgaggaggaagaatgttggttagagatctatgactggaaatgatggagagcccattgttgttgcatcgtcagtctgtggtcagagaggggaagattttggcatggtggatcatcatcgtctccaactgcagctttagcaattaggaggaaaactgaaagtagtataactatctgtacttagttatatacagggattgagggagatcgtgccttaagtgctct

SEQ ID NO: 99055 - DNA, 751 bp, Zea Mays
tgttccgcctcctggaggggagaccctactgatttcttgcatttctgaaagataatagcgccttgtttgagcatgcaagaccaggggcctaggaaacactgtgtgtgtgtgtgctctctccgatccccacatatgataacaattgctaatatgcacagcatgatcatgtcagtagtgagggggttctcctagttgtgaggatcggatgagagggccgggggcgacaagtgtgctttattgtactgcatgcatgtattgtgcgcatggattgttcttgctgcggtgctttgggcaggctctccttccaaaacacctcggctgtagtgaggagaggggatcaagcaggtgcctttaaaatgtgggagctcctcagcagcagccagaggtcagagccatatgccagagctcaacgcagctgccatccagatctctatatctctttctctctctataggacagacagttatgggaggattggaggtcagatcctaaatccttctcctatcctatcctatccttcacagcagaggttgatctaccttggtaagcttgcttgctcatcctctatctcattctctctactagctacgcgcatatactgttccacccctggacttggtccgcgcatttgtctcccggcctggcctgtgccatgcgcaccttccctgctgcttctgttaccgctgtttcttctgcaccagcagttcagtcctgtcgccgcctgctacactggtgaagagcatcagcaggc

SEQ ID NO: 99056 - DNA, 605 bp, Zea Mays
ggacggaagagtcttcggatgaggatttggattattttgcggccttggatgtggctgcgacggaggcttctccgcatgtgacggatgctgaagtttgtcctggtccgagtgttgggcataggcggcgaagggcggtggcgaagcgtagagtgagtgaggtggagggtggtcgtatttgtgtggacagggctggcaagtgggaattgctgtcctcgccggttggggcgagtgtaggtgagggggaattgcgaagtctttttgagggtgaggagctgaggataatgctgtttaactatagggagatgggtatcatcccgaagattgaaccaatgtaaggtgtgatgccctcgctgtacgtatgtaactataatttgtatgatgaggctgtgtgccttcgctgatccggccgtgcccgtacgggacttgtgcactaggtctagcgcgtttattatgatggtccggctgtacctgtagtcggtctttgcatggatagtcttttgagggagacttcgattttgcgcagttgttgtgctagtccggctgcacccttaggcgacttttgcacggatagtcttttggggaagactggttttgcgcacttgttg

SEQ ID NO: 99057 - DNA, 782 bp, Zea Mays
cttttggtagcctggtagtggtaatgtaatattgcttatgtgttgttgtctacttcgtactcccaaactttgtagtgtggttaaccagatatggtcatgtactcatgtgggcaatgttgtcatgtcatattatccagggatgtagctgcaagcatgtaacttttgaacttatggcttgtactcatgtgactagatgaggatgtggcctataagggatttgaacttatgttttgtactcatgtgacttttattatgtaacttgttaatctatgttgggtgcttgccaagtatggttacctgttgcgtaacaatacccacttgggtgcgggtgtgagtaaactttcctatccatgaccgagtatgggtattgtgtcgggtagtttttttattttgtgggtgcatgtatggaaaatttttgtccgatgggtacatatctgttgccatctctaagcaggagcccacctctccttcatgagagcgctgctagtccaaccaaggatacacccttctactctggctagtcaagtcaccatgaattatgcatccgtcactcatgcccctttcgatcctttttcttctcccacgccacaactaggagcttccatgactggcaccatcctaagctctatgcttcctttaccccctaaataaggagatccttaggaccatgcacgttcgtcactaccacattggccctttccatatcttgtccctcactatagagccaccataaaactagggacgaactcagaataaaatggtagtgaaggcacacttgtaac

SEQ ID NO: 99058 - DNA, 782 bp, Zea Mays
tgacaagcgacaacattgtagaacccaaaacagaacttgaattgtgtacagtagacaagtaaagattgccctgagcaaagagtactcacctgcacattgaagcaagtgggcttggtgttgatgggagcatagtaatgaatattagtaattgtaggcccaatcaatgtctttctggccgaggtgaagggaggttccagggatttatttggttttgcttaactattgttaagaagctttagaagcatttctatcagtggcactgaaagaccagaagtttagtctttgcatctaggctagagttttttaaacgatagggtaaagctattgcttgtagtacaacactgctcgtatttcagtgtgcaggtctgctagaaggcggagatgcattttatcggtctctatatttttatccacttatcttcattttttgattttttgttttaggctctcttcttcttggacctaaagcagttagaggtgccctttctagaataacttttggtctttccgttagtgaggtcagtcatcctttagttttatcttattgtatggtttattaatccatcatcattgaatatttgaatgtcctatttatattaatttgatttgtcgtatccttcacataaataggtgttataacctaaattttgcattgtgatgtctctactaccaacacctattttcttagaaggctacttggtagtaatttttgtactagctacaagaaacccactttatgcaataaatatccattatttgagtgtgaatgtttgtcactgaac

SEQ ID NO: 99059 - DNA, 863 bp, Zea Mays
cccagttgggcatgatggtcagtcagttcaataggggaactggcggaccggggttatgctttactgctaaggatgggagtgctatttgctttggaaaggttggtggtgagtggagtagactgaagccatcagtgaaaccttcagtcacttctaaggtggcatacttggtctacaaagttgtgatgttcgacatatgtagagcgcactcgtcacacttagtcttgttagacaccacaattgaagctctagtagactcaagctcctaagactattgtgactatgatagatggtgtgattgaggagcctatgagagcccctccttagaaacaagtgtgggttccagaccaaatcatttcaagaacacacttgataccgttcccgacatctctagtgatccccttcctagagagcccctcagctatccaaaagaaattccacctaagagagagttggggttccattgtgagtattgtgagagggatgggcgtctggctgaatttttctttaggaaaaagagggatgagaagcgggtttctgagtcgagcagaaagaacatgaaccgcccctctcatggtattcatgctcagcctgttcagagacattctgcgaggcctagaggtgttttgcctcttactgctaggccttaggtagagagaccacagggtggtcacactcggtggggtgttggttgtgcgccatatagctatggaccttgtagcagtggctttggttcttacctccccagtggaccacagttaccttctcatggtgatcgctttccccattcaggaccgaggatgtttggtgttttccctaacaatttttaggggcaaatgccgcaacactggtattattctcagtat

SEQ ID NO: 99060 - DNA, 319 bp, Zea Mays
caaaaataaggaaataaagatatgtcgtgtttccttttccattacttgccccagtaagaatttgggagtgactgctatagtaagattgaagctggatagtagagcaacaactttcttaaagatggattaggaagtcgctgcatgaaaaattaagatccaggccttgcaagttgggctgtcaggctgactgaagaaccatcccatggtacagtaactgaaacagattacatgttcagcccccctcgccgccggtgacctttgcgccgtgatttgcgtcttcgctgcgattcgtgctctctggtaagtggataaccacgac

SEQ ID NO: 99061 - DNA, 724 bp, Zea Mays
gcgggaacgaggcggctgtacagacagggtttaggcatcatccatggctccatgcagtcgattattgttcagttatttcggcgccacgaactgaacgagacggagcagggcaattttctctggaatggaagcagggtccagcaggcaggaggtccatccggaacagtaggagctgtgtatctatcccatcagtttcacgcatacagccatacatgcatacaactatactgttgtcagccccggcgaatcctgaaccccggtgacacactccaactagtttgagagccacaaaaactgaaggaggctgtagggcctaaaacctgattttagctcttacaatcccctccgattttatggctccgaaacttgctctagcccagaatgccgaactcaaactcctgaaaaaaatgcagagctattgtggacagttgcttgtgctgtaaaactcaacatcgttttctctgtatatattaactgaatataagaacacacacgactccaaaacgtggctggctgtctccagctcctacatgcgcggcaagccactgaacaagtcctgccatcccaacaccacggactcgatcgccgccacgacgccctgaactctctaggacacgacacgccctgcatcatctgagaacatgcataatgacaaacagagataaactaactagcccaagcacaggactgcgactatcatatacagcgcactatcacattctgg

SEQ ID NO: 99062 - DNA, 424 bp, Zea Mays
gcggggtatcaagaacaaccctcatcacattcatcatacggcgcttcttctgggcattccccccaccgggtgccgaaggccctttctctgcctctactttggcagtttccctagcatctttcttctgtggctataataagcttgttagctctgatcctagaggacttagcattgtgaaaggcaagggttcagtcattacctctaaaatttctatcacgccaatagaagtttccgaaggggtctctgcagaatgctttggtggagaagatctttcttcttcttcatggctcgatgatataatctttcttttcttagatgctgaaggttctggtgtcaacttcggtttctttgttaaccttttcttcttgtccttctcgatagatctttgcacttgtcttttcagaatactcacaacccttttctt

SEQ ID NO: 99063 - DNA, 663 bp, Zea Mays
cgggtcagcagcgttttggttgcaatcatccgatccgaggttacgtttggcacagtggtctgaattttgtgcagctgtctgtgctcgctttgagcgtgatcagcacaactatcttattcgacaatttttccacattagacaaatcgatacagttgttgagtatgttgaacagttcgatactctgatgcaccaaattcttgctagtgatccccagtttagtattgctactattgtcaatagattcatagatggtctggcacctgaaattcgggccatagtctttattcatcatccgctcgatttggatactgctgtttcgcttgccttgttataggaagaattggcgacatcgaggggagtaactccaccagctcctaaaccactaagtcgaccacttcttcaaggaaattcttctggaacactgcagccaaatggtcagtgtattccaaaaccagtgattaccgtcagtgggggtggagtatggaaatcaggcacagatgaacagaaagcctcggccctcatggcttaccgtaaggctaaaggtctttgctataagtgcggccttcattggagtacaactcacaaatgcagtgatacagttcccttacacgtcgtggaagagttgtggcaactattggatcaaccagattcacaggataactc

SEQ ID NO: 99064 - DNA, 502 bp, Zea Mays
aagaagcataccagtacaaacagtaccagccaaactaccaacaactaccaacacaactagaaaggctactattaccccaccccctccgtaaccaatccactagcaaaggtagttaccctcaccgctaaaagtagaggagggctacccccagcctccagtccatggcatcataaacgtatttagcagaggctcaagctcaaatttcgagacttggagacagtgaagaggatactatcaaagtgtcaaccacatcaccatcagcggactgaccatccagacaaaatggtcgcacgttcctttgatgttcgactcaaacgatgtcaacctccacaacgtcccacacaatgatgccatggtcgtcagctgcaatgtggtcggttgggagattcacaaatcccttgtggataatggcagtcaagccgacatcattttcttccacgccttcaataaaatgggcataaatccaaagcagctcaagtcgacagacaaccccctgttcgag

SEQ ID NO: 99065 - DNA, 426 bp, Zea Mays
cttctccacaaataatactggggctacccaaggtgaagtacttggtctgatgtagcctttctctaacaactcatcaatttgcttcttgagttccaccaactctggtccggacactcgataagctctcttggaaataggggcggtgcctgggataagctctatggcaaattcaactttcctttcagatggcatgcctggtaactcctcagggaatacatcggggaattctgacacaatcctaattgcctcaatcggattggactctttgtcatctactgataaatggtgacaggctccttcttctagttcaggtaagtacagcttggttactacttcctttcctgatggggacaccaacttaactgttctcttgccgcaactaacagtggcttgatttctgtgtagccaattcatccctaggatgac

SEQ ID NO: 99066 - DNA, 925 bp, Zea Mays
atcatacataatgtaatgccaatgcatatgatgtcatgccaaagttttagttctcgtaacactaagggtgttacacaataactacagtatgggcagcctctccctcgggggctcgagcgtatgaacaacccctcggcctctgccttggctctcagcagaaaaccagcaggcacaagtcaaccgcacagtgtgccgtcacgttggcttgcagggcgccaggacgtctctcctttggatacaacactcgacttcactgcggacactccccttcgtgtataaatagggcagtggtccctccaggaggacaaatgaccaagagaacacgtagacgaacattcactcccccactttgccttagatattggcacttgtctcaatcatcttatggacttggggacttcccctctcccgttgtgcttgtaacccctactacaggccattcagtgcgagtaatataagcctcacctcctttgttgaaagtagggctttgtgctgcccgaactaggataattgcttgtgtcttctcacacaccatctagagtcggccacgcggcacaatttactagttggttaaggacccatggtccaaacaccgacagttggtgcgccaggtaggggcttgtcacgtgaaacacttctagttctcgccaaaactctagatggcaggtttccaccatccactcaggcttgggacggtgatcaagttcgagagcctggagttcatgtctctcggcatcgagtatgacatgatacttctcccacttgtccctctcgagtgctcaagctctcgttgccacctctctcgtcgtaggaggcagagacagaacaatcgtgatcgtgccgctcatggcaccccgtgcactggaggagcccccgggatggcagatggcatagactccctctcgaagaacctagccaatgtcaa

SEQ ID NO: 99067 - DNA, 733 bp, Zea Mays
tcgggatccttctcttcctcactgcctgcctcattagcattcatgtcttggtgatgcaattctaggtgaacgttggcctccgcaagctcctcttgcacatcatggagctggttctctaggatctcgatggtgttgtcccagatttccacctgctgctccaatgcttggatgcggttgcccatctattccacctgtagatccttctccaccaatttcgaagacaggtccaccacgaagtcctccctatcgtcgagggtgatctttgcagcttgagcaagcccagcgaggtgcgtcatggcgtcgctttgcaaggtctacgggcggtatagtgcactcatgcactggacgatgattctcccaacctggtcgagatgcatggcccacacatccttcacgtggctcactcaccaatttcgaagacaggtccaccacgaagtcctccctatcgtcgagggtgatctttgcagcttgagcaagcccagcgaggtgcgtcatggcgtcgctttgcaaggtctacgggcggtatagtgcactcatgcactggacgatgattctcccaacctggtcgagatgcatggcccacacatccttcacgtggctcactctattacaccacattgggtcatccctcttctcggcggggaagagtccaagtgggtgcataatcatctccagtgggtggtatccatagaatgtcgtcaaagcttttagtgctgcggcctcagtggtgtcg

SEQ ID NO: 99068 - DNA, 495 bp, Zea Mays
gacccatggatgtacttaaataaacatagacccatcacgttaccaaacagcacctagatatttgcatgggggcatgggcacaatgataagctgagcataatttcgctcaactccggtcgagggtggctaatgagcagtgcagttcacagatgctctgttcttggtctccccagcacaattggataccataaggtattggcttacaatagaattcaaatacaaagagaaccaggtatcatacaattacgtgtgctaatgaagtaaccagaattatcatctgcatctcccatagtgtgagcacgacaagatccggataaacaaacaaatacagcacggtgtaattaacaggcacctagaattgtagtatcacaccccaagcaaattggcgtaagcagaagacattataacacacaatgcaaagaatctgtaaaaagcatactcctattcagcatgcgttcacatcagtttcatttatatacgaatggacgtgagcta

SEQ ID NO: 99069 - DNA, 334 bp, Zea Mays
ctggtaccgtgccaactgaatcacgatattgagccattcttcttctagtgtgtcgatctcttcaagacgggttgcttctccttccgctatgtccttgaacatgaccctgggtgccccaaacacaatgtccgtaggaagcacttcttatgaaccatacaccatgaagaaaggggaattaccctagagtgctcggctgggttgggttcggaggctccagacgaaatatgggagctcccttatccacttcacaatgagattttcactcttgcgaaagacctttttctttaatgcctccaggatcatcatgttttctcgctctacttgaccatttgcc

SEQ ID NO: 99070 - DNA, 328 bp, Zea Mays
ctcagtcccaggtgccggcgaagtggtacatccctgagaagaatggctagtatgtctcctatctagccagggtctggtgcctccctatattaagggcaatgtcaatgggtcgtctatctatcgccatgtagtaccttgtttatactactggctaatcttttgacagcatttcatgcatcataaaatgttctactttaatgttccatgttacttgaaattctcagaaattcaagaacatggtacttgagtgtttttcctttttcagaagaatattgcttgtctgcaacactgtcattcttgactactatgttatggtatgtaaggaaca

SEQ ID NO: 99071 - DNA, 490 bp, Zea Mays
gccgaagcttgctgaagggccttcttctgctgttgagccagattaccccgctcttgctgaagccaagggagaatcggccgaagtgccgaaactgatgataatagcggaacaggagaaaaccgagacgaccgaagtgtcgaagcgttctgacgaagctaaggagaaaatagtcgaagatccagaattaaggaggtcgggagagcaaccgaaaaccctgagcccgccacaagagccagagctgccgaaggtatccaaaattcctgcaacaactccaaaaaggaggaaaatggccagcgtactagacactgttatggaatcttcaagagtacaaacccctgcttcaactcttgatagaaagggtgaaatcccaaagaaatgtagcaaagctgatatgacactagatactgccgaagctggtccatcaactcctatcgaggcatacgcttcaaaaactattcctttgaccttggaagaagaaaatgcgcccaag

SEQ ID NO: 99072 - DNA, 352 bp, Zea Mays
gtaagatcgaattggggctactgagatggtgacaataagggggcgtagctactgtcagtccagtcgttgattccccgaaacggtggagtcataacacccaaccgagcatcgctttcttcaagtagaaacctgtgttcgtttggggaggatttttaacaaaaagcaggcttgagatctagccaagttcctactgaagattttactacggttcctttctaattcactgtttggaaattgtgagttgaagatatcatttgattcttaggagcccatggatttgacatcaatgttaagttttcatttgtacaaaaaccataatcaatgattgatgattgcacaagcaaataatctg

SEQ ID NO: 99073 - DNA, 567 bp, Zea Mays
caagggtcatatcaaggatgttggaaaagcctttcctcgtgatggcttgtcgttgcctttcattcaatatctgaatgcttagaagaacatcgtgggggttaaaaaacattaacatactatagtatacattgatacaatacattgataaaaacattaacatctagtttctatcttcagtctgtataaacatgtgagaagattgacagagctaacttgtgagaccgagctcacttctgagacgaagctatcttctttctgtgtggcagggcagtgcacccacctatctcttcctctatccaaatgatccacctgattggtcctttcgggcatataaagtcagtctcatccagagcatcacgagcttcaccactacaaccatctgacattcatgcgcggatccatccctctatctttgtttcgctagctgccctacctcataatggtgcccgtgccggctcgatggtggactcgggaatggttaatccagatgtagagagctccctaaaaggaaacctgttttcatcaaagacaacatgtctggaaatacaaattctgttagttggtata

SEQ ID NO: 99074 - DNA, 284 bp, Zea Mays
caccaccacactgaaggcaatgtttcttcttgcttatttgaatatgaatgatttttgtttggtcgcttggagccttgaatgatctggttcttgatattgggtgagctgagaaaagcacaaaggtggcatgctgcaatactgttgtagtgttgtgtcacatctgtttagtttaagtgcattctcggtatcaactaccaacttgaaatacccttcaactttatttttccccttttcttgactctcaaaaacattttcttgcaatagacaccagttttgcatcagtt

SEQ ID NO: 99075 - DNA, 515 bp, Zea Mays
ttatctagcttctccattaatttagtgataacattatatccattcaagccaaattctttaatcattttgtttttcatggcaatttgttcatcatcatcatttgagaaatcatcactaaataaagttacgttatctccttttgccatgagtcaagttggagtgtaggagtcgtcttggaggttggtgaagagttgcgagcttgaagtagattggatggcaacgtttgccaccacttcctcttcttcggagctagaactctcttcatcggagttccattcttcaccaatatgggcttgaccatatttcttcttcttgaaatatctcttgttcttgcctcccttttttgaacttgtccttcttgtattccttcttggcttcttgttcctttttgttaggacaatccgctatgaaatgaccggtttggccacattcatagcatgccctcttctttcctttcctttgaaacttatcattttccttacaaatttcttgaatgttttgatgaacatagctgt

SEQ ID NO: 99076 - DNA, 448 bp, Zea Mays
cgcacagctatataggatggcgagttgatttctataaactacagggactcttttgaatgtttgctcggccgaaggggtacggggcgatcaccgtcgttggattggatatgggcgcgccagattaaaacactactccagcgaactggtactcagtgtgaccccttggattcaaatccgacgacctagattttaaacacacagatctcaccgtagccgcgggatatgagatctacgattcattttccccacacgcgaggggttacggaagatctaatccaagccgcataatgtcgatctaacggctagaggctttccccccactcccctttctcctaccggcgtcaacacgacggcgcctgactgaggcacagcggcgccattacctcggacccgaatcccatcaccctgtgcccgaagctcaaatctactaggtgcaacaccatcacag

SEQ ID NO: 99077 - DNA, 345 bp, Zea Mays
aaaacctgtaagcgtattacaacaccctgcatgaagaggtgcacgtattgtatgaccggatgcatccgagcgtgccaccagaagttgagcaatgggagccggaccatctggaacagctgatggaggatctgatggggagttggacctttttggggcccctccttccatgaaccttgcagatgaacggtctcctgaagcgggcagtggagcagctacaaacgaagaggattagagtagtatagtttgagtaatgtccttatctaaaataaataaggaagtcgagttgtatactgagtatgtataattattacagttcatcaatgtaataaagatggtgtgtgtttg

SEQ ID NO: 99078 - DNA, 486 bp, Zea Mays
acttttcagccttatctttgtcaactttcatttcaactagctcaactgaaggtgccttcggcattatagccggctcttcagtcctctgcacgggaggaatagtttctcttatttcagcagctgaagaggcctccccgccaaactcgggcaccacagacggttcaatgtaacgaggccggtgggtaagaaccttcatctttttgcccgcagccttcggcacaggctcagctggggaggccaaagcagcagcttttctcttcttcccctgtctccgtagcgggtagctgtagttggggtagacgaagccgatggcgtcaaaaactctgttcattctctttttccccgacgtccgaaggctgcatatagcggtttatcctctgccttggaataagccccgagcagttcatcacttgtagtttcgatgcatttcagccagacatcgtttggttcatcaaatttatccccaaacctgaatgtatacttcag

SEQ ID NO: 99079 - DNA, 372 bp, Zea Mays
gcattcgaggttaattggtgcagatatatttcaaacctctccgacacttcagcaatcattttgtacattggaaaacaaagcccagccaagaagaagcttctaaaaacaacaacctcatcatttttcggctccgggacaatttcatcaccagcaaatcttaccatgttatcatctttctgcccaatatatcctagtctcttcagcacatcgaagtcttcgacttttatggtcgattcaccaaattctatatggctagacttgttagtgttcagaatgctaggatctttatcattgtaactatcaacatcattttcagctttggcttctgagtcgctcttctcaacaatgtctacttcttctgcttccttcggc

SEQ ID NO: 99080 - DNA, 583 bp, Zea Mays
acgagagcacgcttaggaaacttgactttgctaaagcttcagttgtggtgtccgacaagactgaatgtgatgagtgcgctctacacatgtcaaacatcactactttgcagaccaagtactccaccttgctagatgagcgtgacgagatgagatctctatcctgttgggtgcgtgtaccgtttgtcctaggttgtagtatgagctagcagagagagacattaggatagctttgcttgagaaggctagctcagtgagtgcccctgcacctgcgcagtgtgcactttgtgagggtttgcagtctgctcttgagttctgcagacacgacaagacaagaatcgaggaagaaaacacataccttcgatctatcttgagttgggtgtcgtgcagtgatcctgagttgggcatgatggtcagtcagttcaagaggggaactggcggaccggggttaggctttgctgctaaggatgggagtgtcacttgctttgggaaggttggtgagggcagtggtttgacaccttcagagaaaccttcacccactcccaagcttatcaaaaccacccctgctaagcctatcacccctgtg

SEQ ID NO: 99081 - DNA, 766 bp, Zea Mays
tgaattttggtatataatttttttgtttgttcaaggtcttttgtggtggagaaggtggagcccttgatggcaatgctactggtagagacaatggtcataaagaggatgagggggtggagaaggtggagcccttaatggtgatggtggtggtggggacaatgggttagaaagaggataagaaggtggcaatggtaggtcaaaaggaagagactgggtagcaggtgaagattgacgaggtgaggatggtttgttagcaataggatctgcatgtgatgacccttgagttagggggcatgagaatatgatgatggtggctcgaccaattggacatcccatcgaggccaaaggatgaaattcttcatagcctgttcaagtgtctcaatacctttgggcccagggatgtctagcatgtcgtccttgtatccttggacgactgccgacacttctaccctgcaataatcttccagaattttgtgatcatggaactaccatcctagaatcgcaaggcatatggctacttcccttgtatgaatattgttaataccatatattataactagggaacacgacacaggccttgcgagtaaactagatagcagaccttatttcctgtagacacaatagagcttgggacgattggacactctatggaagatggatgagctaatagaattagttgcatctatggagcttgagtagtcatttgttgaacggacattacacacaccaaatgctacatcaattctagttgacgattcactagcat

SEQ ID NO: 99082 - DNA, 467 bp, Zea Mays
cgtgcttcagactgtctttttcacgatgccagcactttagtagtggtggccgagtgattatcagcgatgtcggggccttttagaggtgatggccgagtggtaacgggccgcgtcggtgttttagaaataacgaccaagcggttactggcgacatcggcgttttagaggtaacagccgaacgattactggtgacgttcgtgttttagaggtaacagccgagtgataacagaccgcgtcagccgctttgaaagtaatggccgagtgaagtcagatagtgtcatcgtttttagaaacaacagctgagtcaatttgagccgcgtcggccgttttggaaataacggccgagtgatgacatggcacgccagcgtcttagaaataacagctgggtgatgacatggcacgccagcgttttagaaataaccgctgggtgatgactgggcactttttagaaacggcatctggcccgg

SEQ ID NO: 99083 - DNA, 297 bp, Zea Mays
ggagctcttcgttctttggtacaactatgcggtttttaaaccatatcacaccttgatcgtcttccttgaaacacttggctactccagcctttatcttttctcgaatgtgtttcatacccagattatccttttgagcatcaattatcctttgcaaaatgattgactcaagctttaactaatttagagtcccttgttggatgatccccaggtttagctttcccatttcctgacacaaagtgttctcggaggtcttcgccataagacagtggcaggaagtcttacgactcaacgcatctg

SEQ ID NO: 99084 - DNA, 409 bp, Zea Mays
agaaactgattctcgagagtcagccaagtggtgcgggcagtggcgtcgcgttccatggccatttcagcaaggtccagggagatggagccggagatccaggacttgacaacgcagtccatgcgtgcccagtcggggaaggcgcgggagtgtcgtcgaggatgtggctgtccagggagtatttgccagtgacgagaaggaactcatcgcgccagcgggtgtagttgttgttggcgaggtcgaggacgacgtgaacgagactccggatgttttgcacatcgacgacctggagtggaggttgacgatcgcagtagcctcgtgaaggaggatggcgtcgtggaggcccttgtcagcaccacccgctggatcagagaggtgggactgattatcgtcgacagggctgctatcggcg

SEQ ID NO: 99085 - DNA, 647 bp, Zea Mays
gccttcttcgtgatgtcggtgctttagtggtagcggccaagtcctttggagccacgttgccgctttaggaataacagccgagtgattaccggcgacgtccacatttttagaagtaacagccgagtgataacgggccacgttggtgttttagaaataacgaccgagcggatactagcgatgttggcgttttagaagtaacagtcgagtcctttggagccacgtcgccgctttaggaataacagccgagtgactactggcgatgtcggcattttagaagtaacagccgagtgacaacgaacaacgtcggccactttggaaacagtggccgagtgaagtctggtaacgtcagcgtttttagaaatagcagctgagttatattgggccgcgtcggccgttttggaaataacggccgagtgatgacatggcacaccagcgttttagaataatagctgggtgatgactgggcactttttagaaatggcgtctggcccggaaaaccccatatgtactgcactgtcgcatgcctttgcattctgagccctagttttgcttttctgcatccagatcttctctgctctcttgcgatattgcttccgctccgctcgccagcaagattgagatggcgcccaagcggaagactcagagtt

SEQ ID NO: 99086 - DNA, 450 bp, Zea Mays
ttctcaccgccgttaagccatcgccgttgcctgccgcgtggctctaactttccaccgcatcgccgtaagccttagtggctccccgttgatcgccagagcaattgccacggcgctggacaccaagccactgcgccagtactcttcttcctcctccgaccgccgcgcgtccccactgaaattatcggccaccgccgttgagccctataaattgaagcccccgccagccccgcaaggtcatcacacacccagccaccgaaaagcactagcaatcgttcgtcagagagcttgaattttagttttcccccaaatcaagtttccgccaccacagaaccgagctcaccgtggctagtcctccacaggtttaatcataccatccttgttcttgttttagcatctctgtgtgctggtgatgctcaccaactcgcccaattgagctaagatcccatgaat

SEQ ID NO: 99087 - DNA, 639 bp, Zea Mays
cagatacaaaaaccagggaccgcagggtttgttttgtaaaataccaggacccagactgaattacttctacactcacatggacggcgggttaattttattatcctctgaggtttcttttgtaaaacagcttcggcgaaggggtacgggctgatttgcgtcgttggatctccattcgacagctcagattagatccgaaacctaaacgaaccggtacgcgttgagggtcgtcgatcaagcaatctacggtcacgctttaatgcgtgaaggggtacgcagcgttttaatcccaagcgtccaatctagcatcgaacggtcgcggcttagtgactcagggctctcatcatgagtcatgactgtccatccatgaatggacggcgcgggggcttctcccacctccgaaccaaacagcggcggcgccaaaccaaacaacgacgtgcgccatggccgcagaacaacaaacttgtacccacttgcccaacacttacaccggatgtgcactacatgtagcggggcaaagacgaaccagggtggcttgtgattaccaggacccaaagcgccgcagttgacccacacgtccgcgaggtaaccacgacgactacacagcgccggcgaggaaattctccgcgtcccgagattctt

SEQ ID NO: 99088 - DNA, 439 bp, Zea Mays
tctttttgaagaatcaaggtgcatccataaccctctaaagtttatgttcctttgagtttgatgaccaacattaagttaccttctctccctttgttgcaacctagtggatgccttttattttattattatttccatcatcaagtttgatttgtgatcttttgttcactttacttttggaaagttgttgctagagagcttcttctctcacagtgtgtttactagcaacttgaagcaaaacagcgagagtgatagcaatatctcggataaggtcctaggtcaaaatatgtgttggctacgatttggggccaaacactaggggttgtatcgctaagcgatgttctctgtagcagcgcggacagtccacgacaataggccggacggtccgcgaccctacaacatgagcgaatctcctttgctcgttggccgaacggttcatgct

SEQ ID NO: 99089 - DNA, 393 bp, Zea Mays
catattattttatgacttagcaggtagagtatttttaatcgaatcacacgatgcctacaaatttattacatattcttcacatcatttatacctcagacctatcctccacgtcaccactttgaccaaacaaaccaaattcatgacaaacaagactaacaatacttatcagtcaagtgttgacaaattctaaactcatttatctacattcattaaataagtgagcattaacaagagaactagtggtgtcccgctagcagcgagaacatgattattagcccaaacctcactacaccaatgcagggcacatgctttaatcatgaagacactcatagcgcatacatcaaataaatttaatctagtggggtgactattatcaaacaacataaaacccca

SEQ ID NO: 99090 - DNA, 462 bp, Zea Mays
gcttctgttcgggcatcttgagtgtctttttcacttttctttataatttcatgggccatctctcggccaccattcacctagacatctttatagaattttccgcccatcatggttgcttcgactgaaggatccttcgtatcatctacggagaaggcagctttggtctgggccaaggttttgatatggtcgcatccagccttctccaagatggctgaaattacccgtgcaccggaaaacgcgcaaacatccccgcgatcacttaaaatttcttcgaaggtctcagcttctccacttatccactcaacaacgccttcggggttgcctcgtatgaagttttctttagcagaataggcacccactttggcgaagctagcttttattttcttcacacaatccaaagatttttcaaagcacctttccctggatgcgcgaagttcttcaacatttttctccagatgattt

SEQ ID NO: 99091 - DNA, 493 bp, Zea Mays
ctgtcgaggactccgtgttattttaaggtttccctagggtatgtttcacaaactacactcgactgctataatcgcggatggtctagatcgtttagaatcagatctgacgactgcgatagaacgaggcaaaggggtatgtggggatctaatcgcagccatccatcctacgatcagtggctcagatgaacccaccaaggcagtaagcatctgctctaatcttattcgttcgtttttgatcgagcgaccctatctcctcctccctcacccatcagcaacggaggcaactgcggtggcgttcatgagctctatggcggaggcctcacccgtgcgccctgtttaagtgatttggagtccctatgcggatgcgtcgaggtgctaaacggaggggggaatgcggggaatcttaccatgtattagggcgcctgattgtgttgttcacggcgagcagcggcttgatgacggaggtaaaacaccggcaagcaatcaccagttc

SEQ ID NO: 99092 - DNA, 302 bp, Zea Mays
ttctgcctcagctatgttttcgaagaccagccttggtgccctaaacctgaggtcggcaggtagcacgaccttcgatccatagaccatgaagaagggagtgtttccatgcaaagctcgactaggttgagttcttaggctccaaaccacatacggcaactctctgatccactttcccgcgaacttttcattcttgtcaaagactttcttcctgagtgcttccaatatcattccattagccctttctacctgattgttggctcttgggtgtgctactgacgcatatttgatctggatgcttcttt

SEQ ID NO: 99093 - DNA, 1320 bp, Zea Mays
taagtgtgatgtggggaggtagctctgtttgtgtggagaaatttgagaaatagagggatggtctgtcaggccctcggagttacagatactgaaaactgatcagatctgaatttgcagcgcaagactcaacattggagcactataacccttgatccacgagtttttagtcttgggcttctatagcaaacttgtaaagatttgtttggtaagcaaatattattaactaaggttggcatgtattacttggaatctggtggatcgagggggttaaagttgggatgtccaggtggttgccaggtgcagtttcagaacctaaaatgtgatgctattgtgctgaattttcagaaaaactgtgtaatcctcttgaccttggaaccattcaattcttcattcttgggcttttgggggataatcattatataaaacttgaagatccattgtaggaggacatttcttctgaagaaggatatcccagtctctattttaaattcaaagaaaaggttaccccaagtcgcttggttaaatagaggtgtgctgaatttaatttagattagatgcagtggatagtttggattgggtctgtgcatatctgaagaagttcttttttccattttccctacctacgtgtttttaggctgtagtggataagaagggcagatgtttggagatggggttgctggagaaaaatgtgctgcccaggaaaaatggacgcactgcatctgaagccaggtggagtccaggaagccggtagaaacctgtgactcagctgtgggtgcgctcccctgtccaaacaccagcaaacctttaccctttgcctcactgtagactggtcttatgtggacataggagtcgaggccgcgtgctagctcatgcaaacctcagctgaaacacatcggcgcccagataagtgcaagtccggccgagtgctctttgttttactgtaactgtgaccaccagtgccgtaaaccatctctccctgtttgtgtttcttatctaaaaccgagcagagttccactgtctataccccacgctcctaaacgcctggtcatgtcagggtgttcagtctgatgtcgtcttgagaatctttgctcctcagtctggtgagcacgccgccgatgtctcatatcatcataatctgtcgagatcgatgctgttattattgataatcatctgttctgtattctttgggtaataataaagcgctgacagccttgggcagggtagattaggcgcgatatcgatatgaattcggaactaggtctgaccggtccattaaggaataggttcgcgaagcctacctttgctggagaagttcatcgg

SEQ ID NO: 99094 - DNA, 651 bp, Zea Mays
gttgatacttcttcgggagagaaagattttgaccttcggcacctgggtggccaggaactgtccgaggcagacaaggaggagctgaaataatatgggatatcttgtggctatcagctgagatctatgctcttcggtggggttgacgaagaaattttgggatgtatttgcgaccgcgtcggggcgaaaataatcggcactctgtctaagagtgttggtttcccaaagctggagtctgaaattagtggttaccgacggcaacacattgtcggcggcctattttactccaattttaaggtgaaatctttgtctagattcttgttatctttgtgatggattaaaatattctaaccttaacttgttttcgcagagcatgctgttaagtaaggcgctaagaatgcagtaggatttcgaagataagaagaatgaaataataattgaaggcttggagagcaagattaaagattttgaagcttctctcgaaaagaaagatttcctactacaatcagtcgaaggttcccttgcgaaagcacaagctgaaaatactaaattaagcgaggaacttctcaatgctcgaacaattttaaaggaaaaattagagcgcttcgaacaagaaagaaaagaactgcaagcaaaatccgaagctgagaagaa

SEQ ID NO: 99095 - DNA, 905 bp, Zea Mays
gggctcggatgtttttaagtttcggtaataatgtatttgatgtgtggtttgctgtgaggataaatttttaaaatgcagattacgtgttgaggaatgcatcgataggtgtctacgtgaaaaagtgtatttgttttatgcatatgatcggcgattgtgatagtcgaggcgaatggggaatatgataaatcctgttggagtcactgatgtggttgatgtcttgtgcgtaacgtggggacacgtatgtgtgtgtgtgccgtggtgtattatagtggtggtggcgtaagataattgattgaggtgtgcgggaatatgtcgtgatatggttatactcgcgacgaggaaagatgtatgtattgtgtaacatgacacttaggtcgctattatataatcatgtgaaagatgctcatgatggtcgtgtaattgaggagtgatgtagtggtaggcgagaagtaagtttagtttttcaaacggttagtggatagtatctatcggtgttgtcatgatctttgttgtatgacaatgtgatgcttcactttgtcaatcatcacattccatgcccatgggataaataaatgtcttgttgatcgattagaaatcttgtatgagtgttatcatagcccaataattattggaggcgagtagcgttcataagttggtccttgttaaaaattgaagaacaatccgataagatatgcacataagtgctttaggtccttcagtagcaaatgtagtcttatggagttttatgccatgtgttaatgcctctatgttagaccccctaaaatgtgctattttaggtgacttgtgggttaactaatttaagttgagcaatggttaagaaacactgattaatctgctccaacccatgtttttgagttgcgatgtctaaaatggttcgctaagtc

SEQ ID NO: 99096 - DNA, 304 bp, Zea Mays
gataaacatctgtcctagcctaaagtgctgccatcacaagaaacaagcagcagtggagtagtcccaaaaaaagaaggccaatttgttagctgctaaaattagttgaagacatccaaacactctagtgcattcaaacacccccagctaagcatagtgcaccaaacagctagatctaactggacacaggaaattaaaaataggacagcaagtcaacaaaccaaatttaaggaagaaatcagcagcatagaacaataaagtacaccttgtccataaaagggtcaaaagtggcatgttcagttcaaca

SEQ ID NO: 99097 - DNA, 804 bp, Zea Mays
gtaaaatcttttattgattacgtattttccaattacataatacaacgttgctctgatagttcttgctaagggtaaaacttcctgaggtgctctatattccatgaattctctacttccgtgccatccatttgagtaagccgatatgatcctgaacgagtgacctctgacaccatgaatggcccttcccatagcagcgataatttgtgccgtccttctcccgttagaattcggcgaaggaccaagtctcccactatgaaggatcgatgtcgtatagtcttatcatgatagcgcctcagggtctgctggtatctaactgactgaattactgtattcaatcactcttcttccagtacgtcaatatcttctagcctggtagctttcgcctcaggtatactttcgaagaccagccttggtgccccaaacctgaggtcggcaggtagcactgcctccgaaccagagaccatcaagaagggggtgtttccatgtagagctcgactgggttgagttcttaggctccaaaccacataaggtaattctctgatccacttccctgcgaacttttcattcttgtcgaagactttcttcctgagtgcttccagtatcattgcattagccctttccacctgaccattggcttttggatgtgttaccgacgcgtatttgatctggatgctccgtttttcgcagaaatcaaagaattcagagctagtgaaattggatcccaggtcggttatgatgttattcggtatcccaaacctgaatattatatcttgtatgaattccactgccttggctgaaattaga

SEQ ID NO: 99098 - DNA, 569 bp, Zea Mays
cagttggtcagtcgtcatcttcagcacgagcagctgaaaataaagatgcaaatgaattggttgtcgcaggcacaagtaatactggtacaaatgctgtagcttctgttgatatagcgggccttgatgatgaggaggaggacatacaagaggagatgattggaacaggaaagagacaaaagaggcgcacatctattgtatggaagtactttaccaaagaaactgtgaaagtggaggtgaatggcaagaagtttgagcagctatgggcctactgcaactttccaaaatgtaagcagagatatagagctgagtctaatcatggaacaaacgcattccgcaaccatctgaggtcacatcacagtattgtcaaaggacaactagaactaaaggcagaaaaggatcatggaaaagatgtcaccactattcagccttttaggtatgatccggatgttagtcttagaaaattctatttagcagtaatcatgcatgagtacccattcaacattgttgagcatgattattttgttgatttcatcaagtcgttgaggcctagttttgccttcaagtctaga

SEQ ID NO: 99099 - DNA, 465 bp, Zea Mays
gaatgatgtactcagtgctttcttttgaagcttcaggagcaggagtttcgaccttttcagatgcaattggcactgtcgccttttcttcaactacggtaggctctgtctcagtgggcactgaaggcccagctttggcttcagcttgaacttgcgcagcttcggcttgcctagtttcggtttcggtctgcgatttagtttcggctggaacgactttctttacgagaacaggacttaagactttcgtcatttccagcacaacatctagcacgtttcccatccttctcctcttaggagtggcagcagaagtcttttgtatcttcggcagatctgcctctattggaaggctcaaaatctctggcatcttcattgtttcttcaatttttggcttttcagccttatcaactttcgtttcaaccagcttgactgtaagcaccttcggcattacaggcggctcttcagtgctat

SEQ ID NO: 99100 - DNA, 366 bp, Zea Mays
gcggaccgaccctcttccatgccatggctcaacgctaggcataatttaatgtgacgtgcatagcattgatgatgagagcagtcctttagttagacacggaatccactcgcgttgttcattaatgcctcgtctaacccccgtcctaggttacatctcgcccaaccccatgcgcggtgcagcgattatttggggggtggatttacccgggcaggttcctccttgtatcctcttcttactcatgggccctcagggaccaagggatccgctctccgacatgatggtggacatattttggtgctttgagatctcggatgccaggtacggtagcatcccattttaggtctactgagaattgatggcaagcaa

SEQ ID NO: 99101 - DNA, 1837 bp, Zea Mays
cgcaacattcttgggatcaaccgcagtgccctgctcataatcacatgccccaggaaagccacttcggacagccaaaatgcacacttcttcaacttgccatagaactgattctcccttagggcacctagaacgagacggagatgctgctcatgctcagcctcgatcttagaataaatcagaatgtcatccaggaacacgaccacaaagtcgtccaagaactcatgcaacatcctattcattgcttccataaaagcagcaggagcattagttaagccaaaagacatgactatgaactcataatgcccatacctggtgcaaaaagtgatcttctcaatatcctcctcacgaatcctcaattaatgataaccagagttcaaagcaattttggagaacacctgggcacccctcaactgttcaaagagaacctcaatacggggaagcggatatttattcttgattgtcacttgattcaaagcgtgataatccacatatagccgcttgcttttatccttcttctcaacaaacaatactggggaagcccatggagacctgctaggcctagtgaaaccgttagccagcagatcatccaattgccgcttcaattcaacctgctcctttggggccattcgatatggggccttatgaatgggctacgtactcggaatcagcttaatcttaaaagctgcatcgcgctccggaggaatgcctggaagctctgccggaaacacgtcagcaaagtcacacaccacccggatgtcctgcacccgcaaggcagcctcaccctccaccaccatggagaaaaagattcccgacttccttgaccggcgatccggaagcaattgcgccaacaaggataacgtgaacttaggagaacttcccaagaataccaactccctacccgacggcgtctgcaataaaattgtcttccaaaaataggatataactgcgtgatactgggataaccaatccatacccaagataacatcgaatgcccccaaggaaatcacaaccagattggccgaaaagacctcatcagcaagaatgacgaaacacccctgacaaactgaacagctactaatggagccattagcagaactaaccaaaattgggtgacccaacctctgcaccaaaagaccagcccgcgacacaaagtcctccgaaacaaacgaatagctagcgccagagtcaaaaagagcatgggccacaaacgaatcaactgaaatcgtacctgtcaccacgtctccttgctctctgccatccgcagtgggtagcacataagctccggaaatacccgcagaagaggaagctcctggagtgaaatttacaaaagaaccccactgagccgccgggtgaggcagacgcggagctccaaactgagatggcataggggtagtcggtgcaggagtaggcgcagccagatactgaggaaaaccctgcaccagcacgaactaagaagtcccaggcacataaaactgctgcggaggaagtggaactgaaaattgctgctcagtgcttgacatcatgttgacagtgccctgagaagaggaggaagtcactggctccgatctgagcttcccattgggattcctcctacacaccacatccttgtggtcttgactgcagattgaacacctgccattccactggcactctgcacggcgatgcgcatcaccacaacggaaacacaccagccccagcccgggcttaggaacagcctgaaacctctgagtacttcctcccgatgtaccccgagtcagaggatttgccacgatagggatggtggcgctgatgctgagacttgcccctcttgtgggctggacctccagtgttgcccctc

SEQ ID NO: 99102 - DNA, 341 bp, Zea Mays
aattgttggtctcaaacaggaagaaggcaaactgaaccatatatatgcaaaacaaaaatttgcactgaagtactattactatgagatcagaaatgcttttcaagccatataatcatagtgttggctgaacacttgtatagtgatttgtatcaacgactcctgtgatttgacaaagatggacacctaccagatcttaaacagtaaataccctggaagcaatgaaacatacatatttacaatatcataggtacatcctggagctgcaaaataaagttcgaccaccagctaccagcgtcattcgtcaggcatcaactagtaccccaaaatacagatcgatactg

SEQ ID NO: 99103 - DNA, 372 bp, Zea Mays
tttcactctcatgcgaggtatcgcaaagctaagagcttcatccctagaattgtctcagaggatggaaaggttttcactgcccaggaggagaaggcggacttgttcacggatttctatatgaatctgcttggttctgcaattaatagaggggctgcggttgatttggaacagcttggagttcccacatttgatctagaagctcttgacagccctttctcggcggatgaggtctggaatacaattattagtcttcctctggataaggcgccaggtccagacgggttcacaggtcgtttttacaaggtctgctggtccataatcaagattgatgtcatggctgcaatttcctgtgtatgggccagaaagtttgcc

SEQ ID NO: 99104 - DNA, 611 bp, Zea Mays
aattatgtcgtaacattaaatccttccaatatggaagcctaaaaaaatagacctccttttccatatgatagtaggctccccttccttcttttttgctttctttttatgttggcaacctttcccatgcactgtatgcatattctctgtttgcaataaaacttcctctctagaaagtggtctaggcgctggcctgtcctcaactttaccatcaaacgaatgtagatcaaatctatatggatggtttgggcctagaaatctacggtgtcccatataacaattttttgtaccttgtttcaatcgtagagaacatgtatatgagtggcattgaatacatgctacttcacctgatgtagtacatgctgcaatgtaccctaggcctggataatcagatatggttcatattattgcagcacataattgaaaatactcatgctttgcagaatcatatgttctcaccccttcaacaaacatatctagcagatcatcaattagtggctcaaaataaatatctatatcagtaccaggagatctacggcctggaatgagcaatgagataatgaaattcgtttgcttcatacacaaccatggtgcaaagttatatgggatgagaa

SEQ ID NO: 99105 - DNA, 592 bp, Zea Mays
tgagtcttgagtccgagtgtagctgctgtttttataggagccgctgctgggagttgcatgatgggctgggttcttttgttgctcggatgttggactgcaggggagtacgggaatcgcggtcgcaaggaggaggatagcttgaagcttcgtccaaggaggtccgaggagtctgtttggcttttggccaaggtccctcctttcggccattgctttccttttccccccaattttgatctttagtattttttgaggagatatgatctttagtattttctaaacttgaaaaacttgtctggctcttagggttgatgcatatacatgtgttgctattacttgcttgctccttgtcgacgatggtatagatagcagtagcactgtacacaagcagcaagcaacaccccacctccttgcattgactgttgcattttttatgaaacctaaagttgtgtttccatctgattgtaggcccatttgactctagtctccggtctctatctccactccaactacagccggcccgcgtctcctcgaccatcaccaccttgacggtctccgtgaaggtatttttcttctttctttgatgcatattatt

SEQ ID NO: 99106 - DNA, 671 bp, Zea Mays
ctaggagaaaccccagaaagcataggagcagcagcaaacacagggtcatagccatataaggccttgaatggagaacaccccaaagctgtgtggtatgaagtattgtaccaaaatttagcaagggccaaccatttcttccaagtattaggtgcctcatgaatagaacagcgaagatacatttccaaacattgattcactcgctctgattgcccatcagtttgagggtgatatgcagtagtgagagccaatttgatccccaaagcctgaaacaaatatttccaaaacaaactagtgaacactttgtctctatctaaaacctaagactttggtgttccatgcaacttgataatattgtcaagaaacacctatgccactccaacaacagtgaaaggatgcttgaggggagagaaatgagtgtatttggaaaatttgtccaccacaaccaaaatagtatcatatccctcagatctaggtaaaccttcaatgaaatccaatgtaagatcccgccaagccccttaaggcactggtaagggttgtaggagactcggataatgcaccctttcatgcttagcatgttgacacacctcacattgctgcacaaactgaaactgacttgagccctttccactagaacaatatattgaccctttggtaagtggcctcaccaccag

SEQ ID NO: 99107 - DNA, 325 bp, Zea Mays
atgagggcttcagcaacattactttcttggtgcatgacatcaatgttgtgcacaagaatcaatgatggcatataagggagctcccacagaccacatatatgtgtccagttgtggtccactccgaatccttggtacttgtcccccttttcatttaggacaaggttgttcagctgagcatatatttctgctgcgttgagacgtttaggcggtcctttggagaccatgatgtttaaagtttttcttatcgctcctaaaggggtgtttcctgggcaactagcggcgatggcaatcgaggtaagtgatctttccaccatgagcaagacgg

SEQ ID NO: 99108 - DNA, 369 bp, Zea Mays
tgtttgttacataattttctccgaccacactaagggcttcggctaagcctaagctttcgggatgtttggttccagctagcacccagcgcgccaactcatctaagaaacctctctggaccttgccgatggaggagaatcaccctcaaaaaccacccggttacgctacagccataaacaccatgcacctagtataatggcactattaaggcctttcttgtctttatgcactcggttacaaactcttctccaccaatcaacaaaagcgatatcctctacatcaggggagagatgaccaagcccgaaaggagataagaagctgtgccaaaattgctttcggatgtgggaggcctcaaaagctaaaaggcgagt

SEQ ID NO: 99109 - DNA, 294 bp, Zea Mays
atgttgtgaaattgacaagtactatgagggaggaacatgagagggcatggaagcattatggttgcacgcttatgtcggatggatggtcagatagaagggcaggcatttgatcaacttccttgtgaatagtctagaagggacatacttcttagagtctgtgtatgcatcaagtgaagttcatgatgcatttatgttagctgattaattagggaagaaaattgaagagattgggaaagaaaaagtggttcaggttatcactgataatggggctaactacaaggcagcaagtaggat

SEQ ID NO: 99110 - DNA, 356 bp, Zea Mays
cgcatcatgaaatttgtgggacatatagctggcatggatattcttgctttgcttgactcaggtagttcccattccttcattagtgatgctgtgggtgccaatttgccaggagttacttctatagacagtcccttacaagtgcaagtggcaaatgggtcacatctttcatgccatcatcagttagtgaatgctgattggtctatcagtggtgtttcattttcttccacactaaaagtgttacaattatccaattatgatctgattattggaatggattggttagagaagcacaatcctatgttgattcattggtcccagaagtggctggctattcctcttaagaattcaacggttac

SEQ ID NO: 99111 - DNA, 597 bp, Zea Mays
aataagtgcgcaaaatcgaagtctccctcaaaagactacctgtgcaacgaccgactacaggtgcagctggaccgacataataaacacgctaagacttagtgcacaagtcccttacggacaaggccggatcagcgaaggcacacagcctcttcatacaaattatagttacatacgtacaacgagggcatcacaccttacattggttcaaccttcgggataatacccatctccctatagttaaacaacattatcctcagctcctcaccctcaaaaagacttcgcaattccccctcacctacactcgccccagctggcgaggacaacaattcatggttgccagtcctgtccacacgaagacgaccaccctccacctcactcactctacgcttcgccaccgcccttcgacgcttacacccaacacttggaccgggaacttcagcacccaccacacgcggagaagcctccgccgcagccacatccaatgccgcaaaataatccaaatcatcatccgaagactctttcgtccacaccaccgaactcccagaatcatcagactcaaaaaacttagacacagaatcacccgaatcattttccgca

SEQ ID NO: 99112 - DNA, 282 bp, Zea Mays
cccgcagagacttcgatggtttttacaagcagattttgagtgtcgcggagacagagatggaggcggaggactttgttggttcggtaacggaggctgagattgagaagggtgctgctctacgtgggggccacatccacctcaactgtgtttttagcttgatgggtctcgagtatgaggagcacaaggccaagccaaagagagggaggaagacgtcgaccggggttcccgcctaatcgcagacatcgactgagacctcgtcggcctgctcaaaggatgtggatg

SEQ ID NO: 99113 - DNA, 352 bp, Zea Mays
gccgaaactagtaagtttattgcactcgatcaggaagtgagggatagagtcagactcgttcctctaacattttttcctgatatttccaagagatatagaggttcttattgctagctggagcagtcattatgccatactatcttatcatttcttggctgactaaatagaactgcatagttgatctttgcgtgcatgtgaactctctgaattcttgtcacagtgcaaccggcgttctgtattcatatatcactgtgtattttaatcattgctctagttgctggataagttaagttttgtcataaaccacctgtctcagtcttccatttaagtatcatttgtatgcacatggcgc

SEQ ID NO: 99114 - DNA, 410 bp, Zea Mays
tgttggtggatcaggggcgggggcacacggacggacggtttagatttgatggatgtagatggacggtgtaaatccgtggaaggcaaaaccaggggagatatactaccctttcagcattaatatagtagtatagatatttgtgggctcattcacggacccgttaaatggcgtgcggatccgaaaaccaccgcacatggcctgatttctcgattgggtattcacggacccgttaaatggtgtgcggatccgaaaatcaccgcacattgcctgattcctcgtttgggtcgattggatttgagtgaaactccaccctagatgttatatagcatatgtatgtgtaaatatatgttgcattattttggttatgctattgatgatgtagtgattggaattggattcgaccaccaact

SEQ ID NO: 99115 - DNA, 998 bp, Zea Mays
gccacaacatataatgaaatcacggaaacctctcttcggattaggtatactagcagcaaatggcgacctttgggcctatgagaagaagatcctggcaccacagttctttgtagaaaaaattaaggttctaaagtattacttaacgagcccataatataactgcatcaccagcctaagcctaactgtgttgttcttacaatgatagggtatgatagggctaattgtggatgcaaccgttccactgttacaatcatgggagaatatgctcgatggcacaggaggtagtaaggagatctatgttgatggatacctgaggaacttttcagcggatgtgattgctagagcatgttttgggagcaatttcgtagaaggaaaagacatattttgcaagctcaggcagctccaaaagttgatttctgaacaggatacacttgttgggctgtctgcagtgtggtaagtggacttttgatccgttgagagatttctaatgcgatgggaatggacaccttgactggttattaatcttgttgttctattgcaggaaatacttgcctaccaagagaaaccgggagatacaaaagctagatcaagaagtccggttactaatcctggatctctcaagggaagacaggagcagaagccgcagcaataatgccggcacgcacgtgtccacatacgacaaccttctgcatgccattgtcgatggtgcaaaccagagccccagctactgcagtgcccctgaagatttcatcgtcgacaactgcaagaacatctactttgctgggtatgaaactacagcggtcactgccacctggtgcctgatgctccttgctgcacacccagactggcaggaccgtgctcgggctgagattcgagaagtgtgctgtggacagacagcgatggacatcgacgtccttcgtcagctgaaaatagtaagagactctctcctggttcctgtggctacaaacaaatcattcttttggtgacgcacactaact

SEQ ID NO: 99116 - DNA, 511 bp, Zea Mays
gagaactgggacatgccgaaggagactgtcaccaagtctagcgaaggtgacctggtccggctgaagtatacattcagatatggggataaatttgatgaaccaaacgacgactggctgaaatgtatcgaagctacaagtgatgaactacttggatcatattctaaagcagaagataatgcattatccacagccttcggaggccggggaaaaaagagattgaacagagtttttgatgccattggctttgtttaccccaactatcgctatccgctgcgaggacagggaaagaagagaaaaactgctacttcggccactccagacgagcctgtgccgaagggcaaaaagttaaaggttcttacccaccggccacgctatattgaaccggctgtggtgcctgagtttggcggggaggcttcttcagctgctgaaccaagagaacctgttcctcctgcgcagaaggctgaagagtcggctataatgctgaaggcaccttcggttaagccagttgaaa

SEQ ID NO: 99117 - DNA, 642 bp, Zea Mays
tgggaggatgattatcagcaacgttcataggaggaggggctccgaagatgtccagctccccataaagacctccgtcatctgctcctgctacgccagctcccatctctgcaactttcgatggcatgtttgggtgtagctggtcatacaacacatgcacctcctcgtgcagaacatttttgtatgcctgcagattttccaaggccacgcttagctcttccacctgggcttgggcagtcgcctcataatcccaggttatggatcataaattcacagcccaatcaatagcccgatcatgttctacaatatcacgctgcaaatggtgatgggaagactaacacacgcatgctccctgcctccatggcgcagcttcacagtcaggcgttcaactctagcctctaggtctcctatgggatcattgctcccactgctgctcccctcatgtcgaggagccaacttgtgacgaggtacaccctaaggtccggtcactttccgaagggtggtctttgtgcgtgctatgtctctataagaggggaagaatacttagtattgtttaaatatgatgcatgcatgatcctacgattatggaatcaactagttgttaatcccataccttctacctataacctaatatttggcactctt

SEQ ID NO: 99118 - DNA, 790 bp, Zea Mays
tactctgaaattcaaacttcaggcagtctgacagtccaacttcaggctcatttatctctaaatttttcttaacaactgagctcacactctttagcaaagttgttctccattaattggtctacaaacttgttgtggtcactttgggcaaaaaccttatattttaaaagatacagggctccaaagttgaaccaacaaaactgaatttcagacttggctctatagtgcttaagaggtgatttttgcaaataagcccaaaacttagggtttaacttgcaaattcacatatttgtgaaccaaatgactttatatgtttaaacatagtagtttttacactttagtccaaaggttcatcatttttgcacataagcccctagggtttggtttcagggttttccagggttccaattagggtttctggtatcccaggggtataaaagtgattcaagtttattcttggggtcattttatgacttttaccctaaagcttttaggttttctcaacttgggttaagttttacccctttaatccctgtttagggttaaagcttcctatccagggtcctagttgtaaaacattaaaacaatacaacttgtttgaaatttttgcctagtgaatgcactctaggtgtatcaaacatatgctatgccaatgcttataatgccatgctcaagttttagttatagtaacaccaggggtgttacacattcctattcaaaaatgattgctaaaaaggaaaccagtccttgtgttactaacaatatctctcttgagcacatttatgaaaatcta

SEQ ID NO: 99119 - DNA, 367 bp, Zea Mays
ttcggatcaaaaagtttctgccgacctcagcggacccgagggccaacgaagcccaaagcccacagacgacgctacggcctcgccttccgtttctgcacgttccttctctggaagccgaggcccgctcgctcgaagcggctgttgcgccgctcaatttcaatccggaggctgaagccacgggggagaagggcgcatggtttccgcagcgcgcgctgcatcccttctggccttgttgcggcctccggagcgcggatcttgacatcggcgacgacaacggcgaggaggaggatcttctcacggcactgcgaccctgcgagatggtaagagctcgcgctccagttcccaccctcttcatttatgtggcgcg

SEQ ID NO: 99120 - DNA, 685 bp, Zea Mays
aattgatgaaggtatatctcaaagttcttcaaaacctcccctatcatgtcattcaaggggaaccgaagtcctgctttgaagaagctcttgaaaatgacaacttcgtcttcttttggttctagaataatttcctccccaacaaactagacaagcttgctttcagcctccccgaaataaccaagttttctcatcataaccatgtcatcctccattacagtagacttcctaaactcaatgtgactaggctttgttgggttcaggatgttgttatcttcttcactctcattgtcacttttgcctctagctacaatctgttcagcttcggtattggaggcaccttcggcagcaacttcctctgacacaaccagacccgaccacttcatcacttccgaaattggtgctatctcagcggtttcggtctcctctccttcatgagttaccctagcggtggatctcaccctggccatttatgttttcaagttctttgagccgaagttgatctcaggtgatgaaacgcttgcatggaaatgcagcgcaggaagcttcggctttggttaaaaattttaacagcacaacaacgcgatagcaatgaatgctctatggtaacttctcaccaactgtctatttatatagtgttgcagggggagaaggtgaaccgccatacctgtggcagaaccgcccaaat

SEQ ID NO: 99121 - DNA, 520 bp, Zea Mays
ataaaacagctgatgaacagaaattcaggacccaaaaggatgcacaaccaaaccaacagacaattaaccctagaacctgttgttgttgcgagtattatggaattccttgtcgccagatcagtacaaacgaaagtgaaactacaaaacagaagaaccggattttgttttctggtataaaaagacaatggtctccccaagaacaactaatagtagagtctctcatacctaatacactgcgagttgatgaattgcaaagtattataaaaaggaaacatcacaaggatgcccagccccaagaagaaatacatgagtgttacattgatggatggactattacttgcacacagtttcagcctcgtcgtcgcatcaggtccaagaaacaaaaagggaaacatggaaaaagtcaaggaataacttcaagaaaagcttgctatcaatgtggacgtgaaggtcattactttcgtaactgtcctgagaagagttcactacagatcacctccgagatgaagctatctcagtc

SEQ ID NO: 99122 - DNA, 385 bp, Zea Mays
gatgatctgaccatgtacaacgtgatctgagtgatccgtgtgtgggcctgtgtaaggtcagacggtccgacaaaatatgttggacggtccacgataaagccagactatacatgaagtctctcggacggtccaactgtgtccagagcctgtcgcgtgcctggtggcggccgttgtgttgatgacacaaacgtgtgcattagcatgccatatgatggctgggccaagggtgacccatttgtagtcgatgtgtttggcgtgggtggctccgtattagactcatgcgagggagaactaggtgcacttgatttctcatatgaacgtatataccttttaatagattcgtctacatattgctttaaccgatctcctcgatgttccatgaaag

SEQ ID NO: 99123 - DNA, 512 bp, Zea Mays
ctaagtctgagtgtaagggagcaaaaaagtttagaagatctagccaaatgaatccaagagagataagccaaagatagaaaaactttgactgttgcagcctgtatggtgcaccggacctctagcaataggttcggtgtgcacgagaccagtcaacggatcgggaacgtagagaagatgtttttggactttggcagattggcacactagaccaagttcggtgtgcactaaacttccctttagacttaacacacaaagaggttgttttgtggatctatgcatgacaagccaagagatatgttgcatgcatactcatgctccggttagtctatacgactcaacccaaaacgctacttcattgacaataactcctcacaaacccaaactaatggacacatctcaatcttatattcacaaccttttttctatttcgtcatattgagccatctttcttctatagtaaccaacgcttttctcggggttactcgtgggtagagaacactagtacaaataag

SEQ ID NO: 99124 - DNA, 372 bp, Zea Mays
gttgtggtccttgactgttgtattgatttgggttccattagatgattgctagcatgcattattgactttaaatgccgagcgtgaaatgtgaatggtggggcatcccttataatctactctattgttgaacgatgccttgttcaagttgttgccgccttgttgttttaactcttcgttcttttttgtttccaatctgaagggtttagcgacaaatacccgaaggatacaagttatataagatgcttttgtgctaagacgtgttttgtttttggaaaacaaggcaaggaggaaagtctcttaaatcaaaatagaatttacatcaggacaagatatcctcccccaccattggacatttatttcacttaacatcca

SEQ ID NO: 99125 - DNA, 617 bp, Zea Mays
ggaaggtcccggatggtattaaaggttgcatgactagtacatgcgtgcatcatcagttggcattgacaccattagtgtgcatatgccagaccatgcttttattggttcggaccaaaaggcctttgttgcattcgagaacatgtggttaatgatgagccttcagagactcgacatgcaacttgtgacggtgtttgcaatgtaagtgtcgctcatatttccacgtatatgtgttattattattagcgagccgtataaattttcaatatctgacacatgcacgtgtgacttgtagaatgcaacatgatcaacatgagatcctttacggtaccaagcccggtgctagtgccgataaaaggattgggtatctcaacccaatactgatatgcgaggaaagccacactttcagaatcgagaaagacaatgaagagttaaagggaaagacagacgaagaagttgaggagcgtctaaagactatgaagaaggagtttgaaacaagattcatcacctacatagcaaacacaatgcttaaatttcaagacagggaagccataatggccctgtacaactttaagtaagtgttattttgcataaataagattaataatttcaatacacat

SEQ ID NO: 99126 - DNA, 769 bp, Zea Mays
tcgccggtcccgccggtcccgcgaccgcatgagccttttcatgttggtcagaatgccggccacctccagctccaccgcatccacctccaccaccgacgccggcgtcgcatcctccttgggcgcgtgatcatccaccttcgatgccgcctcctccatgtgcgtgtgctgcatggtatggacgaagcctctgctggtgatggtgctgctgcggcggtgcgatatgactacgagcgagcgagcagattgctttatggcttcctgcgtagtagactgggctctaaggaggaccaatgcaatgacgtggccgtgcgtgcggtttaatataggctggcaggcgagcgccacgtgtcaccgccccaccccacttgaacgaactcacgctgacgctcggtagattcatccgggagtggcatcgttcgttggtgtagtggaagtatctctagtctgaacgctggtttatcattatttccgggtattcatccggcgattatcatttctcggccccgctccatgcgtctttactcgtgataatttgatctttttttcatctggtccttatctctttatttgtttatgcgacacaacatgaagatgtggaagacgtgagaaggttaatttagacacatcttagaaacatagtatattcattaaaatatgagacacgacatgaagagagatgtgagaatgtaaatttaggcacgtgttagaaaaattgtaatattcattaaaatgctttcggctacaaatctttctctctcaatagatttcc

SEQ ID NO: 99127 - DNA, 344 bp, Zea Mays
cggcgacacacccgacgacgtgaggtcagcgacggtggtggcgatcggatcggcggtgggcgttggttaaggttgcggaagcgaagcggatcggaaccgcgatagataccatgtaaatgtgtgaatgattgattgtattccaagatggtgaactggagtacatatatacgcgcataggaggcatgcaagcctaccatagatgacgcaatcacatccacaaatcaaggcctaattacatcatgctaacaggcacctccatattctagtagaggtcttatgcattagtgtgccaatcggttgtgcatatttcatacatggcaagccagcaaacttctaaatcaagc

SEQ ID NO: 99128 - DNA, 528 bp, Zea Mays
ttgtacgatgacatctgttgttcctatttcaatgacgtccccttttatcgtactgttagaggttgtagctatataccccactgccggattagtcagcctttggggccgagtggttcgacaatcttgctgggcttgtgcttgtggaccagattgaggggctctcaatcggtcttgtaccggaggcgtcaacctggcaaagacagatgactggggtggcccccaagcggagtattgtggtgtcccaaaaggatatggtggcataccccacatctgattcgggatatatggtggtggtggtatgtatgtataatgatatgacataggtgtgtatgggagtggagttgtccatgtatgtacgttaggtcttagttggacattatgacctcccgtcctttccgattggtgaggtggtccaatcggcctaacctgctgtcgctcctgggtgggtaagcgagaccgctttggaggccgatcactggggccagccttctttttcacgtatttagacaataattgatcaaatatcgg

SEQ ID NO: 99129 - DNA, 582 bp, Zea Mays
ctctccgtgcaaaagtcgcctaagggtgcagccggaatagcacaacaagtgcattaatcgaagtctcctactaaagagtctccgcgcaaaagtcgcccaagggtgcagccggaatagcacaacaactgcatcaatcaaagtcttttatttaaaagacactccgcgcaaaagtcacccacgggtgcagccggatcaacacaggcgtacgaatacggccaacacgccacattaccatacaaattatagttacatacacacggcgagggcatcacatattacataggctcaaccttcgggatgatacccatctccctgtaattaatcagcattatcctcaattcctcaccctcaaaaagattccgaagatccccctcgcctatgctcgccccaatcggcgaggacaacaattctcgtttaccaacccggtctactcggagacggccacgctccatccccatacgacggtgcctaccactttgcgaaaagtcacccacactacgttttcccaccacccttcgccgcctacaaccagtactcgcactaggaagttccccggcaccctccacacacggtgaagtctcc

SEQ ID NO: 99130 - DNA, 724 bp, Zea Mays
caaggctcggaacgctttgttctcctgtctctcgcttgctgaatttgagcgagttggacatctgcctacggctcacgagatctggtccaccctcgagagattccatgagggcaatgatcatgtaaagaccagacactttgagacgtaccggcgagagtacgagaacttcacacagttggctggagagaccatcgacactatgttctctaggttccagtcaattgtgaacaagatgcgtgccaacaaggcacagcttccctatgacgatcatgagagagcgctgaaattactacatgctctagatcggagggtttgggaggtgaaggtctcggcgatcattgagtcgcccaactatgagactctcattgtggacgagcttttcaacaagcttaaatccactgagattgaccaccaaactcgggccaagattgagaaccctggtgcacccaccatggccctggtctctggaggtggttctgcttctaacccctcacctgctacgtttgctctttcttcgttgttgaccatcacagaggagcaggtggagagccttggggatgaggagctggcgcttgtggcctgtcggttcatgtggttccacaacaaccgtatgagccggcggtgtggcgggtcgaaggatggatgctacaactatggtgaccccgactacttcgttgccagctgccccaagaagggcaagtcaaaggctggcccgcgcgaccac

SEQ ID NO: 99131 - DNA, 661 bp, Zea Mays
gtccaaggtggctgctgttgaccaacagctccaggagtgtgacgaatttctgcttgaaattcgtgatagattgttgcatgcctagattatgaaaggcaattacgacacccatcatcacgccgtggagatctaggtaggctaatgggtttggctgcgtcttcaacaccgtcttgcagcatcactgagtgataacgcttaggacaagctggctcccaaatactatgggcccttccaagtgcttgagtgcattgggcctatcgcctacaagcttgctctgccaccacatgcccgcatccataatgtcttccatgtggttttctccaaaaaattccagcgacagccgccaacagagtgtcatctcggccagtaacgattctgtgtgctcgcctcaaccgtggagtttggaaggtattggtcagctggatgggctaatctactgctgacgctacatgggagcaactcactgagctcaaggacgcgtcctcttcgtttcagctcgaggacgagctgtttcataatgcgagggaagtgttacgggttcttttattaggaggatctaccaatgctaacctaggccagaaaagacctaaaccagcaccgcagcccctgctgcaccaggagaactgacacctggaaaccagctgccgctgggggcttagag

SEQ ID NO: 99132 - DNA, 860 bp, Zea Mays
atagcatgaggcatggctatgatgatgcattttgaccggtatgttgcctcttacaataaatgcaatgatgaaagtcttatatcaacaacacaacaccacatgcaacttagtctaaggcgcacatggtgccaaggtcgtcctgcctcggggaatccatggggcttcgatctttgggcgcatgatcctagaaatgctaggttagcaccgagatgagatctttgtgggtccatcttctactcacaaagttatggatggcattttgacaacgtctgggggtatgttttccccaaactctgatagtggcccctaggcctaccataggctcaatgactacatgtgggaccattcttctcgtaaatgccttatagaacgggtctactgcgccatgaggatactgtctactttagccatttcaaccaatgaccaatgtgtcagactatagtcatgttgcatgactctcaagttataagggtcatgcaatgcttcagatgttgtgcctggtagttttaagggaaggggataaaggtgccttaaatcttaggtgtgtggtcccatctttttattcactacttcgcacaatccacaacacttcctatcaagcgcctttctctcccatagtcgttgccaaccaaccgtagtcggtccgccctcgattcgtcatgctatcatggtggctacctcctcgttggaatcgttgttgagcatgtgtttccctaattaactagtagaggttggacaaggtgcatcggctcctcgggtggacctagggatgacaatgggtcatagggagcaaaaatccgcccgcggtcactcccgtgaagtctacctaaacccgcctacgatctcacccgccggtgcaa

SEQ ID NO: 99133 - DNA, 277 bp, Zea Mays
gttagcactaacaaaaggctttaattgtgaaacttgaaacaccagatgaatggcgttgttaggtataagagaaagttggtaggccattggattgaatcttttgataacttggaatggttcaaaaaatcggaatgacaaattgtgactcctgcgttcaacaactgacgtctgggaatccctgttcttaggattaggcggctgcattccgccaccccgttagagtttactctccaacaataaccatgaataccacttcagacatgaatggacaaagcag

SEQ ID NO: 99134 - DNA, 368 bp, Zea Mays
ttggccacgagaaacgtacccatcatgaccggctctccctccagtgtagtggccacttgtgtataatagattcacccatttttgttcatattcttgcccgttgcattattttccgtgtttcccttgccttggctggaactctccgggttctgctgattattggagttgttccgcttcggatatgggtagtctttgatgaaatgtccagacttcccacaattgaagcagccagttgatgaactcgagagtgcggggaaacgagcaccaagggcactcggctgagttgttgaggtgggggcagtagcagggtggatgagtataggctgtttgaagggatagaagggtggatgaggtgaagaacggttttg

SEQ ID NO: 99135 - DNA, 468 bp, Zea Mays
gaattttaaaattcgcattgttcagacgagcagtttcaagcaagtatatgatttatgttttcatgtgagcatttggttcaaactttgagaaatctttagaagacacttgatatataaagatgaattatgatatagagaaaataagtcggtttgcataagaattaattagaggttgacacaaggagattctgagagagaatgcggattcagattaagtatttggacgtagaccgactatcgagaaagcggattcggacaccgattggataacataacaactatcgagagtccgaataaatgagtctggacgggagttgcgagacgatattgactttcaaatttgcatttgctccgagaaataaaagttttaacaggctccaaatttggttgttcttgagatcgaataattccaaatttggtgaaacattcatgagtaacttgataaatggagatgaatgtgataaagag

SEQ ID NO: 99136 - DNA, 417 bp, Zea Mays
attttcaaaacgtttatgagagcctttgacatttgattccaccggccttgtttcgcagctactgtactaatggcaagaggaaaaagcatgcacgcatgtgggagggagggagacagtggcaggagatattcacgatgagcagctaaacaagaggccggagatgaatgaagggagaagcacaccacatgagtcattggccaaaccaaccaaccaaccaagcaagcagcaaatgttaggtccgggggaggaaaagcaaataaatggatgcacatggaatcaaacgcagttgggtgggcgcggggcccaccctccttttcagttttaaagtctcccgtgtcctttctcgtttgagattctatgaacctgttaaaggcatgcatctttcagccatccatcttttcggaccccgcccttttc

SEQ ID NO: 99137 - DNA, 566 bp, Zea Mays
aacgcgtggtgcacatctcagctcagccacagtcggtagctcttagggttttaaaggttaggagggaaatgaagttcgggatgacaactatcaagagccaactgaatctgtaaagcaacacttagacggcggagatctcttctcatgatctgatggcagtcagatggtggttcagtttttctgtggcgcgaagcggttttccgtttttcttgttattcttccaattcattgtctcctgtattttttcgtttcagcggtttaatttgctcactgccccttttaagctgttcttatgtataagacattgcctgttgtaatcccagatatgccgtcattgagaaattaccccgttttccaatataaaatgagttcagatttccacctttgtcttcaattcatgttgatttctaccattttatcctcaaattatgcatctgcgtttcggagggggagccaattatttcgctgtataagcgttatcaatttttcaaaaaacactaggcgctaggtggtcaggctccactagtttgtaagcatctcctaggcagttcgctcatgagttccat

SEQ ID NO: 99138 - DNA, 737 bp, Zea Mays
gaattttcaaatactcacctagaaatattctttcattcttaccttaccactttctggtagtcccttatcttgtagaattgggtaacatagtgcaatatataggaagttggggatcaacgaaggttgattccataattattagaatatgcatgcatcatgttaagaatatactaataaatcttcccctcttatggagatatggcacgtacaaggaaaacaacacgcaatgacccaattggtgtgcctcgtcatcagctagcccccagacatgaaggaagtagtagtggcagcaatgacccaattggagacctggaagccaaggtagaacaacttcggtcagagctacatcaccggaatagggcatgagagcaggacagccagcatatagctgaattgttagctgacatcagccgcttgcaatatgagatttcagaacgggattcggccattgattgggccgtcaactcacgttcgatcgcttgggactgcgaagcaaaagctcgagctcgtgtggcagagcttagtgcggctctccacagcctgcaggtgtactataatactttacatgaagaagtacatgtattatgtgctcgactgcacccgaatgtgccttccgacgttgctgcaatgggagctggaccctcgagaacagcaaatgaaggacctgatggggagttggacctttttaggccccctccttccatgaacctagctgacgaacggtctcctgcagtagg

SEQ ID NO: 99139 - DNA, 444 bp, Zea Mays
aaaaatgattgcaccaccaaaggtcaaaattttcttttggctttatttatatagtagatttgggaccatagaacaaaagcatagacacaacctgcaagatgataatcagtgtatgttgtgagcaaaaggtatcgaggcgataggtcacatgttggacaactatatcttctctagagagctttcactatgatctttcacgatgtatagtggtcatgctggtgccatcgatggatgttcagttggtgcactggtggttggattaccgagagctatcttctctagagagcttttgctacgatctttcctaatgtccagttagttgtgccggtgccattgatggatgtttaattggtacgttggtggttggactgccgagagcattttagcattcaaatcatgaaggtcttcgacagtctcattgtcttcatcacttggtctgtttgg

SEQ ID NO: 99140 - DNA, 386 bp, Zea Mays
gctagatcgtctaaaggaatcattctctctcaaaggaagtatgttcttgatctattgacagagacaggaatgcttgggtgttgtccatgtggctcacccattgataaaaatttccaaacttgtgccgagtcaggtgaccttgtgaatcaagaaagatatcagaggatagtggttcggttgatatacctttgtcatacgagaccggacattgcttatgcagtgagtgtggtgagtaggtatatgcatgatcctagaacaagacatatggaggtggtctataaaattctgagatacctgaagggaacccctggcaaggggttgtggtttagagcgaatcaacacctgaatctggagggttactgtgatgctgattgggcaagcagtag

SEQ ID NO: 99141 - DNA, 353 bp, Zea Mays
aagataagagaagtgaggaccctgcactaggtggtttttacgaagctatggaaaggaccaatgttgaaaatattactgatgaaattttagctgggctgtctggagattcaagtgacagtgaggattttgatatcgagagtgacaacgatgatgtcgaagatcggccatggaggccaagtcatgttgtgtttgggaaatccactgttaaaaaaggacagagtgaagcgatgaagggtaaatatttccgtgatacaactatagtgagggccggaggagagaatactgttcctcttcctgaagctgacgaagtggttgttttcaaaggttttatgaaggctggtcttcgattccct

SEQ ID NO: 99142 - DNA, 278 bp, Zea Mays
gccttggaaggaggcaggttccaggccgagtacgcaacaggggcgccaacatttgataccttgcctctaagtatcatttcgagccggctcaccaagtccacagcaggaattcttctgttggttacccgggttgagtcagctaggcctcggtacagatatgccgggtatgccctgtccttcagtggctgaatattcttgaagacaaagtcagcaaccacagcctctgcagtcagacccctctccttcaacaatccaacttcagctagcagagcccctgc

SEQ ID NO: 99143 - DNA, 685 bp, Zea Mays
cgagtttcgaaggccgtagtcatcagttgatcttcttagttgcccaaaatctcattgcacatagcctcaatcatttctagccactcttagcaaggctctttgaattgtttcttgaacatgaagtgatagggcaatcgaacaagttcattctttttcttttctcctttcagcttcggcatattccattcactcaacgtcggaaataccccataggctaagaattcttgcaccagatctctagtgtcgttctgctcagtcacaactctaaattctgccgcagcctgttggcatggtgaccccgacgacatacggcacaagggcctagtcaacccgtagctcaaactcagcgggctcaatactaacgtcttcagcttctcccttttattctcattagctttaacatagaaccactcacttttccagccagttggccacttggtgcggtagcttagcaccggggccttcatatccttgcggtaagtgaagttgtaacagccaaaattctcatgaagcccatcttatctggccttcgtctgataatgtagctcatgtactcggcagaaggcttcagcatttggatccattccctggcttcaaagggcccaaatgaagatgttgagcctaacgatagcgttaggagttagctgatgaagataaacttcataattattcaaaacttccccaa

SEQ ID NO: 99144 - DNA, 336 bp, Zea Mays
tcagtcgctcgacagttacctctaaaacgccgacgtcgtcataagtcactcggctgttacctctaagagcgccgacgtggtcatcagtcattctgacgctgacgtggtttcgtcatcactcggacgctatttcaaaagccttaatgttgacaataatagctcggccatcacccctaaaagcgacgatatgacgcccgagttactcagttactattccagaggaatcaacttcacaaataaggcaaacagaggaatgattcaagaactctaagttatgccacaaacataacagatagagaacatcacgggcaataaatatcacgacagagatcaact

SEQ ID NO: 99145 - DNA, 487 bp, Zea Mays
aacgatgcctaccccgagtttgccatgtcctcctccacgtgtatacccattgaatcgaagtttagggctcgattgcatgtgatcagaccgggcggcaatggcgccgccgtgccatagctctgcgccgccgcgctcaccgtcggggttggggggagaactttgccgccgtcggttcggcgatgaacggctaggattagatgttaacgtaccccttcgctgcgattcgtcatggcccttagatcgggatcggacggtgcgtatagggctttcggttgaggatcggccgcaccattgatttcggatccaagggccacgatggaatacctgttctgggtagcagtgatctaatcggcaccgtatagttttgatccaacggcccacatctaaggataccccttcgcggtgtatcttttgcaaaagagcccctctgctttccagaaaccaacccgccgtcctcattaacagtagactgagtctagggaatttt

SEQ ID NO: 99146 - DNA, 350 bp, Zea Mays
ttgtgtcaagatacaagatcatcaccagaggcctgattagaggcacatcgatttagttttcagcattttatacaatgaacaacaaaattcgatgattagatagcacacacaatcaaatggacgtcaaaattgtgcttcattgatatgcagtttgggactacaaaagttattcctagagggaaccaaaagctagaccactatcttactactactatcctaatactattctacatatacctaaggtggtgacacttcaccggtggcaaggtggcggccttgtcgccatcactttgatgtggcccccatcaacgttgttgtcatcgttgtcgtcatccttgtactcctactcg

SEQ ID NO: 99147 - DNA, 891 bp, Zea Mays
tgagcgtcgacgtggttaactcgtgctttgccctggtactgggtcctgctctgctgactgttggaggggagtgccttggaggcaggtgccgaggtaatcttggggccattcaccgagttggagtaggtaggcccgagtgccttcaactgggggcaattattcttgaagtgactggggtctccgcagtgccaacaggcatttgctggcggttggttgcttgcaactgagggggcctaaaaggagctctgactctgctgactgtaacgtgacggagtgggtccagctggtctattgaagcttggtcccttgggtggaagcccgatggatcgagctctctggtgacggtcttgctgctgagctcggagaacctggaatttcctcttgaggtgccctttttcttcctcttttgccctttccacttggatggctttgttggagaggtgcgagaagttgagggaatcttggctggcgaggatggtcttagccattttagaaaacgggccatcttcctagtttcggtgctgacatcgtcaggagcataacgagccaactctgtgaatttgtgcacgtactcactgacagatcttccaccttgagttagttcccgaaattcatcttccttgagttgaacgatcccctggggtatatggtgctcacggaaagcagtttcgaattctgcccgagtagcgtccctgacggccgcgttgaaggtatcccaccatgctagggccatcccagaaagttgatgagcagccaattgaacacgctgattttcggggcatctgatggcttccagtttcctcttgatcgtgcgcagccaatcgttggcatcgaggggattgctggatccagcaaacgtgggaggcttgagtctcagaaattctcccgtcc

SEQ ID NO: 99148 - DNA, 298 bp, Zea Mays
ggaactgcgggaacactagagtaggtggtgccaagaagttgggcaccaatgacggtgataatggggaattgatgacgtggatgtgaatagatgatgcaatggagggtggggcggcgagcaacgtggtggtggatggcacgatatgccattgttggttgtggtatggcagtgatgtcggagtaagttggaggcgccattgtgccgtacctcggcatcctgtagagaaagccctagggcatggtgcttgtcgatgaggacatcttggctctccacgatggttagccgtgagaggatggcg

SEQ ID NO: 99149 - DNA, 431 bp, Zea Mays
caggtattaccgtcaggcttaccctagtttagtttaggtttttcatcctataactccagataattgccatacgaaaaaaaattcgctgtcctagaaggctagaacccttgtttagcctttgcaatttccttttcagtttggctttgttcagttcgtgttcgtggtcgagtcgtgttgctggtttagggtgtatcttcgtcatagatcaactgcaccttcgccactatcccatccaccattatctagatcacaagtcgatccaccccattaatcgatttgccctcgctagccgccttgtgtgacttctcgccgcgccagccctagataggttgcgagccgccttgagtcttctgcctgcaccgcagcccttccttattcatctggcacaacctattttgttccacgaaagatttgtgttcggctgtgattgc

SEQ ID NO: 99150 - DNA, 427 bp, Zea Mays
ccctcgggtccactagaaggttagaaggcctcgcaaacggttttgggtttactatctcgcaaggccatcccttcgtgggccaggggagaactgctggtggaatgggccgacgcaaggaatgaacaagcgcgggccaaggctgttcgcggggttttgagcgttacctgaagctctgatctgattctcccacacgaccaccctggacatcggaactgagtgaaaataagtcggcaagattataggaagataagttcggtcggttcactattacttaggcatgcaacgttatcgtacacatatgtaaatgccccacggtcggatatataaggcccagggggcaccccatcaaaagacaggtcatccatcagccatctactttattctctagcatccttcatactagagaatccccctgtaaacccaccac

SEQ ID NO: 99151 - DNA, 370 bp, Zea Mays
tcactctcatagtagatgatcttcttgatacataagaaggttttctcttgtacattgctcgacaaggctataattgttttggatgctttcctccaaacttttgcaatgtactgaatgcatgaaggcccctagtgtgggttttggtgatcgatgaacacaagaacatgtgactatagttttttgtagggttgatcatgaagggttagtttattattgaccctgctagcagtctcttttaataattaagatctcgcacttgatctatatgtgtgtgtcatgcggctcatctggatatctatttgaccctagatagtttcacacatattgcaaggcttagagaagggtttgaagaaattcaaggcaagagaag

SEQ ID NO: 99152 - DNA, 499 bp, Zea Mays
ctgacagatcttccgtcttgagtcaattctcggaattcatcttccttgagttgaacgatcccttggggcacatggtgctcccggaaagccgtttcaaactccgcccaggtagcatctctgatggtgacattgaaggtatcccaccaggctaaggccatcccggaaagttgatgagcagccagttgaacacgctgattccgggcatccgattgcttccagctttcttttaattgtgcgcagccaatcgtcagcatcgaggggattgctagatctggcaaacgtgggaggcttgagcctcaggaagtctcccattctgtcttgtggtcttccaccattcggacgttgattttccagacttcgagtgaggacctcgatgagtcgggtttggttggctagaacttgggctagatctaagggtagttctggaggtgcggggaggtgggtctcactttcctctctaccggcttcccttttagctctcaggggaaaccctgctcca

SEQ ID NO: 99153 - DNA, 492 bp, Zea Mays
catcgcagggaaggtgatggcctaagcgccgtcgatcgaatgaggggcagccacgatttgaactagcatatcgttttgggccatcaaaccacatttgtcgatctgcgatcaggtggtcatagttacatcatgtagttcattaaatctgggtcgtcgatcgttgatcgatctgatgggtcgtatagtataccgattcagtacatccaacttctaatctgggccatctgttaatgatcgggtgggtgagattccaaggtacctcctcggtcgttacttttttctaaagagcccctcaattttgttataatcaacccgccatccatattacgtgtaaagaaaatagaaaataaatgaggtttttgctgagaggaccctggaatttaatttcagtataaaaataaatccaaataatcaaagaaacttcaaaatttcatatctctcgtgttttaactccgattttagtggttcttgtgcctacaaatttaatgcgat

SEQ ID NO: 99154 - DNA, 561 bp, Zea Mays
gtgtgagggctgggcatgtcccaaccagggttcaccttcctgttttcactgtagtcaaaaacagattttgagacaaaaaaatgacttccatatttttgaattttgaactagaatccactaaaaattggaccagttttcgcaccggcttagtaacggtaacggagaaaacatcgaaaactgacgataccgtaccgggaagtaaaacccttgtcccaacaccgacttgttcgtttggatgtctgggcggtgtttagggcttggttgggcgtgcaaaaacagccccatagcgacatagcttggctcgacggatatgtctaaatcaagcgtttttgtgggcctgattgggcgagtgtagcgctggttcacgcaagagagagcagatggatcatccagacaactaaacaactgctccactcaaacatgctttcgacatgatgttcctatccaaccgtccaaacataccctatataatatatgtcgctggagttagtcaagttacccactataccattcattactgaaaaatataatttcatttgttttatttccttcttcctcaca

SEQ ID NO: 99155 - DNA, 1026 bp, Zea Mays
ctgttaattaccggtgttcatagatgccatgaatgcactttagatgcagtatcacaatgattgactgcatgccctttcccggtagtgggaacttcagcggtattgcatttctcactgttaaggtcagtttataagccagtttttctttcttttttttaaaaaaaaataagattctttttcatttggggacaccaacttattacatgttcaacattcctattccataaccagacatcgatctgacttgttaacagacctgggttaggaacgtagtatggtcttctatatgatgttagatgcttcagcggttcagccttgaatctgtatggtcctaacttcaattttaattgcacataaatacataatcatagaaatgaattgaaatatctgcaatgactgctgcctcgtaatttttatcatagagctttaccaaactattcatttcactatcgctatgtttcaaaggtatctgtgttgtctgacagactattcttgttcagactgatgctgccaaatagagagcattaaccatggatgtgtaagcatatacgtccttctgtgctacccctctcattcttttaatcatgggcagtgacattcttgatatccatttcagaggaggatcttatcctaaaacccagccttacaaacggaaccataaaaaagaagattttgcatcaaagttgataatagggattaataggacatgttggaaatataccatgggacgtaacaagtacgtatgttggaaatctactatggggtataatagctgacgatatgaaaaagctcttctctgattgcaaaatgtttgttcatccgatctggaactgacaagaagatagacgaaccaaacggttgtgtggatgttgatttttttcctgatggcacatctcttgatgttcatcttatatggatatttggcaccttggccgttgttgttggagttagaacatttgtaaagggtcctttgtgcatatagcatatatggaagaggtacacatgaaaattgaccccccaaatcac

SEQ ID NO: 99156 - DNA, 457 bp, Zea Mays
agaagacgaagctatgacagttgcctttggtgctcgagggaaaaggaggttgaacagggttttcaatgttactgggtttgtctaccctgattattgttttcctatctgaaggcaaggggaaagaggaaagttgctgcttcaacctcttccagtgcgccgaaggaaaaaagggccaaggtcttaacatgtcggccgaagcctattggggtggccaaagtgccgaagcttgttgaaagtttagaggctgcctcgttagccacagaaacaactcctatgatgccgatcgaagctagtgcaggcccggtaaaagagctggaatcagaaaaggcagcagaacagccaaaggtgctgagcccaccagccgtaatagggttgctgaagccatcaagcattacaacagcaactccaaggaaaagaagaatggctagcgttttagatgttgttttggaatccgtga

SEQ ID NO: 99157 - DNA, 1072 bp, Zea Mays
atttcgccacacaggaccaaacccaagatatgaaagcacttcaatcaagaaggcccaagagaccgagtcaaatgctttggagatatccaacttcaagagcaaactagagactctcttgtggagagttttaattgaatgctgcaccaacataaaactatcatggatcgatcggcctctcacaaaggcactctgattagatgccaccaactcctgcagatagggtcccaatctattagcaagcattttggtgaccaatttagcaaaactatgaattaagctaattggtctaaaatctcttgcagacaaggcatcaactttcttagggagaagagttaaataagctgaattcagcatccccaacttgtgagtatttccttgatggagtgaattaatggctgccaacaaatctgatttaataatatgccaacaacatttgtagaattttccagtaaacccatcaggaccaggagccttatcagatgggagagcaccaatagtgtcgcgaacctccttctcagagaaaggtgcctccagggaactcaaatcaatagcgtctatgtggcaagcagctaggttaagagaatatggtctctggatattagaacccaaaagattggagaaaaaatcatccagaacctcctgcatttgttcatggctggtgactgtcctcccttcattctccaaatgggaaataaaatttctcttcttgcggaagcgagcctgtaggtgaaatttttttgtgttggcatctccatctctcaagtagtgcaaccgggaatgcaagcgtgcaactgtcctttccaaagaagcaaggacaaggcagtgttgtttcaatttctgcagcaaccatagctcatctgaggacaacggcctgctgtcctgcgccatctccaacctgtgcagcacctcgcgagccagccccagctgagaattgacatttccaactgcactatgcccccaggactgcaaccttcgcgctaatcttttaagcttcatcgacaccctctccagagggcaagaagactgaaccggttgatcccatgaagcagcaacctcctccaaaaaacccggg

SEQ ID NO: 99158 - DNA, 545 bp, Zea Mays
ctcgtgtccgcgcttagcctttgcgcgctaacaaaggtggcccgcctgttagttgtcttccccaacagatcccgtggcacggcaaactcggagcggccgacatccgggacttcgcgtggtcctcggccatgccgtttcttcagccggagcatatgcatatatatggaaaatcgtaggccgccttgacccatcgacttgacctacaacaccttcgataaagaagaaccatacaaggagaaacaacatagagggagaaaagcggatctgccaccgtcgaaccgggcatacgctctcggtggggtctcggccttgggtgtgggggattcgactcattccctaggagttgctcgttgtcttgccctacccgattggatcacggagcaccggagattgctcgtcgtcgggagacttcactgctgcaccacatggcgtctcggtcgggcttcctgtgtcgctgtttgctcacggtaaggactccattcaatgcgccatgttctccgacctgcttatgcatccgattgtgtgggaggccaggtattagggcg

SEQ ID NO: 99159 - DNA, 319 bp, Zea Mays
gtcaacaaaaaaattcggcagcacctcccctgcacggggaggtttccaaaacctgcaaataaaagtaacagcacgatggctgacattcacacatatatcaacggcatgatggccgacaatcacatttaatcgacatccatattccccatcacacaatcatatctaatcggcatacaactaaaactagtacccctacacaatcatatctatcgccacacaaacattatatagaaactttatacgtactgcgctactgtgctactatcgcttttattgtgaagtggaactacttatgtatatcaacaaatgtgaattagtg

SEQ ID NO: 99160 - DNA, 631 bp, Zea Mays
ggctgacaagcgctgacaaggcctgtatgggaatgtcgctgcctctgttgcgacggctattcttgcggatcagcggaatttcttcttcttcctcctcttcctcatcaagcataccgtcggcaacctgaacatcgtcacaaccttcggcattgtcctcgaggatagtgctcgtcaggccatcgctgaggaaaatgtggaggggccagcatcttcctccaagcatgacaaccgctggagtcaccttttcttcttcttctcctcgataggtgcagctggatggttcactcggcgtgaacgcttatggcgagcaccttctggtttctgaatttcctcgtcttcaccaaattcttgtccaatcacaactgccatcggctcagtgcgggtagagtcagatgattcttcggccagcagtctaagaacaacattcatctcagcatcattagtactggacgacatctcaaagtgagtctgcttctcagcctcgggaagattttggaggggagcaattaaggcctcaatgtcctctaaagagggtcacactctatggaccgggctgccatctcgaataggaggattggaaacaaaatcagagaagggactctgcggaggcaggttccatgcaaagtaagat

SEQ ID NO: 99161 - DNA, 357 bp, Zea Mays
ccggatggagccgtcgtagccgccagtggccttcgcttcaatccgagcgccgtgtccgcacgcttgctgccggcgtcactgccatttttcgagaagggaaaatctttgtatcaagataatcataagttataacttttttgacaaataaaaagcccgacttatacatcgcactagatacacacggtctaaagaaaactaacaatccaatcattctaatagtaatcaatcctaagactagatcgccacccacaagcctcggtaaaaaactccttgaccacttgctccaaaccttgacaaatagctaaaaccaactcctgaaagatagacttctctagcacaacccaggaacagagcccg

SEQ ID NO: 99162 - DNA, 313 bp, Zea Mays
gggcagggacacgcaacaacaaatttactggtcggttgacggtccccgctggtccgaaacgccgacacatagatagggctgctcggcgtcaattgcatcttgacccgaattatgatccacaagagtgtgaggtaaagtacacatctttagttttgtatgtgtatacctaattagttgatttcacaatgtctattacacatgaataggaggtcttgtctcaatatcgtgtgatacatgatgaaatcatggcacattaccaagatgcaccggggctgaaccaagacaaagacgcaccggtaccgaccgatataac

SEQ ID NO: 99163 - DNA, 497 bp, Zea Mays
gcccaccccgttggcagagtcacttgccttcgcagctagatcatcaacctcagcaccgcctgcaccagcagttcaagctcctacaccgggaggcgacgacccagatgactctagggacgatgatgaagatgacgacgacgaagaagatgacgaggagaacgtcaacgaggaggccaacgatgttcagtaggactacttcatggggtttgggcctgtcaccgaacattacacatcaatgttcgagacagggcacttccccaacctgatgcaagacgtgctgcatgcgttgggaacctacgtccgacccttgtccgagacaaggcgagtgtgcgagcctccctgggcttgctactacatcactcgcatccatgtcagggtgattgatgtaggggatagggggttcaggactctatcagctcatgagtccctaacaccgctatccacctacgctgctttggtcagcgatgctgccaggcagcctttatggtctctcagcc

SEQ ID NO: 99164 - DNA, 737 bp, Zea Mays
ttacacactgactctttattagactcaacatgacaaggaagattaaagctgctgataattttctgaacaatgggggctgcaggatgacccaagcggctatgccatttgtcaaaagatggcttgtttactccaagagcattttatggatggtggtgctgctggtagaggatacagtcccttctgacatctccctctaaggattgtgctccttgtgtctcggtcctttataaggaagaaattaggatgaaattcaagaaatacattattatctttagcaagacgatgaacggaaacaagattttttgtggcttgtggaatatgcagaacatggtttagattatgatgtggggtacgaatagtagttttaccatgatgactaatagtcatacctgctccatttgccgtatgcacctgatcactgcctatgtacttctctctgatggatagcttctcaagttctccagttatgtggtcggtggctcccatgtccgtataccagttcgtatcaacagtataggagttcatagcagtagttgcatgcttgactttaggaacataattttcatcatacttgtgccagcatctgccagccgtgtgtcctgtcttgaggcacacctggcatagagggcgatcatcggagttgtcgttgttggagttcctgcgcgtgttgctgcttccttgccgaaagttgttgtcggatgaattatagctctggccgccacgctgggttggagcgt

SEQ ID NO: 99165 - DNA, 612 bp, Zea Mays
gtgacacgaacgtgtgcatcggcatacaatacgatggttgggccaagggagacccatttgtagccgatatgtttggcgcgggtggctccgtattggattcacgcgaaggaaaactatgggcagtaggtttcctatatgaaagcgcccattttttaatagattcatctacatattctttcaacagtttccctcgttgttccatgaaagcatcaaaagatggatctggggtacttactacgggatctgcagtgctctttgcggaggcgtggatggtccgcaacagagggttggacggttcgtgacctgggtgcagaagcaaattctcttctacacacttccggacggtccacgatagcgtatagagtattcttctccgcaaagaaccctaaaactcgtcccgggagagatcccgtcgaggggtagagtttcaaggtgctgctccgggtcggtaggccacccgatgctcttctaatcagcatagagtcgaagagaaattgttgtggaagactaaactaaatctaaacctgaggctaaattactcctactcctattaattggaagaacgatgcaaataagcaaatctttttatttaatagtcactctgtcccaccg

SEQ ID NO: 99166 - DNA, 300 bp, Zea Mays
cgattcgtgcctggtaacgcgcagataacaatgttggataaaagatcttggcactcgatgagcttggacccggccactgaactattcactgtacccacttgttgtatgactaaccgcggtgtcctcgccggagttcgccgtcttcgtacctgcgccacctgcctaggagcattaccacatcgcagtgaaccgtaatagggagtccgtccatcaccgggagccttgcctcagtaaaagccatgttagcgcttcccagtgatttcccctctctctggtcgacaacgcgccttctccaaatta

SEQ ID NO: 99167 - DNA, 572 bp, Zea Mays
ggtccggtgccacccaccggacagttcggtgtgcactggacaatctgaccgaacgagatgctctcgggaaaaaaagacttcatcgactatatttcaccaaacgatccgcgtagagtgcatgacagttcggtgtgccagtcggccaacggctacttgacacgtcagccagaaccaacggtaaacaggagcatcgaacagtccagtgccacccaccggacaggtcggtgcccctagaagcagaaagggaccaatcaacgattcgtagccattgcactgtgtagtgtctgatgtgtaccggacaatcaggtgcacccgcggatagaaggctaccagggccttccaaatggagccccaacgactcctatgtatcttcgggctataaaaggacccccctaggtgccatggaggagtacacaagcacactttgagcaatctacaactcctagacttcgcaaccacgctgtcaattcattagatagatatttgagcgcgttcttgagttgtgactctgccgttttgattcttgcgctctcttcttggcttgtgtgcatgttgttgctgcgattgtgttc

SEQ ID NO: 99168 - DNA, 531 bp, Zea Mays
cggagaagaaactttccttggagatcccaaagaaaactagagtagattagagggtggcgcagccgcccgcatcccaagcgaagatgatctcttacaaaccaaaaaccgggaggttacctacccgaagaactccgttgtccacctcgcccacaaaggagtggacacggatcactagaaagaaggaggcaaacgtcccgagtaaggggacgagacctcgccgagtcatctttccggcaccttcgccctcaaaggaggacggaaagaaaagtgccgtcatgaaatctcctttctactctgacatcctcttcatcagggggagattggagtcgtctcccatctccgacgacgagccaaccatgcaaggggaagaacctccccaacgtgaagcgctgcgacagaggaacagacgccggaatgtgcgacgacatcacgaggctggggaacggacccggcatagcctatatcctgggacgaagcttcagaagtgggagaaactcccgacgagtgagtacactgagaaagacagaactc

SEQ ID NO: 99169 - DNA, 520 bp, Zea Mays
attgcaatgaatctacagctttagaatctctagcttttgcttcaaaataaatattcaatattcagctgcaggaaataattacaggatgtaacaatcttgaatcagcttcatgtgaatggaagagtatactacaattaaaccaaagcaggatatcttttagcctgtttcgacaatctccagatgcccatctttttattaattgttgtcttgttatcccttattatcttcacaaactttagttttgagcatctagaatcatagaaacctgctgtcatagcaccctttttccctacctgatcacctgatacaagaaccagctaactacagattcaattgacaattttagaattgaaataacaacgacagctcaaatgtaaaaatccaagactaccatcaagcgtggtgcaatgtagaccattgctacgtgcaactgtagtcgcaatttccagatctcggcatctgactgtcctgccaaaacccaaggtaaacataaagtcaggtgttcatttcaacagtagtc

SEQ ID NO: 99170 - DNA, 304 bp, Zea Mays
tcagtggctgaatattcttgaaaacaaagtgtgcaactaccagtttagcagtcagacctctctccttcaacaagccaatttcagcaagtagaaccctggcttcggttatctccaagtctgtgggggattcagtccaactcggagcacggacatccggctatctccccgaccgaggggggagggacttgccatgattctctacaataaaccactccaagcgccatcctttgatgttgtccttgagtgggatgtcgaggtactctgtcttcctcccacggcgcatctccaaactcgcaccacccac

SEQ ID NO: 99171 - DNA, 420 bp, Zea Mays
caaagtgggaccgcatcatatcatggacaacatcgtcggtgccttcatagtaggtgatatattcccacccgtcttcatcatgttctacgttctgtcgcacacatagccacatgtactatagcaaactgaagagattggaacgatgttcgtggtgatgcctcactgcgcggagtaggcgtcgctgctgggaacatcatggatgagaaatgggagatggtggtcattgattgggatatcagtggttgagattagataggggataatgatttggcatttcaattccataccattgattttagactgagcggtcacgattatgtcggacgggaagcagttcaggctgagcatctaagacgttggatcaggatctagcggcccagatagatctacgattataatgtctatggacatctttctaaa

SEQ ID NO: 99172 - DNA, 379 bp, Zea Mays
ctcgattgggcgtcgtcccaatgaagcgccgtcgtagggaggtatccccgttgtgtcggccgagcgagggatagaagatggcccttggccgagcgatctgaattggacggacaagattagaacctaggtatcggtttgatcaaatcaatctggggcattagatccagatcgtacgtgagcgggttgatctggacgattttaaatccgaggcatccgttcatgatctgatggcccctgtcgcacactgaatcattataagctagatctaatctaggccctcggtttttgatcgaacggcctgatgcgaagaatacccccttcggtcgcgtaaacatgcaaataaaccccccctgattccatagaatcaacccgccatcca

SEQ ID NO: 99173 - DNA, 572 bp, Zea Mays
tgtaatttctacatgtttaaaatgtctgaacactttagagagaaccaggatgtccgaaaaaaatagtaccatgcttttgctatgcaaagttctgttgcagttgcagagcatatgcttacagcaacagaaaacaatattccactagctagatgccataaatgtgatactaaacaaaagatatcgtgaggggaagaggtgaaggaaaattaccacaaaaaaactaaattcaagaaataattatgtttcctgtgccaaatcttctatttaggtttcagtagttgtgccaagataaaatcaagaaatatgaagcactgaattcatctgcattaatctttccttaagatccaatccaccagctctaataaatgtcagctcgacaagagattcaggatctaaacctccacctcgtgagagcagttaaagatgaatggaggcatgtgtacaaaatatatgaaacacaaacaggttatgaatatctgctactttatttatcaatctctctacaatgttttagtgaaagaacaaaaagcctttctgatcattcaaatgataaaataatttctgttattttg

SEQ ID NO: 99174 - DNA, 912 bp, Zea Mays
attttttctagattgatccttatattttaatatgaggcatcaatttaagggattgttggagatgctctaagtaaaccatattctcatcccacatggagtcgccagcaccttgcacgttgtgccgctgcgccaacattgcccttgcgcccctgcctcccttctctggcgccaataagccaacaacttccttagtcccttgttgtcctctcttctatggtgcaactccagtgcctcccttcctcggtgtcccttctcatcgtgtctagatctctacctccgactaaaccctaacagcagcacgagtgattcagtgcccccctcttccatttctagatgcagcgatgccctataggtaccttgtcggtgtttcgaacctatctccgacaagtaaatctgtatgcgcattctaggcttcggacagtgtgtatggtgagcgcaagatttatacttgttcgggcagaacgtccctacatctagtctttggcggcttgcgctaccggcacctttacttctcaacgcttgtagtaggggttacaagtgagaaaaagagggaggagaggctctcaagtctcttgtgtggaggagatggagctaagggctacaaagctggagtcctaactaagtcttggcttggcgaggggctccgacctcttggtcctcgttgatgcgtcctccttcctttcttcggtctgttgactttgtgttcgtccatccatcgtcttggggccaacatcctccttttataggccaaggagggggttggccagccgtggctttctcaagtagtcaccgggcgatggtaaaactgagcgttctatcccgatgaatccacgtgcgtccatgagcctcgggtcgtctgggtgtcttgtattctttatggcagacaacgtgggcaacgagaggaccgagcgc

SEQ ID NO: 99175 - DNA, 444 bp, Zea Mays
gagatgggcctcatccaagattctcttcttgagatcctcatttttaggaaccaccaatctactttcaaaccataatacaccctttccatcttggcagaaacatttatatttctcagtcttctgacggagattctccttgataatctacactcccttgtcactgagctgggccatgatgatctggtcttgcaaagctggctcaacagaaacgtgagacaaagcaccagaaggaattacttcaatattcattttgcacaactcatcacacaaggtgtcaatacgagaatccatcagaacacaattgcactgcaacttccgactcaaggcatttgctaccacattggcctttcctgggtgataatgtacctctaggtcataatccttcatcagctctagccaacttctctgcctcatgttgagatcagcctgagtaaagatatactt

SEQ ID NO: 99176 - DNA, 394 bp, Zea Mays
tcagccgatccacctcgcagagttggtcggtggagagttggccaatggagttgatcgacggagagttggtcagcgaagttggtcagccggtccgtcttgtagagtcgctcggcacagacttggtcgacaggtgagtcattttaaaagagaccataggcagatcctttaattgatcggaacacattacataaagatgtagagtaggtgataatataggtacacaaataaacccttttcggcagagatcaacttgggcttcataaaacggttatgcgagagaaactagggggtggagaagctacctttcctttactagacagggtgataatgggcgtcctgtacatggcctaaactattcgtccttgtaatccacgagtaataatcttatcttcgg

SEQ ID NO: 99177 - DNA, 391 bp, Zea Mays
tagattatattgaggaaaaatgtaatgaaatacttggtaactatagtaaacctaaggccgaagctttgcaacatgcttttgtggctcaaaaaaggcagtgattaaaccgtgtttcgatgctattggattcttctatcctgactatcccaacatggttcatgattcgaagaagaggaagagaaaagtgactacaaagcggagcaaggtcccgaagataaaggctgagttgacacctcaggcttcggcggaaattttggtaaaaaaggtttcttcgacatttactacattactcataaatttgttgtattaatctcttgctatttttcatgtgtttttgtcgtttttaggctatacccgaagctaaggtggcagctatagttgagaaactccc

SEQ ID NO: 99178 - DNA, 593 bp, Zea Mays
gttgtctgtcgtttcaccagatctagcgcttccctgattcctccccttcaactgtagctcatgggggtctattgcagcgcaagggacacactatattgctactgtcgtagggagaggagaagcgtcgtgcgctgcagatagtcttaggaacataagtgtatgtataacttggcaccttcgataaccttagccccttcctaacagaacccaaatatagtttcctgtaggaaacagactctggcagtaaatacataacgcattgaccaccaaaattacctattctataaagttgttaaaatatataataaacttcactttctctcatcatgatggtataaaacatatatggagcgtctaatttaaagtttggataaaggagttacgcctctagaaggctttctctctctcgtgcaagttgaaaactctaacccctgtcaaaacttctggctttcgatcagaagttcctatctcatgttaaccattgattttcgcaagtccaaatcctatagaacccaaactcgattgcaattgctccaaactcatagaaaaatggaaatgtgtcttgggagggtttcctactaggataataccat

SEQ ID NO: 99179 - DNA, 744 bp, Zea Mays
aaacatgagatgcttgaggactccacggtgcactgcaccgatagaccaaacagtcagtaaaacactctgtgggaggaaaagatgaaccaagtattagatatatatcttgtactatgatatagttattatatgactaaacttttagtttgctaaagatgacatggccacttcttaaagctcacaacggattgcattactacccatgctctaatgcaggttaaaccgactgacgctagatttggtcggttagtcggtcgccaatcgactaggtcaagcgatgacatctacgatggaattgggctagtcgataccgatcggtacattggagcgggtctgatatcaaccatcctaccggttggcgtttgctaatgtggcacactatgattcgtcgacgctattttattcgtttcaatttaagaaataaagtataaaaaattctaaattcactctataaatataggaggggcttgggttcattcacactcaactaactttaatttataagtcatctccttcattggtagcttttcactatcagttttgatttagtagcttttcaatctccatcttaacatggatcctagatagagtcctaactttgatatgtttacggacttgttcaacaagcaatctctgcaacgtactaagaactctgtcgtgcagggtaaatcttatccgatggtcttttctcacgttcatcatcggtaaaaggacgttcctactcatacccgttcccttacttcc

SEQ ID NO: 99180 - DNA, 455 bp, Zea Mays
gtccttggaatgtgtcatgagaaggagatcaattaaatatgttaaggtcttgtggactaattagtctgagcacgaggctacttgggatcttgaggagctgatgcggcagaagtacctcgaacttttcgttatgggtgagtttttgttttcgctgatctttattctgtcattccaatcgaagcactgtaattacggggggtagagtgtgatacccagttttctgaaaaagaagttaaatttctttttctattttctttcgtgttctgtgtcattggggtttggagttttaggaggcataccgcagagaaacagtagatcattttggcatttttccgctggggccgagagctcagatgagagagcaagttttgggccgttgatctcgcatccgatggctgggaggccccctcttctccccaaccctagccgacccctctcctcctccccaattcttg

SEQ ID NO: 99181 - DNA, 354 bp, Zea Mays
cactgacgcatacttgatcagtatgctcctctattcgtagaaatcaaagaactttgagcttgtgaagttagatcccgggtctatgatgatgttgttgggtattctgaatctgaacattatttcctaaatgaactccactgtttttgctgaagtttgagaggcgattggtttgtactctatccactttgtaaacttgtcgatagcgacgagcacgtgagtataccctccttgagcctttttgaacgacccgatcatatccagcccccagcacgcaaagggccaggttacatggatagtttgcaaatgttgggctggcaagggttgttgcttcgataggaattagcatgcttcaca

SEQ ID NO: 99182 - DNA, 910 bp, Zea Mays
ttacaaatgatagtttagaaataagtttggaattgatatgtttaattaggaggggtcatctcccttcctgaaagattctcagaaagagcatcactaccctttacacacaacttccatcaatgccatgtttctgcctcagcagtgtacgatttgagaagtccttcaacttctgagaaattgtttgcaacaaaaaaaagagagtcaatgtactatgaaggaaaaaaaggttgacaccagtgttgctagaaggctaaatcacatggcaaactcaatcacaaagctagtacctagtgtttataaagaaagtaaatagctaatgtatccgtaggccgcagctaacaatcctatggactaacgaagaccattgccatagtcaaactacatgaccaaaagaaacttagtttcagatcacctgctgatcgtgggctttttcccacttagaaaacccctgaattgtgcacttctcacccctacctcctattcaaacgaatactaacaatacataaatttccagttccaattatttttccctaaaacactttgcaaggaactactaaactctattgtgctctagtgaattaaaatagtgtgcagttgttaataccccctcaactattatcagcgtggttacttgtaaatgcattacaactcactccacaagctaatagatatttcatatagcatgcatagagcatacattgaaatacttataaacaacataatagactaacagttatataaaaggcttttggaattaaactgtgtttgctctatgtcatgtgaaaagggtgccgattacttcgttcaaaaaagggtgctgattaaacatgttaccttttgagggttattcgtttgtcttaacctaatctacttgacaagaagcatctgtggtgtagcatcccaaaaattc

SEQ ID NO: 99183 - DNA, 404 bp, Zea Mays
ccgcccccagcttcagcagcaaaaggagctatgcctgtcgatgtcgaagataccgccggagccgaagcttatgaactcacaaccacaatgtcggaaatcgatagactcatatcggatgtggttgccgagaaggacgtagccgcagcgcctgacaagggaaaataattgaagatgcctcttcggaagctaaagattttgaccttcggcatttgggcggccaagaactttccgaagaggacaaatcagaattgaaagagtttgctatatcctgcggttaccagctcagatccatactcttcggtggggtcgaagaagagattttgggatgcattcgcgaccgtgccggggcgaaaatcataagcactttatccaagagtgttggatttccaaatctggaaacgaac

SEQ ID NO: 99184 - DNA, 335 bp, Zea Mays
cattgagccaaccttgcaagaccagataattatggcccagctcagtgacaagggaatgcaaatcatcaaggagaatcttcatcagaaggtggaaaagtataagtgtttttgccaagacagcaaggagatattgtggtttgaagacagattggtggttcctaaaattaaagacctcaagaagaaaatcatggatgaggctcatctctccaaattctccatgcattcggaaagcaccaagatgtaccatgatctgaagcccttgtattgatggaccagaatgaagagggaaatagctcattatgtattggaatgtgacacatgtcagaggataaagg

SEQ ID NO: 99185 - DNA, 295 bp, Zea Mays
taatgatcccgattttcgatttgaggcatcgtaatgctagaagaccgagtttcctgtgttgttagaaccattttggcgagaaggtactttgcagtcctattctggtgaagacgcttattcagagtatcataatcataaacttctcattgtaaggaaagtgatgcgggggttagtggggaaccgtcgtctctacattagcggaacaggagggggtaaggggtgcggacagtcttagctaatgtaatgaactgagtaatgtagtgccttgttgggtctgtttggttgagctatcgcg

SEQ ID NO: 99186 - DNA, 513 bp, Zea Mays
actgctccggtattggctcaaccagatattaataagccctttgatgtgtattgtgacgcatcaggcagtggtctcggctgtgttttaatgcaagcaggccgagtaatagcttatgcttcacggtagttacgccgacatgaggaatattatccgactcatggtctagagctagctgcagtggttcatgccctcaaaatatggcgtcattatctgctggggaatgtctgtcatatttatacagatcataagagtttaaagtataactttacccagtcagaactcaatatgagacaaaggagatggctcgagctgataaaggattatgaattagagattcactatcaccaagcaaagctaatgtagtggcagatgtgttaagtcgtaaggctttctgccattgtcttaccatgaaggcttctgacaagacgttatgccaagaaatggagaagttaaacctgggaatgattcaacatggaacttcaaatcatttgaagcttgaatcagtcatcctgc

SEQ ID NO: 99187 - DNA, 663 bp, Zea Mays
gtttatttgagtgggttgtcatgacatttggtctaaaaatgctggtgctatttatcagagggctatgaatttgatctttcacaagctattgggaacactatggaagtttacatcgatgatattgtagccaaatcggctaagtttggttctcatatagctaatttgcgcaaaacctttgataaaatgtgtcggcacggtctaaaaatgaacccacgtaaatgtgcttttggagtgtcggctagtaagttcttaggatttatcattcatgaacatggtatagagatagatcccgatcgaattaagtccattcggaatgtgggagctccaacctataagcttgagtgcagaagtccctcggcaaggtaaattatttacgaatgtttatttctaactttgttgagaagattgatgccttcactcctatcctttggcttaaaaatgatgacaaattaacttggtggcagaacaacaggaatcatttgatcttattagaaaatatttgtcttcgactttcatattaaaagcaccacgagtaggagtgtcattcaggttatacattgcagccgaagataaagttattggagccattctgacacgagagaccgaaggaaaggagcatgtggtaacctacctaagtcgaaggctggtggacgctaaaataag

SEQ ID NO: 99188 - DNA, 592 bp, Zea Mays
gtttatacatgttcgagccgctagaatgcgtaacaacctacgtcctgtcgaggctgaatatttgagtaccactggtctacacgggttacagatgagcagtgggcggtggagggtgggttctcttgttgatctactggtggcctagttgctattagaaggctataagctatgaggtggtgatgggatgggatgagatgacatgacatgagatcgtaggggtacccactcatccttatatagatgacccgagggttacccctttacaggtctttgtgactatctaactctatttgaatctatccttttaacaaggcatgcattccagcttatccgaagttcagttgcccttcatatgagttatcttcgagtatctagctctttgggtatgttcaacctcactgcccaaggtatcagcactccttttgcgcataactcagtcgtcctgtattcgtctccctatgtcgagctcatctagcctatttgcggcccgagggcatgccttgctaggcaagtcatcgggaggcccatcaagcgacccatggagcgtttctgcgctcctactcgagatcggcttcaagcgaatcgcgactgc

SEQ ID NO: 99189 - DNA, 400 bp, Zea Mays
ccgggcgtaatgtttggcttctaagatttcttcttcggataatcttttccctgaagcatgtcgaataatgtaattagtatcttcggacggagctttgggagcaggagctttagtttttctatcacgacttgcctcgctgtcatactggtattcggagtttgttgctcagccttatcctcaggcgcagcaggcttcgtctcaatgggcactgaaggcccagcttcggcttcggcctgggctttgacagctttggcaactttcttcgtaggaaaggggtcaaggcttttgtggtctccatgacagcgtctagcacgctggccatcctccttctcttgggagttgtggcaggagcctttgtcatcttcggcaattctgcttctgccggtgggctcaaaatttt

SEQ ID NO: 99190 - DNA, 340 bp, Zea Mays
cccgctttcgtcgtggattatgcggtgacagatgttcatcgttgtatcacatgctcgtccaccatctcgttgtggataggtcgattgctgtcatggtgtccctttcttgccggtcgggaggcactgacagctctagtaaggacttggtcctaacgatagcctttggcatggtagttcgaaccaaggtggggcagacactgccacacgtatcatgacactagcagaggttctctcgggacttctcgtgagtggggaacggtcttccgaagtgctagctatgaagcactcctgggttgggtctagacttgttccgttggatgagaagctatgtccatactcc

SEQ ID NO: 99191 - DNA, 654 bp, Zea Mays
atttttggcaatatagcaatcgaaaaagaggtggtgtatactctcattacggttgcaaaagcaacaagtcaagctacctttccaatgtcttttagctaaattatctttggtaaggatcgctcctcgacctaaattccacaaaaacacttttattttcagggggattttaagtttccaaatcatcttgttccgattgttgttgggattatacatcaacaaatggtacatagattggacggaaaaaattccattcttatgaccatcccaaacaaatttgtctctagctgggctgaatctaaccgtcgttagcaagtgtaacaattttttccactccactaatttacttcccgtaattgttcggcgaaaagataaattaagattcgtgtctagacaaacttctgcaaccaaggccgatttaatgcgcactgtattaaaaaggttcgggaattgctcacaaaagggacgactggttagccatttatcctgccaaaatctggtgttttgaccatcccccacttgaaagtgacccaatctaagaaactgatccttgatgttcattagacctgactagaagtgtgaatcacctgatcttctagatatttgagtaagggatttatctcctaggtatttatttttgagtaactgttgccacat

SEQ ID NO: 99192 - DNA, 750 bp, Zea Mays
atgatgtcgaagcatgtcaaaaggctttcaacaatgtctgtgctttcattggtacaagagacctgatccaagagcacatagcctacagggtatggccacttgtggataactaggagatgccgaaggagactgctgtcgggtccagtcaaggtgaattaattcatttgaaatataccttcagatacagagaccggtttgacgaactaaatgacgactggctgaaatgtattgaggctactagcgatgagttacttggggcatataccagagccgaagatgatgctttgtcctcagccttcgggggtcggggcaagaaaaggttgaacagggttttcgatgcaattggttttatatatcctgattattgctatccctcgcgaaagcaaggaaaaaagaggaaaactgccacttcggccatctctgctatgccgaagggcaagaaaatcaaggttttgacccaccgaccaagatatattgaaacgaccatagtgccaaaatttggtgaagagacatcttctactgccgaagcggaacaagctgctcccgccgctcggagcgctgaggaatcaactatagtgccgaaggtgtctatagttgagccagttgaagccaaagatggggcggccaaaaagccagagtttgaagaaacaatagtgctgccagaaattctgagcccatcgatagaagcagaattgccgaaggttgcaaaagctcccgccacaactcccaagaggagaagaatggctagcg

SEQ ID NO: 99193 - DNA, 273 bp, Zea Mays
tggaaacattcgccaaataagatgtccattactggaccgacttcattttgcagatcaattgctccgtcctgtgccccgaaggaccctcacaacattggttcgttcagcgaacctcaggtaccaacatgtcaggacctggaagaaagcatgtccctgaacgaacatgaggatgcggctggaggtctcaacgaccatccgtactcgttcagcgagcctcaacctcaaacatcagcattcataactccgagcaagaacaaggcatcgatccagtcc

SEQ ID NO: 99194 - DNA, 1038 bp, Zea Mays
gaaaatttagccaaattgcatgagtgaattgtccaaacataggttatggttgtaaggcacgtttttccaccatacagttgctaaaaagttggaatataaagaattcaaaacaatagatcaccttttaaacctcaaatgatgtttccatgatattgagggcattgtattcacatgagagggtattagagtacaactagtggatgaagacattgttgggctagctactgaccttttgtgataccaagtttcctataatcctctctattcaaggcatacctagatgttgtttatgtccactcaagtaaaacactgcacatcattatgccacgtcgtttctcaaaataaaataaaataaagaccatgggaaatttagaaaaattacgtgagagatctgtccaaacttaggttatagttgtatggcaccttttttccaccatacagttattaaaaggtttgaaatataaagattacaaaacaatagatcaccttttaaacctcaaatgacgattctatgatattgagggcattgtattcagacgagtgggtattagagtacaactagtggatgaagacgttattgggctagctaatgaccttttgtgatagcaggattcctataatcccctctatttaatgcatacctagatggtatttgtgtccactcaagtaaaacaccgcacgtcattatgccacatcgtttctcaaaataaaataaaggccatgggaaatttagcgaaattgcgtgagagaactttcctaacataggttaaggttgtaaggcacttttttccaccatacagttgcgaaaaagttggaatataaagaattcaaaaaatagatcaccttttaaacctcaaatgacgtttctatgatatttagggcattgtattcacatgagacggtattagagtacaactagtggatgaagacgttattgggctagcaaatgaccttttgtgaaagcaggattcctataatcccctctatttaacgcatacctagatggtatttgtgtccactcaagtaaaacaccgcaca

SEQ ID NO: 99195 - DNA, 421 bp, Zea Mays
tagttgtctaagatttatctacatagtgtagtagtaattttctaattacattctcgggaggagctcctcattgccagctatgctagtcattggtccccacaagtgttatatataatatataaaatttattttataaggtgaatacaagctgggatgagtgcaagtgtcttgttcttagcatattggttctagatctcaagggaggaggaacattggatgcggagttctgtggatcattggctaggtttggtaactttggtttgacagcgttgtcacaggatgcactgtaccaagatccccacccccagttgattgcagggatttgctgcgactctaggggcatgataaccacatttatctcccattgccctctgagcgtgatagatcattgctgtcagttagcgcttcatagtttgccctc

SEQ ID NO: 99196 - DNA, 630 bp, Zea Mays
ctttgatggttgcccctatgtcttttccctcatctgtcttggccgatttaccaaaaatcatcgaccctttgttgttcccttttatgatgacatatgttgtgcctattttgatgatgtctcctcttatcgttcgttttatgtctatggacatttcctctatatgccccctgacgtattggccggcctttgtggccgagtagtccgacgatcttgctggacttacacctagtgaccagaatgaggtgaacccaatcgaccttgcactgagagtgccaacctgtcaaatacggaagtttggggtgcccccaagcagggtattgtggcatcttgtatgggtacggtggcatgccccacatttaattggggacataaggtggtggccggtatgcatactgatatggcacaggtgggtgtgggggtggaggtgtccatgtatgtataataggtattaaatggatatcatgatacgctaacttcttagattggtgaaatgaccgaatcggtcttacttgtcgttggtcttgggtaggtgagtgaggtcgattctttttcacatatttaaaaaataactaaacaaaggtcgggtcggctttgaccgatcgatcggatgccttaaacgtgttcgtcttc

SEQ ID NO: 99197 - DNA, 352 bp, Zea Mays
acagcaggggtctcggtgtaagtgtttccaagactcagaaaatcctggcgtggacggcgggttctattatctaaaagtataaggtctcttttgaataagtgccgaagcgaaggggtatggggtgatataggccgtcggattagaaatccaaggcccagatcagatccagccttaagtgaaccggtacgctttgccctcggttggatcgtgatccaacggttctgatttaaataaatgtgagcgcatcagggatcgtccgatcagatttatacggctcggatttaaaaacccctgcgatcgcctcggcttgcccgatcgcgatcgaacggtctgcattcaccctgacctgatc

SEQ ID NO: 99198 - DNA, 657 bp, Zea Mays
atcttatctatctcgctgtgcgtgcgtgcgttcatgcacgcgtgcaggagactgccgggatctgtggagggacgaagagcagggtcgcgtcaaactcaaaccaaaactgaaactggggaggatttggcaaacgcagggagtcaagaacgcaccgcgtgctctccttgcaagctgttgcacatgccctcgatctgatgagcaacacaacaccttgcaagggggttggttcgggcattgactctcttgctctgtcctcccgtcgtcgacctgccactctctcctcggtccatggccgggctgtagtagaagctcgtccgtcagacagctagctaggagcttagaccatgcatgcatgcatatgtagcttgtaactgggattcttccattgtaacgtgcctgtacctctgcctctgtgcatgcacggagcgaggttgtacgtctatggagattgcagaagtctaaaaccggttaatttgatttttttttccaccgtcggagattcattgcttctgtgttttttttacgttcagcatttttttagtatcattgttgcaatattgaaatgcatgtttatactcgtatttacatatttcaatatttataagatcatttacaccacatccagtccgaatccaaataatcgcagcaagaccttgt

SEQ ID NO: 99199 - DNA, 292 bp, Zea Mays
atttgagtgtggcattgagagaacagttgacaacgtgtatgctatgtcaaagttgttcgtaacagagtttcaaagggagttcttttgtggccagttaactcctgagcttaggttgggtttcttcaagaaatggtgcagggacaacaatttggagtagagaattgttatctcatatctatgcatagtagtgaacctttatctatgtggtgtaatgaacctttatctatgtggtgtaatgaacctttatatatgtgtgttcggtcttgaagtaatatctgtgtgtgtaatgaac

SEQ ID NO: 99200 - DNA, 376 bp, Zea Mays
gcatgattagtaacacaaggcgcagtatccaagtcgcgaccaagaagaaaatcgaaggagctagcgggagtaggagggtcatgggcgaatggaaaactgagctcatcaaatacaacatgacgggaaataataatgcgacgcgtggagagattcagacagcgataccccttgtgagcagaagggtaccctaagaagacacatgcggcagagcggggcgcaagtttatgcggagacgtggcctgtaagttaggataacagagacaaccgaagacgtgcaagtgctcataggaaggaggggtattgtacaaacgggtgtatggaacctcatggtgtatggaggaggaaggtctgcggttaagcaagtatgtggcagctg

SEQ ID NO: 99201 - DNA, 443 bp, Zea Mays
gtcctcgagtcctggtcggcatctgtggcaaagaacatttgaagtaaacataatatgccagagaaccttccattttacattactatagaaagtaatgatacagactcgatattacataacaggatacattacccattatacagaagctcaacctattataaaacagtacaatctacaatacactactctacttttacttctattacaccattaaccctcctttccattactcttggcggcctcatcgtcaggtgtgggagtccagacatcaaccaaccttaaagaaggagggggctcaaaaaggtctaactccccacccagcgcgcgtcccgcaacgtgagatggtccggcttctgcctcagcagggtgtgcaggcacactagggtgtagttgtgagtatagtatatggacttcctcatgcaacgtattgcagtaaacctgca

SEQ ID NO: 99202 - DNA, 345 bp, Zea Mays
ttccaatccctggctccttattgcccaaatgaaaatcctaaccttgattaatgcgtaaggggtgagctgatgaaggaaaattttgaacttcttcaaaacttcgactagaaacttgtgtaaggggaaccgtagcccagccttcatgaagcttcgaaaaaacactacctcatctttttcagagagtggaacaatattttcaccactgattctcactacacatcatgaaagtatttgcctttcatagcctcaacatgtcctttcttcacggttgattttccaaataccacatgacttggcctccacagccgagcttcagcatcatcgttgtcacattaaatatcaaaa

SEQ ID NO: 99203 - DNA, 297 bp, Zea Mays
gtttggtcgacgacatcatcaccgacatgctgattttgaagatagagaccgttatcatgggcgtcgtcatagaaatgacctagacaatattgcccgagataagttggatattcctaaatttactgggaaagaaagtgcagatgaatatcttaattaggttgagcagtgtgatcaaatttccagagttcataatctttcagatcaacaccgagtgaacttggcttcagtcgagttctctggttatgctcttacttagtggaatcaagtgaaagaacatcaacatagattggggttgag

SEQ ID NO: 99204 - DNA, 420 bp, Zea Mays
cggagggtggaaaattggggagccctttttcgtggacggatgatgaatcctcggaagatgatttagactattttgcagcgttggatttagctgcagcggagtctccgttgaggaccgtcccccgcgaagcgtcggtgactttgatcggtgcgctcccaggtgacttgtgagggcgaaaaagatgggggtgttgaaacaaagcgtctgtgagtcttcgcaaggtgttagaagacatcgtcgaatgggcatggagaggtcccatctttagatcggaccacggctggatcaaggtgcccatcgcgagttactggcgtcgacgtctaggtcatgcatcggggaaggggacctacgggacctttttgaaggggaagagttgaggttgatgctatttaatttctgagaagctggtcttatcccgaa

SEQ ID NO: 99205 - DNA, 301 bp, Zea Mays
aaagttttcaacatgagggacaattagtgcatcggaccaagtccggtgagcatcggacccatcggagttcaaaggctagtttcaaagttcaatggtcgagctgatgtggctcagtctggtggtgcactagactagtcttgtgagtttgctagaggttagcctttttagaatgactactggcatggtagcacagtcggaggtctggtgatgcacacggaacaatactattggaggtccgatgcgcccagaatcaagagaatttggataacgcctagtttggcttgtgggctatatataccac

SEQ ID NO: 99206 - DNA, 291 bp, Zea Mays
cgagctttgagtggattactgaaaataatctactcaaaggtcttcatctaatgctttatagaaatctttaacttatcatcgtctcatgccttagaactcaacattatatcatcagcttatgcttttagagatcaacctgttgtcttcaattcctgctttagaaatcagcagcgcgatctacccatgtcctgttaggtttgaaatttatttgatcggcgacagattggacgtctggtagatggctcttggctggtcttcatttcgcttcgtgcttcaaagcttatgttgatt

SEQ ID NO: 99207 - DNA, 285 bp, Zea Mays
ctttggcttccaaggattttaccttggcggactctgaaggcccagcttcagtttcaacttgatgctttgaagcttcggcacccaaggcttcgatttgcacttcggaagtctcgccaaatttcttcggagtagtgcttgaagactttattgtctccaatacatccagtacattaaccattcttttctctttggggtcgtcattggcattggcacctcaatttttgctgaaggacttagaatttctgatgtctttgtttcttcagccctcggttcttctattttttc

SEQ ID NO: 99208 - DNA, 442 bp, Zea Mays
ggaacaccatctctctagtctagtgctgcttcctttcaccactaagaaggcagtagaagtggtaggaagagggttactcctccctgtagcctagtttttggaacattgggtgtaataggctagttagtagagttcttcttttgtatgtatgacaccctgcgtggtggagatcttatgtaagaaacctcaccctaatgcatggctgaagttgtttttagtctcaccattgtgatctcattattgtaggtatcatgattatccttatgatatgatgatgtgattcaccactttcacaattgaaccttgagtttattttccgtatatttcttaacttcaagcttcattttggaatatggaaacatgagaataatggaagaaacccctaatttgcagatggcaggaagagtgcacggccgacaggaacagtaggtctcccccaccg

SEQ ID NO: 99209 - DNA, 692 bp, Zea Mays
gaggaacaatgtataaagtttgaggaggcgatgatgggtgtacaataggaactacaatttgaggaggcggagacggttgggaatgcaacgacgacggcggtggtggatcaaccaattcgacatcccttcaaggccaaaggatgaaattcttgatggcttgtccaagtgtctcaataccttcggacctagggatgtctagcatgttgtctaaactcgctatttgtggagacagattatttcgcgttggtgcgacagagttcgcactcgccatttgctacatcaattttggaggaggattcaataacatttgagacattaggtctctaaactctttcttagcctcctccttaaaataatctgtcatctcctccttgtatcgatcacatttcttgtatagaccggtctgaatccttccttctatccttccttagacgagattcctcgtacaaaaccaggatgctcagggttgctgagaccagccattaagatgtctctctccctttgtggcttaaatgttccgcagctctacttagctgtcattgcatatatgtttattgccgcttcttcgacaattggatcatcaaaagatacaccagactcaatttcccttagttttctagcacgtatccaattagccgtcctttcaccaagttgctcggacagcgtcggcaaccccgcgaccttcttctcgg

SEQ ID NO: 99210 - DNA, 708 bp, Zea Mays
cgaccatgcatgtttataacattgcaatattattaaaattttgtttaagaaaattttaacctaatctggttaaaacttgtcaaaaccatggtaggtaaataaggttcataactaaaagaaaatcttagttaaaatgggaaaagtcaaaattttatgattttatagccttattcctcttagcctcattttctcctagtttccccatcacatacactggccttgcacaggtgggttcgcctacccctactgacggaggagacaccccttttagcactgactcctttaccctggagggtttcccctctgccttgtgggatgtgctgaggaaggatggctaccccatgccttcccagtacattgtgtagctatacgaggagcatagggtacctcattgcagggtgtgactaacactagagcaccatccactacagccagattgttgtttgttggactccgagactatcgggttctgagccgacgacactacggaggctgcatccttgcacgctccgacaaccttctgtggtttccacccattagagaagttgacacatcccatcaccctctttcccgccgaacgggaggacgatccaatgtggagggacaaggctgaccaagcaaaggatgtatgggcactctaccctagaaagacattgcggcgacttgaccagatttataagagatcaagtatgaaaaccactagcctaa

SEQ ID NO: 99211 - DNA, 398 bp, Zea Mays
tttttctttacacgtcatttcattaagaaatcaagatcatatacatgcttgtttccgtcctcccttaacagtatttaaggatcgctgaagctgcacaacggcatgaagatgttcatgtcaagtggaggatgccaaaaatctgttcatggctcaatctacatgttcatgtcaagtggaggatgccaaaaatctggaactacgatgccctgtatccgaaattctccaaaatagagaatgtatacattttcaatgataagatcatagccaaacatttctctttctctgtatagttcttgtcaatgtttgaagagtttggagttgaacctaccttgttgagtggaaggagattgtgttcagaaaactttagagatactttttagattgccgggatgtaaatt

SEQ ID NO: 99212 - DNA, 472 bp, Zea Mays
gctaacaattctgccttgaggactaaaatcattgatgtcttacataatagtattgtgggaggtcattctgggggtctggccagctatcacaaagtaagaaggttgttttggtggaaaggcatgaagtctgatgtggtgtgctttattaagcagtgtgcagtgtgtcagcaggctaaggcagaaaagattcacaccccaggtcttcttcagcccttgccaattcctcaaggtgcatggcaagatctaacaatggattttattgaaggattacccaaatcagaagggtataactctattttggttgtggtggacagattttctaaatatccacattttttcccactcaaacatccctttactgcaaccaaagtggctcaagtatttttggacaatattgtgaagttgcatggtacccctaggtctctggtatctgacaaagataaggtgttcactagcaatttttggaaggctc

SEQ ID NO: 99213 - DNA, 957 bp, Zea Mays
ttggagtaggcgggtcctggtggcttcagctgcggacagttgttcttgaagtgacttggatcaccgcagtgccaacatgcatttgccgaaggttggttgcttgccactgagggggaatgaaaagagctctgactttgttggctgaatcgtgacggagtgggtccagctggtctactgaagttgggccccttgggtggaaacccaaatgatcgagtcttctggtgctggtcctgctgctgtgcccggagaacctggaacttccttttgagatgtcctttttctttctccttagccctttcaacttgcatggccttgttggaaaggtgagagaagttgaggaagtcttggctagccagaattgtcttgagttccagcctgagtcccttcaggaaacggtccatctttttgctctcggtattgacatcatctggcgcatagcgggctagctcagtgaacttgtgcacatattcgctgacagatctgccgtcttgagtcaattctcggaactcgtcctccttaagatgtaccagtccttggggcacatggtgctcccggaaagctgcttcaaactccgccgaggtagcatctctgatggtgacgttgaaggtgtcccaccaggctaaggccatcccagagagttggtgggcagccagttgaacccgctgattttctgggcaaccaatggcttccagcttccttttgatcgtgcgcatccaatcatctgcatcgagggggttgcttgatccggcgaacgtgggaggtttgagtctcagaaagtcccccattctgtcttgcggtcttccaccgttcgaccgttgattttccagatttcgagtgaggacctcgatgagtcgggtctgattggctagaacttgggctaggtctaagggtaggggtggaggtgcggggaggtgggtttcactttcttctctaacgacttccccttcagctcttcgg

SEQ ID NO: 99214 - DNA, 288 bp, Zea Mays
gccatggtgaccaccgcgggcggaatgctgtgcgccgcctcgttgacagcttggggtggaagaggggtgagggtcgttggatcctcgatgaagggtggaggtgtggcgatgggtatgaccgttggatcagccacggacgctccggatcagtcgagtggataccccttcggatatttgaatcgtgaccgttgattgccgatccagcgcacctcgtagcataccctttcgtgttatatctgagaccatcagatctagatcggatggctctgggtccccgatacctcttcg

SEQ ID NO: 99215 - DNA, 376 bp, Zea Mays
tgatgattgcgaagtctcttcttctgtgtttaagccttttggcctcattgcaatcggatggatggtagtggccttggaggtatagggttattggggcccaacagtctttgaccattataagtttgacaatccggtgcttgtcggcgtcttgcgttatttgcaggccttcaggatttcggacagctggcgtaccgatgacgtgatagaatacatcggaggcagggcttcgccttttgctgctgctttagctaatgtatcggcctcttcattcttgtttctctcaacgtgttgtagactgaaacccttgaattgtttctcaaggcctcgaacagcggcgaggtactgcattagtatgggctctttggctgagtattcc

SEQ ID NO: 99216 - DNA, 648 bp, Zea Mays
attgctactcagtcatgtattccagaatgcctatatttcagtgtttggtaaccacagttatattccttggtattgcttataatctttgctactcagtcatgtacatattattaatgttcttttgtttccttttggtggccctagaattggagatgtcattgacgaggatgtggttcattcaagggctccatttgtagcctgcactcaacaatgttttgctgttaaggcaggaattgatggtctgcttgatgttgctcgtcgatctttctgtgataccagtgaaggtaatgctgcttatgtacatcattctaattcatgatattcacattcttaacaaactgtattgcagccatacataacctcgccaaaaagtacagggatgattataatatgccaaatttgaagataacctataatattaggcaaggattttactttattattccccaaaaggacatcaccgataggcttcctaataaatttatccaggtaacatgaacatgatcttacaaaatcagcttgttagctgtaatatgctaaccagtatttctgaattcttaatgataagttaggttgttagacatgggaagaatctccattgctcaagcttggaacttgcttcagtaagttaacttctctgcactgttc

SEQ ID NO: 99217 - DNA, 449 bp, Zea Mays
tcttgcagaccaatgagggaagacaaagctggagaaggaacaccactactttccccgctagctatgtagcgccggctgttcttccgaattagagggacttcattctcctcttcctcatcttcatcaataatgcggacggtacacccattgggatcagctgtggccagattacacccattgggttcagcatcatcaaggtcacacccattgggttcagcatcagtctggtcacacccattgggatcagcttcagcaaaaactggcaccggcacttcctcagcagcaggagcagaaggaccgacatcctgatccaagcatgacactcggcgaagatgtctctttttctttttcttcccctcagcaggagaagtcggttgagtggctcggcgaggacgctttgggcgaacactatcagacctctgaatatccaaagctttgccagcctctgg

SEQ ID NO: 99218 - DNA, 796 bp, Zea Mays
ttgagtgccctccattccatgaaagggaggtcatttgcagtgtcaagtagcaaattttcctgaatttctgatatcggtagccgccatgaattctgaacttactcaaagatggttgcttttgtggttatgacgcaggaacttgtaaggtgcgaagccaggaaacagcaaagcgcgttctcgttggttctcctaatagcgtttgggctccttggcattgttctaggttacattgttaagaaatgataatttcatagtctaatcgagcaatcgctatggtaaataaaaggtaacatgtcgtgtgattcttacattcatcagccagctgccaatgctacagagaagtgcaagcgtcagttgacaaaccgggggtgggggtgggggtgcggagtacaatagcatgtattttgatccacatgatgtatttacacgaatcactggaaaagtgattgttgtttggtttctgtatctatcccataccgtttgtctctaaaattgtgaattgggtccactcatggatgtgaccacgttgttaacaaaatgagcgggagatcgtgtccgagtaatgccatatgctgatccgctccaattagtctgagtaaaaatgaaacaggctaactgtgtcaggtggtagagtgatccgtggtgctccagccctggctcaccagtcttcgccatgatgctggttcttccttgcacgtagaccactacacagtgcagcaatctgacattgataagactaagagtaaagaattttgcttgctaggattgtatacatgagctatttgtataagatgca

SEQ ID NO: 99219 - DNA, 1500 bp, Zea Mays
tagcgcccgaatggtggaaggcctcaagacaggatgggagattttctaaggctcaagcctcccacattcattggatccagcaacccgctcaacgctgatgactggctacgcacaataaaaaggaagttagaggccatcggatgccctaagaaccagcgtgttcatctagctgctcatcaactttctaggatggccctatcctggtgggataccttcagcgctgtcgtcaaatatgctacctaggcagaatttgaagccgcctttcgagaacatcatgtgccccaagggatcgttcagcttaaggaagatgaatttcgggaattaactcaaggtggaaaatctgtcagtgagtatgtgcacaaattcacagaattggctcgctatgcgcctgacgatgtcagcacagaagccaagaagatggctcgtttcttgaaggggttaagaccagaactcaagactatccttgccagccaagatttcctcagcttttcgcatgtctctaacaaggccatacaagtagaaagggctagggaagaagaaaagggtcacctcaagaggaaattccaagtcctccgagctcagtaacaggacaggcaccagagaattcaatcctttgggtttccacccaagggaccaagcttcaataagccagctggacccactccgtcacgtttcagttagcaaggtcaaagatcttttccaggcccccttcgttgcaagcaaccaacctccagccaatgcctgttggcactgcggagaccccaatcattacaagaataattgtcctcagttgaaggcatccgttcctacttactccaactcggtgaatggccccaagagtgccctagcacccacctccaaggcaccttcctccaacagccaacaaagcaagacccagtatcatggcagggcatgagtgaaccacgtcgacgcgcaagaagcttagcaagccccaggagtagtgctcggtgagttgctagttgaatttactcccgctgctgtactttttgattcaagagcatcccattcattcatagccaccagtttcgtggaaaaacgtggcattcccacggcacacctagaaattcctttggtcacccgaaccccagggtcagaccttctatgccatctcaaatgctcccaagtcaggattcttttaagtgggtagtgttcttggcagacttagctgtcttgccatcccaagggattgatgtgatcttaggaatggattggttaaccaagcacaaaggcaccataagttgcgcaaataagaccgttcttctcactgaccaccaaggaaagttagtctcatgtcaggctcagccacccgcccaagatccaatggtgtttaacctagcaacagaaagcacatctgtagtagaagaattcatggatgtattcccagaagaattgccaggaataccaccagaaagagaagtagagttctacattgatctaattcccggcactgcacccattgcaaagagaacataccgcatg

SEQ ID NO: 99220 - DNA, 382 bp, Zea Mays
tgagactttgagcataaattcaactatgatccagcaagaatctgcccatggctgctatgacaaacttgtagctgatttgtagctctccaactttgctgcagagcatggagtatgttaccatatagatttgtgagaaaatcgagcctaaatgttgactgtcaggcgctctgaataagtgctcgccatggtacagtgactgaaacggatcagaacgctagcgcgactgtcctcaccgccgacgactcccaccaccgtgattcgtgtcaccggcgtcgggattagtgcctgagtggatggatagcgctgcggggtaaaagaatcttcgccgtcggtgagctggacgccactccggctagccgcgatacttctcccctttctcatc

SEQ ID NO: 99221 - DNA, 375 bp, Zea Mays
cacaagtgcaaatggatgtgtaaacaaaaacagtgtttttttgcaacttcttctctgttttggtttctcttttccacccgtcagtgagacagtgacggtgtgtctgcctgtccgtgtttctgaccggagtggacagccattactgcccctctgatctctgacggtgccgccgtgatgactgatgaagggggtagtgcagagcaaaggcacgcacggaccatgatgagatctgctcggaggagttaaagaccaaccagtgccaatctccaatctcgtgaccagatgcagacgcgtgcgcagaggatatcatcatcatcgaccgcaagcagcagagtgccagctccgggcgcagtgctacgaacgcactgactgcac

SEQ ID NO: 99222 - DNA, 401 bp, Zea Mays
atagccttccccttttggctacttgcttcccttagagcatcgtccccttgattggtgtccaaggtcctgaggatggggccagtcgttgttgacttcttcgatggcatggtacgagttgtggtcgtgagatcaccggaggtgggtgccaatgttggtacttgatctcaatccctctaaaggtgccaaaaatcaaggcaatacaagttagatataaagacctccatcctcaagaactaacacttcttcgaaatgttagaacataaggacgaaggtcttcgatgagaaacataatgaaatagtgtaagagtgacgaagtgggacttcatatatgacttttctcatatgccttaacattttattacatctctcttcgtaaataaatatacaagcataccttcggc

SEQ ID NO: 99223 - DNA, 361 bp, Zea Mays
cttgaagtggacaatgatcctctgacagagacaatatttttaggtactccatgtaggaacacaatcggggatatgtataactccaccaacttggcttccttataggtggtcttcaccggaataaagtgagctactttaatcaatttgtccacaatcacccatatggagtcataaccattaggggtgcgggtaacccaactatgaaatccgtaccaatctcttcccacttctattcttgtatttctaacccagctagtctctgatgttcaaccttcaccctctgacaaacatcacatatggtcacatgcgaggctacatctctcttcattccataccaccaagacttctccttcaaatctaa

SEQ ID NO: 99224 - DNA, 326 bp, Zea Mays
gaccgatcctagagatgaaatgatcggtctattgaaagaatattctgattgctttgcttggaattacactgagatgccgggattaagtcgagaaatagtagagcatcgctacctatgaagtctagtttcagacctttcaagcagaaagctagaacatttcgtccagacgttctccagcgaataaaggacaaaactcaccagctgctggaagctaattttattagaccttgcagatacgcagagtgggtctccaatattgtgtcggtggagaagaaagaatcagagggctatgaatttgatctttcatgagttattgggaaacactg

SEQ ID NO: 99225 - DNA, 617 bp, Zea Mays
accccgcggccctgatcctagggccgagcgtggcaaagcctaataaggggggacatgcgcgtcagatggtaatcactcaagtggatcccgcgcccagccctggactgacccaccataaatgactagccgccttaaccatgcctagcatcgagccacagagtgggcggcgatccgcttcccactcatgacctacgggctcctcgggccgcattagcactcatgacctacgagcccctgaactgtggcacattaatgactcacgcacccatggactgcggcgcacttacaacctatcagactaggcctgagtgtggacctcccatagggcactacacgacaaactgtaccgaaccctaggctatggaagccagggctcggcatagccggattgatggcgcctgggaccatcattgcccccgcgataaatacacgacaaccaggaagcttgggccccacgagtacgcatggactcacctggggtaaaacattggttttacccttgccttatggctccttcctagggaagccactgttggccgagccccatcttgtcctttaaaagggagaggctagcctctaggaaagaggggttgacaaataaattcagacagagagaa

SEQ ID NO: 99226 - DNA, 736 bp, Zea Mays
tgaaaatccggtctctatccgacacaataactgatggcatgccatggagccgatagacttgttgcatgaaggctttggccacaacagaagctgtgaagggatgcttgagaggaataaaatgcccaaatttggaaaagcgatccacaacaactagaatgcagtttttgccacctgaaactggtaacccttcaacgaaatccatggagattgattgccacgcaccagcaggaatgggcaaaggttgcaacaatcccggatacttgaccctttcaggcttagcctgctgacatacagtgcaggaagccacaaactgctgaactgacaacttgagcttgggccatgaaaacaactgcttcacccgctgatatgttgctggaatcccagaatgcccaccaactgcagaagaatgaagggcctgtaacaccgcttgctgcatctgaacattattgcccagccatatttttcccttgaatcgaaggagaccatcctgtaggctaaaattgggcacagcatctgggttaatagataatttgctaattagggactgagcagtctcatccgataagtatccagccaaaacatcttgacaccactgtggagaacaaacagacatagcatataagctgtgctcatgatgtctgcgagataatgcatcggccaccctgttctcgtgcccttgcttgtagacaacacggtattgcatgcccaacagtttagtgaataccttctgttgcca

SEQ ID NO: 99227 - DNA, 1091 bp, Zea Mays
ggaaagcctagtttgttcaaaacttgctaatttcatttttataaaattattttaatggccttacctctttaaaaattcaactgagttgacattttcttttctatattgttcgtacccttcaaaccacccgagtcaacaccaactacgccccaccgccacggcaagttcctgtctacccagtggtagttgagaaaatttcggtggatctccctcgtattcgagtggagtgtggagtcatcttggaggacagctcggaggaacttcagcctacgcccaccccgttggtagagtcactggccttcatagctagatcatcaacctcagcactgcctgcaccagcagttcaagctcctacacccgaaggcgacgactaggacgactctggggacgatgatgaagatgacgacaatgaagaagatgatgaggagaacctcaacgagaaggccaacgatgttcagcaggactacttcatggggtttcagcctatcaccaaacattacacatcaatgttcgagacagggcacttccccaacctgctgcaagacatgttgcatgcgttgggaacctacgtccgacccttgtatgagacaaggcgagtgtgcgagcctccccgagcttgctactacatcactcgcattcacgtcagggtgatggatgcaggggataggggttcagagctatatcagctcatgagtccctgacaccgctatccaccgacgctacttcggtcagcgatgctgccagacagactcgttggtctctcagccacacctaccggcagcagctgcatgacacgaagttcaggcatcttcctctgcgtctgagtggagggagccagactagcatcgttccaggtagagctagagaagatcgcctcaacaccctagctggtgtagtggcaggtcttaacacagacctggacagtgccaccctggatctctctagggtgcacttggagctagaggatgcccacgccaggattgcagccctagaagcccaacttcaaggacgagatccccctcaagcccaggtccctaccacggcgttgtcccctccccgctagaggattcgctatggggagcccggatcca

SEQ ID NO: 99228 - DNA, 518 bp, Zea Mays
caaatcatttgaaggttcgttttgtttcatttattactcttcctattatatttcaaattgtttgatcagtagaaatattttttactaacgccagcgccggtgggtacgcctcatttgcctctttcccatttcttctttctctttagtagcaaattttgaggcatgtgaagatatgtcaatgagtattgtcgtagggattctgaagaaataagtcctgttatagtcttccaaataatgctacttacctgtaaaaatcaaccgatcagcaaaagtttctatgtatccttattgagtgttgacactttttccggtagacatatgttatttgggccctgtccaggaatggattattctctacagtccctttttcgagaggttttccccgggtttttatgctcccttttggtcgtgtagttagatttgcagcatgtctttttctttagagttttgttatcgatgtcaattcaacatgcattgtatttctcaattaaatatggtgaatttgagtctgtcttggc

SEQ ID NO: 99229 - DNA, 812 bp, Zea Mays
ctagtttttttggtgtccgagacatatgaaaaaaatagtaaactaagttaaactagagtggatccatggatttctctatgccccgtacttgaacatgagatactttatcccagcattgacaaaccaggaccagatatgataggaggtattaccaacgtgttatgctaatagacatgatggtccagatataaacaaactagcctctaccaaaattcggaattaagatctgctaccaaattagcctctactacagttagcttgagatgtaaacactgattatataatagaatttgcagacatctaattatctaatcgtgaatgaatagcaaaacagtacagaatttgtcgagtccaaagtgtagattgcagtagtgcattgtaaattaatgatgcaatttcagattttcaaaaaaacatggttgcaaattgtgaaatcaaaaagcattcatggtcctgtttactactccctcggttccaaattggaagtcggttctggcctttctaggtacatatttttgctaaacatccagatatacactatgtctagatatacttcaactaatcattagcatctgctatcaaactagcttctaccaaaattaaaaattaagatctgctatctaattagcctctaccacagttagtttgagatgtaaacacagttagcctctaccacaagacctgaccaaattcattgcatacgcacaagttaacacataaacactcatatatcaatgcagtttacattgctattctcaaatacttagcattgtacacgaaatctagtttacacattgcacaagcatgtgaat

SEQ ID NO: 99230 - DNA, 456 bp, Zea Mays
cgggaactgaaggcctgccttcaagaagcttcggtaaataacaacttcgttttcctccggagtaggggcggtactgtctcctccaactctgacaatagacatgtcgcgaaaatatctccccctcatggcgtcaatatgactttgcttgatagtcgattttctgaagatagtgtggcttggccgccacgaccgatcctcagaatcttcatccccacattccacgtcataactatcactgtcatcagaagcttcggacaaaccttccatgatctccttagtaatttctctgtattcatttttgccatagactcataaaacccagcgatgaaaggatctgcaactttcttttcttcatacagcttcttcttctcggtcattttcttctcttcagtcatcttcttctcctcacacatcttcttctcctcaaatttggagcaaacacgcctttaaaccgaa

SEQ ID NO: 99231 - DNA, 468 bp, Zea Mays
tgaaaacagaggttgcagactcagcagagaacggaacgcgccggaacgtcctccctcccttcatggataggagaaaaatcatcgaagaaaatttgccccataccggcagagatctcagattgttgtgaagataatctaagaaaaacgacaaaaaattgatattcgttatatatccattttcaactattttcattcatagtcacagggctggtgcgtgaacagctgagaagaactgaactttagctgggcttgtgatcccatctatatcttgaaacaacacgatgtacaaggtggaggagtattttgacataatgcgtttgatgattatttggctggattagtctggttataactagacgacaagacaaacgggtaggggcaatggccattaatcctctaccactgcgaccggtcgttgttgctttgaagctctgcttgcttgaaattgtgtagtgggaacagccgaac

SEQ ID NO: 99232 - DNA, 697 bp, Zea Mays
ttctcagaataacctctcggtatactcgcaacttcgtgttgctagcgattacatgtccttttatctcataatttgcttcatgtcattcagcgacaaagagagcaatgtgctaacatctggttgagcaatgtatgctgagatttatagtcttaaattatttggtaaggccttttgcttactaatagaatcccaatttgtgatgtcttatatgccaaaaaggcttccatgcattatatatcttcaggttacttcaggtaaaactttatgcatgaggaaagagagcacggaattaacttatctgtgttctatattatttcatttactttcccagattattcaagcactatagagcttgatatagttgttatagccacttggcaatataaataaatatataataccacacaacacagtcaaataaaatatagagccaaacaaaattgtttatgaaggttgcgcataatatgactttaggggcttgaacaattcacgcgagtacaagctctagtgtatatggcgtcaacacatgtgcggccatcagggctacaacaacaaataagccttcgcaacaagcgcaacaggcgcaattgtggctcggtagttgggtacaggacaagtccacgcaacatgcgcaacaggcgcaattgtggttcgatgatcacgacagacggatagtgcctacagggctgcgaaaaat

SEQ ID NO: 99233 - DNA, 531 bp, Zea Mays
caaaattgtatcatagccttcagacttaggtaatccctcaatgaaatccatcgtcaaatcctgccaagcaccttgtggaatgggtaaaggatgaagaagtccagaggaatgctttcttttagtcttagcatgctgacaaatgtcacactgactgacatactccaagaaatcacccttaaatcccttccaccaaaacattctctttagtctatgataagtggcttggcctcctgagtgccctcccatagcactatcatgcatagcagaaatgagtttggttttgagggcagaattattggccacccaaatcaaccaattcttccttatattaccctgatgtaaagaaaacccatgttcatcaggaatgtgaatggccaactgacccaacaactcttgagcttggacatcagaaacaaaagaattcaatacatcctgaatccaaagaggctgaacctgcatgatagtttgcattaccatagcatgtcccactcgagataaggcatcaagagctatattctctttgcctttttg

SEQ ID NO: 99234 - DNA, 662 bp, Zea Mays
cagttttaagacaaagaggaacatgatcagataaagttctatcaagaccagtaaccaccacgtttttgaattgaaggatccactctggactcgccagaaatctatccaatttttcaaaggttggaggctccctattattggaccaagtatacaatctgccactcaaatcaagctctatcaaactattaacatcaatgatggaattaaaaagtgagctccagcaatttgtacctccaggtttgtttttatcagaatcttttcttaaaatgttgaaatcacctcctaccaacataggatgtttgcaatttgagcagaaggaagctagctcagttaaaaagcactgcttatactcattttgagcagcaccgtagacattaataaaattccagataaaaccactttctttatgagccacaagaaccttgatcataaagtcccctttatcaacttgtctgatatcaaaaacatcagcatctaaaccaacaagcaaaccacccgatctccccttggcaggagaccagaaccaggcaaaatttctattactactaatagacatcagccaagaatcatcaaaagattttttattggtctcttggatcccaataaaatcaattctctcttttctaattaattctttcaagaattcaatttttatatcttta

SEQ ID NO: 99235 - DNA, 2526 bp, Zea Mays
gtacattaagatgaacatactcacagagtcatgaccactaaactcaaagaaagcttcaggacccttttccttgagcatgtgactaacacttgtcaaaagcaatgaactgtgctgctgctttgcaataatctcctcgtcacgaaggagggcaaaaaattttcgaatatcctttccacaaatactgtgtccaccaatgatctgaattatttctgcgattttcattacaatgtcattccctttctcaactttaaaccaatcaagaaggaaactaagcaaccctgctctgaaacaagaagttctatttgtaatggaccccttgagcaactgttgcaagaccataagcccataatgctggagtgaagtgctgctctgccaattgaaaatcaccaatgttacatacacatataagtatcaacaaagcgcatgcgcacacacagaggaatatagggaggggcaaacggaccttttgcagaacatttattaatagcataatcacatcttcattctgatgaaaaggacagcagaatcacgtaacaaatatcaggtagcagaatgtaatagaagggggtacaatttagtgaagcaaatcaagtatatatacaaggatgtcgttgcttccaaaaacatgtcatttctcacctttattgttgctttttcatttatgtcaaatgtcccatcgacaagcatgtcaagtagggcatccaggagtttaggacttggaatccacttacagaagtccaatagcaagctttgcagtgtttgataacctgcaccgaccagcaatctgaaggcagcctggataaggcaaaccagaatttaaaatcacatcaagcaaataacagcacgagtaaagagctggacagaccaatacttagactaactacccccttgtaaaagaaacccagctcagcggggtgcttgcttgtatgtgctggcctgttcgcttctactacttaccgctgtggctgcaaatgaatgctttcagtttcagccatccttcctatatatgcatcagcctactggggataggagctgtgaactgaatcacaaggaggaaagaagtgcaacatcagagaggccaacaaatgcagggatggcagcacagtgaggtgaccctgggtccaattagtttccaacccgtttttacccaatccatgcatcactttgtttcatgatttggttgggtgtaacaggtggattgggtgggctgtgctcacacccataaggccataattagacctatctaatagtctaatttccacctagtgctgtgccatgtgtgtaggcctatgaactttaccacatgtatgtgccagattaagtaccaatgaatagtgccaacacgcaaacggtaatggtgcagcactaatgttgctggtacagtggtatgcaacactgcagggattaagttgccaacggtaacccaggaggacatccatgaaaacaagatacaggtgcctttccaggaacaaccaaaatggtaacagcaggcttgaaagtacttgcttagtacagtttatgtagcacatgcatgaactatagcgaaatattttgttacctttgactcatcattttcagcaagtagagcagtcagtgtccgaaggacattaagaaccaattgctccccaactgcttcatcaaaagttccattcagcaaagagactatatgcaagaagcactccccattgcgaaacagattttgataatactgccaaaaatataatagtgaaaaacaattaaaactgtcagggacgaggtggattatgatgcgaagagaaataccaaaaaatgtaagtaccatgtgcagatccatctttacaagagaacaaaaaacataccacacggtctatcattatgacctctctcatattgactaatagatcaattgacaattctgcaaaagccttttccttttcttttgcacgagtgaaagtctcaagatatttggagcatagtagcatctttgctgcgtggtgttgtgctgatgacgaaggtaactgattgtaagaaagaacaggagaggtttaagatccagacaatagtataaagaacaatataagaaaagagggtggatacgacttaccctaaataaggcaagtacttgctccaatatgtgtttcctgaggtattcttcttggaacaaatcaaataaacactcgatgcaattagcattgcataaaactgtaatccttccaatgtcagatattgtggcatactccttgaaaaggttgaaagccagtttcacaaatgcacaagtgttcttaattctctcatctgaataagtcgtctgagcatttctggattgagaaccattttgatttaagtcatcttgggacagcttccttatttcttgtgcttgaaggcatgcaaccttcaggactctagtgagcacatcaattgacttgaaagaagctagagtttgttcagttgcaagttgtaggatcacgtgaaagctcttaacaataccaccggccaatccaggatcataggtacaatgttcaagtgcacctaccaatgctaagcatt

SEQ ID NO: 99236 - DNA, 393 bp, Zea Mays
gcacaaaccaactaacactgatggtataaataaaataatgtaatagaggcatagaaaagcaaacctatagaatccctagatctacagagagagccactaaaaaactgggatcaaaacaacattgaatgcgatgattaaccaaatcgagcaagttggcttacagatccatgctatacccaaggcaaactcgtgtaaaccaacagatctactcatggcacagaataaactcaacaaatcgagaaaataccatgtaatctgtgatgatggaggggttgttgatggcgacgaggttggcatcctcgctctgtggtgcgacattggccaggagattgccgatcctaccaaatccgagcagacgcatagagaatgcacaactcagatcagacgaaaccg

SEQ ID NO: 99237 - DNA, 506 bp, Zea Mays
catggtgaagcggtggctcctctgcaatatggtctaggagttactagcgtcacggtacaacatgtctagattgtcacgagaggccgtgagtgctcgtttctcctcctacgaacagaaagcaacattcattaccaaggcaacaatagcatggaagggtcaaccaaggaagtttacctcatgcgccatttttttagagtcaagctgggcattaagtgaggaattcaaagaacgtgcaccatccaaaaaagcagaagtctgggccaagtcggcttgactttgagaatacttctcctcaaggtcagagcattgttgggccatatccgacaatgcagctgaaagggaatgcatgactaagaacaagttgatcaataaaaacaactagggaagttataagatcactaaccagcattcgacaccttcaggccatcgatctgtttctagagcagcaatggattccacttcattagagacagagcttgttcgggaatagtggcgccgcagaattt

SEQ ID NO: 99238 - DNA, 405 bp, Zea Mays
tatgttgagagcttgtgcccttcagcatggtagtagttgggacaagagtctaccttgtgctgagttctcacatgataatagttatcaggccagtctgaaggtgtcactgttcgagattctatatggcgggaaatgcaggactcctctattttggaccagactagaggaagacagttctttggacctgaacttaatcaagaggcagaagaacaagtctgtataatttgagagaatttgagggtagcacagaccagacaaaagagctatgctgataatagaagaccactggaatttgggggtggtgatcatgtgtacctcaaagtatcaccacttcgtggaatgaggagattcaatgttaagggcaaattgtcccctcgctttattggaccattctgagtttttagg

SEQ ID NO: 99239 - DNA, 407 bp, Zea Mays
ggcaaagcgaaacaaattcagatgtaaaatttaattcacacaatttagaaaacaaatcacctcaataaaagtttgtgtgtgaaagttatcgtagttttactaaagggtatccggtagaggggagaaatcaagttttgcccaccgaaaaccctaagtgaaccacaattgatcttagaaacaaatatagcatagttgaaggatgattgtaaggtggttaggatgaaaggctgaaagggtttatgatctagcgagggtctacgaaacaagagttaatgcaaatttggctagcgagggcaaagcgtatagggtagtggatcagtttgtagttcagggttctagaatgggatagcaacagaaaacatggcacgaaagcaatgaaatctgacctaccacacgacggtacaatc

SEQ ID NO: 99240 - DNA, 582 bp, Zea Mays
tattttcacagttcctactcaattgccacctgctagacagtttgatcatcacattccactggttccaggagcggtgcgccggtgccagttaattctaaaccctatagatactcaccttttcacaaggatgaaatagagcgtcaggtctgcattattgcaagctggattgatcattcctagttctagtccctttgcctctccagttcttttagtgaaaaagaaggatgggacatggcggttttgtgttgattacagacgactgaatgatctcactattaagaacatgtttcctatgccattggtggaagagattttggaggagttggtgggtacaatttttcacaagcttggacttgacaactggataccaccaaatcaggatggcagagtctgagcctctgaggaatataaaactgcttttaaaactcatcaagggcattatcaattccgtgttatgccttttggacttacaaatgccccggctacattccaatgtgcaatgaactcgattttggccccttttctcaggaaatttgccatggtttttattgatgatattctcatttatagtgattcttggac

SEQ ID NO: 99241 - DNA, 641 bp, Zea Mays
tttgggtccttctgttatacctccatatcgtttgatctcaaaaacactggagcgacctaccaacgagccatccaaacatgcttagccaaccactgggccaagcggctggagacctatgttgatgatgtggtaatcaagaccatggacctagaaaacttcattaacgaccttcaacaggtcttcaatagcctgagatgctaccgctagacgcttaacccggacaaatgtgtgtttgggttatcgaccgataagctactcagttttatcatcagccatcgacgaattgaggccaacctagagaaatcaaagccattctgaggatggagcctccacgatcgcaaaagaaggtccaaaagcttagtagttgtatggcagtactaagtcgtttcatctcgtggctcagtgagagaggcatgttgttttacaaattgctcaagaaggtggatagattctagtggaccccaaagctcaagaagcatttgaagcagtcaagaaatttctgaccatcccaatggtcctcaagccacccaaccgggccaccaccgaccgattggccgaagatctgttgttgtacatttcatgcatgactcacgtggtaagcaccacattagtagtcgaacggatagaagaagggcacgcac

SEQ ID NO: 99242 - DNA, 301 bp, Zea Mays
aacaaacatatggttacctgcgaaaggcaactggctgttgggatcgatggggggaatgacagcaacggatgaacttgatgctttccggttgggcgccatctcaatcttgctggcaagcggagcggaagcagtatcgcacaggcgcaaagaaggcttggatgcagaaaagcaagaactagggcacggaaagtagaggcgcgcaacaatgcaatacatatggggttttcctgggccagataccgtttccagaaagcgcccagtcatcacccgacagttatctttaaaatgctggcgtgccatg

SEQ ID NO: 99243 - DNA, 575 bp, Zea Mays
aacgaaacgttatgtacctgcaggttatagtgtttagtttgatgaagaggctactcataggtttcttcagaaaatgctcattatacgctttgttaacattgcagagtttgtaattggttttcaggaaggcacataatctttctttatgaataactaaggagtctctgattactgttactagtactatatgctaaaggtgacagttcagattgtcaaactgtatcttgatgtatttggcacttcgtgctccagtaagtagcctcctgcctgtggattgtttatttgtttcggtgaagcacaagtctttcaattggctacatgactacatccctgtttcttgtgctattatcatgcacatgcactgatgatcatttgtttccttcgctcgttcatccactctttatggttgtctctgtgggccttttggtcctggcgtaaatgttggaatgcctctaaagctgaagctctgatacgctttatgtggtatatataggtctcatggttcgctgaatctatactgtttatacttaatagaaaattctctttccagttctcgttccgtctgtgcatctgcg

SEQ ID NO: 99244 - DNA, 509 bp, Zea Mays
ctagtacagtgtgaaagcattttgcggttgaagaattgcttcagtttattcctttcccatacttatatgagttgggagcctccggcactgggtctacatttttttattctgctatatttgggcatgctaagagcctaaggttaattcattttgcaacaatttgatatgcttttctttgttcttgtttgttctttttttatttctctcttaattgttgtactctctgtcttttgctattctcccagtcgacctatagtcctgagtcttgacgcttcaggttcaagaaaaggagctttatgatggaaaaatggagttcagtctgctcaacccttactgttactgtgtcggccgagatgtgctagggtcgctggtggttgagatttcagatcaggagctctggagtctagactctggattgcagcgagccaaagaattcaaatcagtcactggtttgtttcccagatcgcggacagcggcaacctgcagtcgcttgctttcgtccttgaatt

SEQ ID NO: 99245 - DNA, 1020 bp, Zea Mays
ctttcgatgatgatagctcctgaaaggttgccatgcacttcgaagtatctaaaaagtaagtgcctccctgacatgatgttgaatggttagataattcaaggtgaaatcggatctacaggtgttgatttcccccatttttcactccaatattgcatattccattagcctgcgcaacagattgaaacatattttcaagaaatcctttttatgagtgcaggtgcagtacaatgtggcattcgacaattccttcccttcaatgctaccgaagtctatctgtttttcttattaaacctaccattagtttagtaatggattaaatatactaaagtagtcctgaaacatcacgtcattgtctctgcacctctacataattatatgatgcttaaagtctaccacatttgttatttcaacatgaaccacaggctgccctgaatacttatttttgttgcatttttaatgaccttactgctagatctagatgctagatgttgaacttgagtcctaatatagataatggagcacaaacctggaatgtgcattgtaaagtctctgtccacagatacaacatccaaacctggaatgtgcattgtaaagcacgaggtcaaagaagagccattgtctgaagaggtgggatgtcatcttaagttgggacttaggaaaaaagcaatggccagtgggtaattagcaagagagtggatgctgatctggtgccgtcttctggtaacgaccatgaccattcaggatacgatgaaaacaaaaactgcatcactcactcaagcaatattgatgatacaaacattgcagatgaaggttataatttagagccagcaacaaatggttatcccatgacccatgtccacgatcttgactcttcatccgcagacgaaaatggtcctccaacatcaacagggcaggatatagtagttttgagtgactcaaatgatgatgttctcatggtgttgtctcccggtgctgtgaactgtggctcgatgcataacaacactggaaatctgtttccac

SEQ ID NO: 99246 - DNA, 682 bp, Zea Mays
agatgacaggcaggggcatgaaaactgacgattccatgaaaaatgggatggaaccattcgaaaccaaacacgggcttgacttctcgcctgacattcaggctagaaacaaaaagagaccagcctaatgtgaattaggtgtccccttgtggagtgaagtggaatgctaaagatagaaaagtgaaccgtacgatctcgtcttagcccattgacaaaactagtccaagaaacccagattgctaagtctcaagtatgtcaatcaagccctaatgtttccattctgccggaccaactagcctaacctttcacagaattgatcatttatacaagtgataatctagccagttgtgctgttccaaataaacatagctagtcgaacagacgaacacttgtatatgtcaaagaattcttcctcaacttctgcatactggagacatgatacatgtgataatctcaatgctctagtaaatgaatcaagaatactaccagatactcagctcaaacctacctgaaaatgagcatcgggaaaaatagtacattttgctaatagaggaattcaactctgtgtagataatggaagatagaaaaaagatttataatcttttaatggttcagtttcttacaaaacttgtacagttaactccaagaaacagctttatgcaaggatgctattgctacatgatac

SEQ ID NO: 99247 - DNA, 466 bp, Zea Mays
actgggttcagacacaagaggatgtagttcatgagacatggctggcggcttcttcaagatggctcccttccctgtggacatgcacagaaaattggcatcaaattaatgaaaaatgaagagcaatcaacaaaaaagatgacacaccacaactctgactctgcgaagttaactcaccctacaaggtgcataatcagcacataatcagtttaataattagtattctttccatgcatccataagaacaaagtgcagcagaatctacaatagaatcggaaccaacttgggactgaaagtcatcacctttctaaatccatctctcaagtatacctaagtggtgcgcggggtaaggaaacctgcatgcagtccttccaaacacgcagacagcgtgggcgtgttttttttgtctgtggcccgcccgtcccgccgaaaccggccagtgttggtgttcccaaacgaagcctaaaag

SEQ ID NO: 99248 - DNA, 531 bp, Zea Mays
caaacttgctgcaggatgtgctgcatgcactaggaacctatgttgacctctctatgacacaaggagagtgtctgagcctcctcgggtttgttactacctcacttgcgtgcatatcagagtgttggatgcaggagatcaaggtttcaggactctatcatcacgagtctctgacgttgctatccacctacgctgcttcggtcagcaatgctgctcaaagagctttgtggtccctcagccatacctattagcagcagttgcatgacacgacgtacatgcatcttcccccgcgtcctcgtggagagagccagacaagtgttgttccaggtgaagctggagaagatcgcctcaacacccttgtaggtgtggtggcaggtcttaacactgatctggacagtgctaccctggacctctcaagggtacatgaagaacttgaagatacacatgctaggattgcagcccatgaagctcagttcgaaggaagaaatccacccgaacctcaagtccctgccatagctgtgtccccgccccgca

SEQ ID NO: 99249 - DNA, 370 bp, Zea Mays
ggaatttgggtgctccccgtggtgatctgggcgctgtttcgttgcttgtttgtgtggtgtcccagacttgcggggacgcggcctgcgccttgggccaaactcgagttccggaattttcctggtggaattgggaacggccggcctagggatctcgcgaggccgcaccagaattgatcctttccgtgcaaattttgccgctccagtccatgtttaggtgtttgggggtgatctctgacctaataaagcgttagctcggcctgtttattcttcatacagtttatcatttgcgtgtagatttgggcatatgtgcctcaggaagcaatgaaggtccatttcgtgaattcgttgctgtgtaaattgctaatcccac

SEQ ID NO: 99250 - DNA, 576 bp, Zea Mays
aatttttttaaccagttactttattcattacacaagttcatttcaacatacaactaccataagttcattacacgcgagtgctatctagggtactcccgaactccttctctaaagtgtccccaaattccttgagaaggtcatcaaggctggctagggacatttcctcggtgtcggacgagttccctattctggtagggggtagggctggaggggcttcttccttctgctcagtctggcatccttggcttctggtcttcttgtagatttttcttgcaggggcgagcttctttagcttcttatcgtaatccatctttagagtgtggtaggcctcataggtgttggtttcctcgccttccgctatctcgaggctctcttgaagggacgccttttcccttgtaagttccctgacttgttgctccaggctttccacccgggagtttaggtgcgtacagtgggaggccaggtcatcatattggttatcgagagtgtggaggtatccagccatgtagacgatggtggggtcatcctcggtagggtctctccctgacagggcctgaagtcttttcctccaggcgg

SEQ ID NO: 99251 - DNA, 548 bp, Zea Mays
atctaggagatcatcttcagattcgggataccaaatagcaacatcacagatctaggatctaacttcacgagtgcagaattctttgacttttgcgagcagaagtgcataaagctcaagtacgcctcggtagcacacccgagagctaatggacaagtggaaagagcaaatggaatgatcctagaagcactcaagaagaaagtcttcgacaaaaatgataagcatgcaggaaaatagatcaaagagctgttgtacatagtctaaagtcttcggactcaacctagttgggaactacaaggaaacataccgttctttatggtgtacgggtcagaagtagtgttacctacagacttagcatttggggcacctaggctgactttcaaagacattacagaagcaaaagcaacccagcttgaagagattgatgtgctagaggaaaaacgattgaatgtagtcatcagtcggctaggtaccagcaaaccctgaggtgctaccacgacaagacaatacatccccaagcattcacattttgggatctaatgctccgtcgg

SEQ ID NO: 99252 - DNA, 401 bp, Zea Mays
gaagacgcctatagtcgagccagtcgaagctaaggttgataaggctgaagagccaaaggttgaagaaataatgaaaataccagaaattctgagccctccaacagaggcaaaactgctgaaggtgcaaaaggcttctgccgcgactcccaagtggaggaggatggccaacatgctggatgctgtgctggagactacaaaggccttgagccctgctccttcaaagaaaattgctgaagctgccaaagcgcaagccgaagccgaagctgggcaagcagaagccgaagctgggccctcaatgcctagtgagatgaaggctatcacacctgaagacgaagttgatcagcaaacttcggatgctgtcatgacaggatggcaagacacaacagagaaggcaaaatctc

SEQ ID NO: 99253 - DNA, 489 bp, Zea Mays
tggccgggtgccgaaggctgctatcattaattggtcttcttttttagtgtagttccccaaaatttcattgcacatagtttcaatcatttctagccattcttggcaaggctccttgaactgtttcttaaacttaaaacaataaggtaatcgaacaagttcatatttcttctttgttccctttagcttcggcatgccccaatcacttgacgtcagagatgtcctattggccaggtattcttgcattaggtctctggtgctgatttgttcagccaccaccctgaattctactgcggccagttggcatggtgaccctagctacatgttgcacaggggtcgggtcattccgaagtttagagatagcgggcacataaccatcgtcatcagtttcccccttttcttctcatcagccttgatatagaacaattcacctttccagtcggttggccacttggtgcgatagctgagaactggagccttcgtatccttgcg

SEQ ID NO: 99254 - DNA, 385 bp, Zea Mays
aagccgatacgaacatttcttgcatcgctggcaaaatctagatcaaagttgtcaagagccttccatgcatcaccatctgacggttgcaccattaacccatcttgtctgtccgtacaatctttatgccacctcatgtgcatagcggtcttcctcgagagaaacaaacgtttcactcttggagtgagaggcatgtaccgaagctgtatatgtgcaacctttgtcaccaccttctccacatcttcatttacaagctccacgtacctcgacttcccacattttaagcatttctgctctctgccatgttccttccaaaaaagcatacagttgtcctggcaaacatcaatcttctcatactccataccaagaccttcaagcaatttcttgg

SEQ ID NO: 99255 - DNA, 405 bp, Zea Mays
caccggttgacttcaagtttcaccgctcagattgcttcaaggcggcgttgctcaaattaatgatacaaggcgctcggggactagctgtgggggatatacccctgggtacccacggctatagacatgggttgcaccaccagaggaggcccaccccatgacatcaaggcttgcggcacaaggcactagtctgcgtgcaccgcaagacatctagattacttaccatataactgattaggatacttttcttgtaaccctacccctctagagtatataaggagggactggggtcccctaggcggcaacatctctcatgatctctcatgaatacaatacatcggaacacaggatgtaggtattacgtcatactgacggccgaacttgtctaaatcttatgtctcgatgctc

SEQ ID NO: 99256 - DNA, 497 bp, Zea Mays
tgtatgtcatgtatgtcatgtcctatcgacggacactagagcccatgatgtcgggtatgatatagttggtaactggtgtagcaatctatactttataatgattcttgatgcattggtgtacccatatatggctataggattgatggcatatcgaatagtggtcttttgagtacgcatgttgtctaaggcatagcaacagtgtgtctatcagactctaatatcgcacatcatatttaatatgatgtatgaaaactttatttgtggtgtcggcaacatgagactatcaataagagactttaaatatggtatcataccttcatttctttgatttgtggattcctttgtacttaacccttataggaacctctttgtccactcgggaggctctaggacctgaggggatctggagacctggccatttgattcatccgagatcgagtcccctggccatctgttaataagagatctagtttgagcgtgtgcatgtgaagtagaac

SEQ ID NO: 99257 - DNA, 383 bp, Zea Mays
cccagacagaccgtccgcatatgatcacggacggtccgcatatccgaccggacggtccgagtatccgaccggacggtccggcacagggttgtttgaggaggattgttacctaaatcctcgcccataccatcaacacttccgatcgcactatacgatgcaccagcccattagtacagaatcccaaacccatgggagcgagtactttccggctccgcctagaaggccgaaaaggaatgttcaatcctatgaaccatatagggcaaatagtaatgcaccacagaactcaaaccaatggggggaagacaacaaactaatgtccaaacaacctcacctatgatatgacaaaaagccagtggtctcccaccagctgctattgatatagt

SEQ ID NO: 99258 - DNA, 347 bp, Zea Mays
ctttggtttcccttgagtaaattttttgttgaagttttgaagacttttgagatttaccttcatcagattacccttgaagctatcatcgggatggggatttttatttgggccgtgaagagctagggactagagccgagtgcaaaatgcttttgcaacatgcatgagctgtccaatgagacgaaggctactggcaaggagcaatatcataataattttggttgttacggcttcgtgcctcgctctgatgtgagctatccaattctgacgtttcggaagaggtagccaggagcctggatggaagaatggttttacgtaaagaacaacttaattgaaagagaagatataaa

SEQ ID NO: 99259 - DNA, 464 bp, Zea Mays
gttctcaaggccctcgtcatttgcaactttacttctatgatacagaagatgctacattggcccacagggcatggagatcaccataccttgatattaatgtcattagaaatatcttgacaatattagagggaaatctatatgtacaaactttcaatagacttggagccattctaagtctagatgactatgttattgaactcaacactaatgtaacgcctgaccaacgaaggtacatgagtatgcatcacatttctttgttgtttacttgtagcacatttctttttgtaatacatgatttttaacatgtttctttctgcataagcaaggtacaatgcacccactgcctcacaagttgttgctatctggttcgaaggaaatgacccgcaaagaagtttcgatagaagtgtgatcatatatgctacaggagatcagcctatatgtatcaaaacataccatggttgtta

SEQ ID NO: 99260 - DNA, 560 bp, Zea Mays
gcattatagaagatgtatgttattatactgacatgaggagttggggtctgatcaaagactggtccactgtcattgtgttccatgtcatctgttgccatttcacctctctactcaaaggtatatgcttagtaaattatgtaatatttattgtactaatgtaattgtaaaatggaagtataacatgagacagtgattgctagacaaacattttttgcggtgtcacgtcaaatatcggcaaacgggtcgacatatttgatcttgtaaaggtgcaagctgatgtgggttgaggtgtgatatttgtgttcctcaacatgttgtttcgaacatcaaagcaaaaatcctgttgacaaatattatggttcgtgtccagctaaaaaagaaatatgcaaacaatgtacgtatgatgcgtaaaaatctcatgggattgtatatattacctgatgtcctgtatcaacgtccgcttcatcagggcaagtctccaatactctccgaatatgatgttggctttcatgaatttcctcaacctgggtaccacccagctgggtctcaagctgcgattc

SEQ ID NO: 99261 - DNA, 424 bp, Zea Mays
gcgaaagacccttgcatggggccacagaccagttaccccgcaaggccgtctcgttgtgggccgggcaaagactacaagtgggatgggtcggcccaataaggcaatggactcatgcccggattgtccgttgtatcatgcataatctcaagaaactttcagttttccccgcgtctggtgccctcgaatgtcgaggtagtttagggtagagtcggcgggttttcctagagatcggttgagttagttcgctattagctaggagatatgctgaaagaacatgatcatcatgtacgtagggagtatcccacggttgtgtatataaggcctaggggaaaccccatcattatcatctcattagcctttctccattcaatagatgccacttgtaacacaccacacatacagatccatcccaggaagtaaggta

SEQ ID NO: 99262 - DNA, 957 bp, Zea Mays
aaacatagactgaaatgagtcttcgaagcaatatggtttctataactagattaccaaagctcaacatagggcaccgagggaaggaagaagaaagaactcaacaaactgcaacaagaagttgtgaaacaggggaaaccgaaggtgactaccaaacaccgaaaggtagtttagggtccaaaagtgaggtgaccaaaaagaaggtaaaattaatgaaggtctatcgagaaagcaaaagaggttgtaggactaaaacccactgggaacaacactttaactttgtatggatacttcacaaataatagaggcaatgaccaaacacacaccttttgtaaagttaagccctttagggccaaagctaattaactctatagcttcagtgaaggaaaatgacactaaagatgaggtgacatagatgcctatccaagatgagatccctctagctgaaatgaggctcgagccgaagttaggtgccaaggaaaattcgaaagtggcaacgttgaaaacgccgaggaaggctagctgcatgactttggttatggatgccctcttcgacacaccatccaccgagggaggcaacgacaaggccccatgtgccttagcctaggcattatcctctcatcttgaacctcacagtgggcaattctagactgcactgagtccttattgatggcacaatgtcaccatatcttaggttgcaaggtactcgagaccactattcgctacgtgcatcaatcctatggccatgcgcgtgcatgctactgtaccatgaataatcaagtacataaggctacttcaactgtcaactatgtcatacccaatagcacaggcctcaccacccacaaaagagacataacatatccacccctacaacaagtatggaaaccaactagagaaggacatcattgacactgtgccacaaccaaagacatggttgggtatgactatgaacaagataag

SEQ ID NO: 99263 - DNA, 456 bp, Zea Mays
ccgttgcttaggtttcagacaatagtcagcttttggtttgcctccgttttctctaagcacttgggttggacgatcacatatcacggctaagtccatgcgtgccttgtcattgtctttcattttatcagggaaatccatgcatgtatttatgagggcttggcaaaagttactctcttgatgcatgacgtcgatgttgtgcaacaaaatcaatgacttaccataaggaagctcccacaagccacatatgtgagtctagttatgctcctcaccaaaaccttgataccttttcccactcttgtctgggacaagttttctatgctcttctgtaatttctatcccgctacgtcgcttgggcggtcccttcgtgacgatggtgcccttcctaactcctttctctgccttctgaaggggtgattgaagggtggaaaacatctatggcaatcaaagtaacatatc

SEQ ID NO: 99264 - DNA, 713 bp, Zea Mays
caaaaagggaatgactctatctgggtgataatagaccgtcttaccaaggtggcccattttatcctagtaaaaactacctttggaggagccacccttgcccgaatatatctcaaagagatagtcagactccatggcattccaagaaagatagtgttagacagaggaacccagttcacctccaaattctggacaagcctttagaaagctatgggcaccaagctagacttcagcaccgcctatcaccctcagatagatgggcagacagaaagcgtcaataaggtcctcgaagatctattaagagcctgtgtgttaacattcgatagaagttgggaatccagtttgccttatgcggagttctcgtataataacagccatcaggccagcatcaagatgtcaccgttcgaagcattgtatggacgaaaatgccagacccctctcatgtggtccaacgtaggggaaaaggcactagaaggacctgcctttgtcaaagaggctgaggagaaagttgccctgatccgcagaagattacttgaagctcagagtcggcagaagagttatgcggacaacagacggagagaactcagatttgaggaaggagacttcgtctacctcaaggtctccccgatgcatggtgtcagaaggttccaagtgaaaggaaagctagcaccgcgattcatcggtccctatcccatcatcggcagagtaggacccgc

SEQ ID NO: 99265 - DNA, 511 bp, Zea Mays
ctgcggcgtggtgcgaagtgggaatcgtcctcgtttcatctaacccccatactcattatgtctgaatcaattgtagactcccacgtccctcgtacaggaatgggaaatgacacaatagactaatcatggggtatgggggtcggtggaaatggagggtatgagcgaaccctccatcgtgtcaggccacaccggaacatgcacctccactaagaacgacagtgtgctgccaactccagtagggaccccatcagaaccaaggacatactacgacacgaaccactgcacccgcacgcacgcgtatggggtcgccttgactaggacgagtcgaaaagcatgaaactacaatactaacaaacgacggggaaagaaggcgtcactagtcgacataggacgttcctacttcctatccttcctttttttatttttcttcgtggtactccatcgggaagggaacaattgtaactagccctaccattaaggtataaaagggaggagtggggaccgacaaaaa

SEQ ID NO: 99266 - DNA, 806 bp, Zea Mays
caaaaggcagcatagactaccctcgcgtgcgacaaatccgagcaaaagtcgcccaagggtgcagccggacatgcacaataagtgcacaacatcaccataagggtgcgaagtctttactataagacaaatccgagcaaaagccacccaagtgtgcagccggacatgcacaataagtgtgcgacatcaccctaagggtgcaaagtctttactataagacaaatccgagcaaaagccgcccaagggtgcagccagacatgcacaataagtgcacgacatcaccctaagggtgcaaagtctttactacaagacacgtccaagcaaaagccgcctaagggtgcagccggacatgcctaataagcgtgaggaatcaccctaagggtacaaagtctctactacccaaaatagccgagcaaaagacgcctaagggcacagccgggtacgtgccagaagcgttcgatatcacctgcgggaagtgaggtccccatcccatccaagtaccacgccaacacgattacaaatcgagacaatcttacaataaatgtgtcacacgttataccatcgtagtttacatacacaaagcgaagggcccgtcggctacaccgcacaaataatacaaatcatattttgtcgccctccctctctattgcgaagcgggggagggcagcgttttcactcactatcgcaacacgagagcgaggccaacaaacatgctacatcggctcagccttcggaataagacctgcctctcgataattaaacaacataatctttaactctttgccttcaaacaaatttcgcaaatcccc

SEQ ID NO: 99267 - DNA, 296 bp, Zea Mays
ggcgtggtaaatctgctaaacaaaggtaagcgttgtattaaatgtaataactaatatttgtgagtcttataaaacttattgaaatttaggaagggtccattgaccggaactgccttcgacccgctttctttgccaactggtgtttcagtgcctatgtgtttttgtggtgatccttgcaaggttgacaagtccgaggatcatgtcacctatcgacagaggtattggatgtgtgctaactatgcatttgagccaacgattgttcagcgtcggatgaatttaatggtgagaataatttt

SEQ ID NO: 99268 - DNA, 694 bp, Zea Mays
ccggcggatggatatgatattagtgaaattctaccttggcatcacaacaccactcgccctcgctatctcataagggtcccatcacaacgcgacaatggctgtcgcttgctaccaccgccttttgccttgtcgtggccatctatcgtcgcatcgtcgcctgcactcgctatcccacgcctattgtcgcctcaccgtcgtcattttgtggtggagtcgctgactctccacaccgacatgctgatgcgcccgctttgccctaacgtccagtccgcgccggttcatccctttgttctctccaactctcctttagggtagccaaaataaagatccggtatttatgttattttagaacactactcatattatcacttaatctccatgttattatcatggaattatttttatcaaatggtatagtatattgatttgtctcctacgttatcgccccacctgaaattttgtcctgcgtccgccactgatcccagatgtcatcattttggctatgccgacccatggtctccgtagactagggctcggtgtagcccatcgtgtagtgccctatgggaggtctacgcattcaggcctagtatgatagaccataagtgtgccgtaggcagaggagtgcgtgggccattaatgcaccgcaagaagaggggctcataggtcatgagtgctatgcgatatgaggtgctcg

SEQ ID NO: 99269 - DNA, 544 bp, Zea Mays
catggacttgactgaaggcttcagaaaactttgaaacacaacaactttgtcctctcttggctttggcactaaatcatcacctcctagccgcatccaatcaacattgtcaatatagccaaagaatttatgtacctcaagtgtcctcctttgatctttgatttaccgaagtccacatggcttggcttcgtaggataaatggtggtgctatcctcttcaatatcaatgttgtcactatcctcgaacagattcacaacgccggctttggcctgagaggcggtagcctctattattgtaactaacttctcaaccgtcgtttcttgaacgcttgatgaaggtgccaagggcacatcagcaccaggctgctctcctgccatttcctattaaaaaacgtacctttcagctagctaaggctggtttggaggtggaaaagcaatcaaaataagctttgaaggcagagcaggcttcagcaacaacacacacaaaagaagaaaatatcgtaccaacactgcctggtgtcgctcccttttatacccatagatttttt

SEQ ID NO: 99270 - DNA, 377 bp, Zea Mays
ttctaatggagcactgaactattgttgtttgtgaaatgaatttttgtgaactgatgaaggtcgaccttgctgtcatgcagcacctaggcctagcatggataatttgttttgcaaaagtcttacttaacttgtagcatatatcacatactatgcaatagaagcaacaactagaagtgccaacaaataccacatacaatcttggtaaatacttgccaacacatatcacacactacgcaacaaaagtagatacttcaagtgacaacaaatatcacatacaacctgcaaacataattcacacactttgccatagcttcaagttatcacataaataatttttaggaggtacaaactccacaacatgttcacatggcactggc

SEQ ID NO: 99271 - DNA, 338 bp, Zea Mays
ctagtctggggtctagtgctgatccggtagatcgtagagagaactaaacaaggttcacatgtactcgttaacgcccagaaacttctgttttctgtgtaccaatagtccactgcactatacaccattgctttttgagagatatatagcttgtatgtagtgtcgaattattgttgtgaaaaaagggaattgttgatcgttttgaggcttcttcacgtgatgtcttctcaatgcttacagaatgcaagttgaaccccttgctgctgccattttaaggtatcattttctgaattttcgtctgggtcaggctgaggcatgctcgaacaaggacattcatatga

SEQ ID NO: 99272 - DNA, 294 bp, Zea Mays
tgcgaggagcgtttgatcgtgaaatgagaagatggcacagcaaaatacagaactcggggatagtctgacatgtgatgtgaggggtttgaatccaattttgggtgttgtttacaaagttgtctgttaggaataggatagcattcatacatatttttcggtaatctcaggtctagctaggcgattgaaaattttgtagtagaacctgattttgtattttagtctcgtatatatagagaaacaatggccagttttggtatcctattgttttgtatccacatgtatctgcatacatgg

SEQ ID NO: 99273 - DNA, 1195 bp, Zea Mays
ttgagcaaagaaagcgaggaagacgaaaaaatgaaaactggtggcgcaacctcaaccctaaccaggcaacaacttttatagaaaaactaaagggacccaatcaatcaaaggttggaaagatgcccccccgaaaccaccacttgataatccagggcagcattcataccattctctagtcttcgggattgactcgtcagttcgagcctttgcccttgagggatactattggggagaaggccaaacatggccttgatcattggcaaacatgacaccccttaatcgtttaccggactttgatgccatcttcaagcatgcatgactcatcatgccgcaaagacgctactgaggacttcgctccttggcgaattggtccgaggaagaccatgcctactcaggactccgtcatctacctcaagcatgcaagacccatcgaaggccgtgaagacgctaccaagtcccgaggaagaccttgccttctcgagacttcatcatccaccatgggcttgcaaagcctattgaaggccacgaagatgccactctaagagttggccggccctaagggcctgcgaggagatttgaggactttgaccccttcgctcaaagtgcacgtgtcgttccactgaatgacctaagagacccctagagtcctccggcttgtcaagggtttcatcgaggccttcgagggagcagggcccccacatccagggctccccgttagttgagggaacgcgcacaccaatcgtgctagtgcgggtacacaattgagtgcttgtaatatgagttataaacaccctaaagagtaaagacaatgttgtacagaatattctagggatgtagcaagtagccaagggtaggttcgtacttagggtgaccccttggttaccctataaaataccttaaaaaggacgttcgtgaactactattacgcattgtcatctcacttgtttggacccccacagtgaaaggtcccaacatcatccatccttcttctcacttcaaaatcctctcgaaaccagaacgagataccgtatgtcgtgattttcaagttcttaaccaaacagatctcataatttcatgtggagagacattttgattttcatgtgaccctagtagactaaaatgcattaaaaagtaacagcttcaaaatgaattgaacttgcatcccaactagttagttttaaagtttacaatgtac

SEQ ID NO: 99274 - DNA, 1133 bp, Zea Mays
caagggacgaccgcctggatctcctacgcctctgcaacttgcttcgatcacgatcatccttcattgtgagggtggcgaagggggggagcatgctctcctggtcgatcgaagatcaaaactaacacctcaattggataggataatgaccgacgcaacccccccccggtcagtcaccaggggctcaataatctcaagatgaagtttctttggaatggaagacgggctggagcaccaggcgatcaccctgaatacctcacgctgatgggcagagactggatggatctcagtgatccaacaccattcattcagaagagtttccatagatgccagatcccaggcatgaattgggatacctcttaattcaacttcaacttgatattgcaaggctgctgcagaggaattcaaaagtctactccatctcatgacatgagctctgagggagggtgaaatgtcaacaatcatgcccttgtcgtaagccctatctgccatttccacacatggcaggccgagaagaaagcttgcagggacatcacttcttctatctcgagacgccgggcaaaattggccaaaatggcccattcaacatctgactgattatccactgttacattgatcacaatggcacgagccaactcctctgccttcagagcttccggaacgtgcctgattgcctgattggttggcactcgagacgtcttctcatcttctgcacgcggcgactttccacgatagtgaagccttcatggtccttcaagaacttctgactcttcggattcttcaacagatgcggaggaagccaaatatcatctcagccaggggagatggatcggcgaaccgcgccatcagcggccttctggaactggaactttgctgaaaccctctgcagcgcgaaggcctgccaagtctcatctggtgcgccttggtgagcaacaccatcaagcgcttccggatctgagatcgagaccatacccgcaagaaggacttctttgaaagacgtgggatcttcttcctcgcaagaacttgaggtaggactagattctctccatctaagagccttgcggcgtcctaaggtagaagatgggcaaccttgaagctgatttggatgatgtccctgcgcctaggtggtggccgtc

SEQ ID NO: 99275 - DNA, 917 bp, Zea Mays
gtcgaacaatatagtccaaatcaccctaggaaggtgcctcgggaataggtgccgtgggcttttctggaacattttcttttaccagctctactggcgcagcccccgaaggccccactttagcatgaataaaagaagcgcttgtagcggtcacgtcccttacatcttcaactttttcatcagaagcttcggtagtagcaggagttggcatcttcgtggattccaaaacagcatccaaatgaccatcctcattttcttaggagttattattgtggttgcagcagatgtttgcttcggcgacttagttacggttgggggctcaacaactttggatgctcttctgccggaccgatactagcttcgactaccgtggcaggaattgtccctggagctaaggggatagcttcgatatgttcagcaatcttcatcttttatataacaagcattgtagctatcttctctaaaggacgtggcttcggcctgcgagtcaaaacctttgtcctttttggcttaggcgcggcggaagaggatgaagctgcctattttctctttgacccttgttttcgggtaggaaagcagtaatcaggataaaaaatccgatcacatcgaaaactctattcagcctcctattactgcgagcgccaaaggcagttatcatggcttcgtcttctgcctttgaataagctaccaatagctcgtcgatggtggcatcaacaaactcaatccaatcatcaatcggctcgtcaaattgacttctacagcgataggtgtatcttaagtaaatcagaccaccttcgttggagccgacagcagtttccttcggcatctcccaatcattcaccagtggccacactttgtaagcaatatgctcttgtaccaaatccttggtaccaatataggtgcacacagtgttaaaagcc

SEQ ID NO: 99276 - DNA, 370 bp, Zea Mays
aacttcctcaacatagagacatgaaatacagggtgtacccctgccatggaatccggcaattgcatgtgataatccaagctgccaacccaggccaagatagagaatggtccaatgtatctcgggctaagcttcccggagacaccgaaccgaacaactcctttagtaggtgataccctgagaaggacttgatcacctactgcaaattctaagtcccgcctcctcacatcagcataactcttctgacggctctgagcggccaaaatattctgacaaatttctcgaaccttctcagatgtctgctgaacccaatcaggaccaaccagagatctctctcccaaagtctcccagcacaaagcggagatacaccgcc

SEQ ID NO: 99277 - DNA, 459 bp, Zea Mays
gtggaagagaggaccaaggtctcatagggtcagtcttggccaaccataaccatctcattcgaagggcccagcctagctcctttaaacgaaaaatgcctagccctccaaactccaccggtcgacaaactttccctgaggccaccaaatagtgcccctttaacttcttttcatccccgccaaagaaaaccttttctaattttataaatagactttagagcccacgctatcaaatccatagccattgtcaaataaatcatcattactgttagcatcacttgaactagaactttgcgccctaccctagtcatcaaatctgccttccaaccaggaagctgatctgcaatcttgtcaatgattggttgcacttggctcttagaaatcttcttcaaggataaaggtaaagccaaataactacaaggaaaagcagaaacctcacaagggagctgctcattcagaatt

SEQ ID NO: 99278 - DNA, 279 bp, Zea Mays
gtaatatttgtgtatgagtcaaacatcaagtattttatatgtatattaatgtaatatatttctttgtgatgcatgaaatttgtgtacataccatttttgagcctcgggcgaaaaaacaccttctcttcttttcatgcttcacattgtatgatatcattgtcgacgaagatttccttggtgtgtaaaattttatctgtcgaaggtatactttgtgcttcagcacgttgttccataatccatcaaatattttgggaggaacatcttttcttcttcacagtt

SEQ ID NO: 99279 - DNA, 403 bp, Zea Mays
tgtgcacttgtgtcaaaaaaatataattgttgttggtgtctagttgcgcaaaccctatcaaggccgtgtttctttccatgggtccttgcccctaaaacttcataacatttctgttgatcatcctagctgatcctgtttgcctacctctcctttgtccgaatcaggtaatcattttccttgtgaatcatgttgtggccttatcatccaaatctccggatcctttaaggattctgccccgttatctggttatctgctataactcgttctcaagtatcgaatgttgatttgcctaaatctctcatttctggtcagtctcatacccctcctccgaggatcatgatgttgtgatcaatttaatctctaaacaatgtatccatttggttcaatggatgttgatgttatc

SEQ ID NO: 99280 - DNA, 286 bp, Zea Mays
gtttagccctctgtcacctctgttccgatcgctctgcttccttttccttgacctcttggtggttgtctcggccgattctagtgcgccttgggtcggttccggtgcgtcttgggttggttcctgtgcgtcttggtatcgtgtcgcagctttttcgagtgtcgcacgaaattgagacaagacctcctattcatgtaataaaatgcacaagaaatcatgcatgtgtaatagacattgtgaaatcagctaattaattaggtacacacatgaaattaaggatgtgtaattt

SEQ ID NO: 99281 - DNA, 662 bp, Zea Mays
taaaacccgggtgtgagagtgagcatgctctacgagacccattagttacggctgcgttgacatcgaacaagtacaaggacttgtacatcgtatggatgagacgaaacgtcttaccaagagtataacaacacactacccgccataaatagtcatgtcgtgtgcaagcaccccgagactgacccaaggggcccgacgcgcactctcacgtgagacgttagctgcagaactctctctctctccctctccctctcacagatgtaaggaccatcccttgaagaataaatgggagtctctctccctctttttagacacaagcacactggctgtaacacactcatgggcaatacatcgatcaacactacactgggctagggccacgacatgaactagtacaacccttgtgtctcagtttctagatcggatcctcgtgattcaccattcggattgagtcctcgcttgcatcccccgctgaacacaaatctattgttccccccgtttccaaaactacgacaattatatatttaattcatctcttaaaataaaggtcaaataaaataaactcaaatggtagtagttcatagtgataatagaaacttaacatcacatcaacggtcaaaggactagcatggccacatcaattcataatcacatacaattgtcac

SEQ ID NO: 99282 - DNA, 797 bp, Zea Mays
acatctaggagggcacaggggtcatcggtcggtccggaatttgccgccaaactttgtcaaacgcagcggatccgccaagccgcatggcaataatcctcgcgaacttaatcgatggtaaggggttgtcaactgagttctacctaatacaatgcacgattatcacattttggatcatagtttcatgcttggggtcgggggcttgggtgcctcggcgatggcaccatcggggaacaagaagagcaccgctgctacttggagtcaggtgggaagatgggccgcttaccatagatcccctcatcaacagggaggattagatcctgaaacaatgattcgactagatgtgttgtcatttttggatcgggatcgtgtggtcaggaatacgttacggttcaggatttgatgtggaccgttgattcgtgatcttgcggtccaaggtttcctacgttgcgtcgatcgcacacatttttcatatgagaccctagatggttttataatgaacccgtcgtccgcctaattcaatggaaaacagagttaagtcctcggatttcatacataggtccctggaccttgcatttaagcccctaaaagttattttagagtatagaataatcatgaaaacacctagaaacttgtaaacatcaaaatcttctcattttaactctgttttggtccattcaagttgtgttagcttcatcataatgatgtctatgcagtaacaacattatttataccataaaacataattttataattggataattgtagtttatcagattaactcttcccatcaatattaa

SEQ ID NO: 99283 - DNA, 692 bp, Zea Mays
gaaggagaagaggctagaacttttgagacagcccccattttagagatgatgaagcattctaggttggttgtgcaagaagagaaagaactaattccaacataaatgttgttgatgccgaagctgaaccgaccatcaccgaagctaatagtgaaaatgaagatgaggatgatgatggcattcttagcccgagcaaacccaaccatattgaattagggaaatccacagttaagacagaggatctaattttaatgaaaaaactaggatgctttggagagaatgatgatggactggttcattttgctggagaagaggtgattctagagccaaaacatgatgaagtcgtagtcttcaaaagcttcttcaggggaggacatcggttccccctttacaaaatgaccggtgaggttctgaagaagttctaaatttacctacatcagctgaccctcaatgtcatatttagacttagtgtgtacatttgggctcttcaaagccaaggaaagagtgtcaatgctgaagggttttttcgggtgcacgaactccattatcaaacgaaggctagggccgacggtttgcacaagaactttgggtgctaaaactttgcataccgaaaggacaccaaggctcctgtgattggttaccgcactaagtggccgaccgggtggacaaatgaatggttttacatgaaggctgac

SEQ ID NO: 99284 - DNA, 469 bp, Zea Mays
attgattacccgcttcggaattgcgctgtacagccttgggaatagatctgcaattctttttccattcagccatttatccttccaaaatttggtattggttccatcccctacttcagtggtcactactttagaaaagaaagctctagcctttttaggaacttgtatttgaagaccagaccaggggcgggagtgatcagtcttttctagccaaagccatctaagtcgaagtgcccaacataattctggaaactagaaataccaagccctccaaggtctagggggcggcagacttttccccaggcaacaagacaatggccacctctagcttctttgcggcctctccacagaaaacctcttctaattttatcaatagcatccaaaccccactatgggatatccactgccatcgctaaataaacagtcattcttgtattgtaagaacatgttgaacttgcactcttcttccggc

SEQ ID NO: 99285 - DNA, 298 bp, Zea Mays
caagaacacaaatgtagcaagaccacgcacacaagtgaaaaaagagcacacaaatgaaaaccaacagtctcaacacaaaacacgctcagatctctctcgaacgaaccaaggcgtgatcagagtctcgaagtatgttgtatgctcttatgtttgtctcagtgtgttgcacaggtaccattccatggcgcccagggggtcatattatagccctaaggagccattggatcttcatttaggaagcaatcaatcagcctttcctgtctgcttgcaccagattgaataataagcgatatgtttc

SEQ ID NO: 99286 - DNA, 632 bp, Zea Mays
gtgtgcaggtgtacagtctagggacggtgctcaacaacgaaggtgaacatgctggttcatgtcgatgggctgggagcggcgaaggacaagtgctaggtcttgatcgagggactagagaaggtgactagctgtggtggctgacacttgggacatgcaccggtacgaggacgtggaggaggagatcatgttgccaaaaccgacacgagacaataggacacgtgtctaggacatggggggcgtgtatggagcacgctactcacggcaactttggtggttgagcctcaaaaacacccagcgctatagttcgctggtttcgccaagtttgggcctcaaaactcgatggtgtagttccagcaggaattagaggcggcacgtggcatcatcgtgaagggtgcattgaggcgaagcaactttgtggaaagcatgtggtcctcaaatgcatattccaggagttggaccattttacccccggttaagtggatgagctctatgtttctaggggtagtttagactagtgaaataaccttctataaatagaagggagggctggttgttttagctatctctttgggctttagttcatttggctttctcattttagttgttctctagttttcttattctctagtttg

SEQ ID NO: 99287 - DNA, 801 bp, Zea Mays
cacgacgcgatttgtggaaagatcaaggcaatgatatcccttgtgtttaggggagtatcctataaacacacaccgagcagaacggggaacacgtttatgtggggagtagcggagaggtttggatagcacgcacacccgaagacacgaagttggtcataatttggtgttttgttgtgaagggcatgaagtccgaacggtttgtgggaaggcggttcagtaagtaagtagcagtatgaagggcatcgacccaataccgtggagccatggaggcttgaaacaacaaagtgcgaatactgttgtttgtggtgcgcatcatacgttcggctttaccgttctgtggtgaggtgtaaggacaagacatgcgaaggtggacaccatggttgagaaagaacgtgcgagtggaggagttgtcgaattcccgaccattgtcgcattgaaatctcttaaccgtgcgcccaaactgtgtaagaacataagagaaaaaatgagtaatagtggagaaggtttcagactttaggcgcaacggaaaggtccaagagtagtgcaaaaaatcatcaagaatgagaagatagtatttgaatcacgagaagatggaaaccttatggctaggaaggaaaggccccagatggaaaccttctaggaggaaaggctccataaggaaaccgcctagaaggaagggcaggcactctagaaggcagggtagcagcacagggaaaacctcctatagagggggatggcgcagcatccctgggccggatttgtgcatcagcatatgacagcccggccccactcacaccaaag

SEQ ID NO: 99288 - DNA, 665 bp, Zea Mays
tgctagcccttctgctcctgctgctgaagaagtatcggtggaactctttactggagctgatcccaatgggtgtggccctgctgatgctgatcccaatgggtgtgaccctgccagagttgatcccaatgggtgtggccctgctgatgctgatcccaatgggtgtgaccctaccagagttgatcccaatgggtgtgaccctgtgccatttattgtccgtattgttgacgaggacgaagaagaagaagaaggcccactaattcagaagaatagtcgacgttacagagtaagtggggggagtagcgatattccttctctagtcctgtttgctcttgttggtctgcaagaattatccatagcaaattttgatcaggctctcgaggatgttgttcctgaagatctgctgtccgagccagctgatggtgatatgatggacgtctgctctgacattccagatgtgggattagaggtatcccgggcagcgtctcgtgcctcgtcgaccttggaaggcggtcttcagagcctagaggttggtcgaagttgttcaattcccatgggggtgactgagagtccttcagccttagaggtggctattgtggagaacccagtcctcaaggatggtgctagcggttgcccagcccccgagggtgttgccggtaatgatccgg

SEQ ID NO: 99289 - DNA, 458 bp, Zea Mays
aagaaatcttcgaatgaatgcctgaagatactcatctgggtcctaggtacaatgaaacaaagcttgtgtagtgactggctttgactggaagccttgaaaaatggtgaggagcatctccttcaaattttgccattaagttacaattcttggacgaagtgacgagtactaggtctgatccacattcctaactgccatgacgaaggacttcgccatgactgctgagttaccaccatacgaagatatggtagcttcgcaactcataaggaattgatttggatcagttaggccatcatatattggtaatatggggtcctgtacaaaggtgccaaggtgtggcctgcagctctggtgtcagtggggaggcttcgtcgtagaggaaatcttggaagttgactggttcatgacgaagattgtcttggttaaaaccctcataattctggtccctgtagttgttttgg

SEQ ID NO: 99290 - DNA, 585 bp, Zea Mays
taatttggcgccaatttggtatttggactttgtggatttgagctttggaaaacagagaacacatctgatctttgtgaaggggttaaaattcagattctaaattttctgaatttcctaatgagttctcacttggggggtaattttgagaattttgcagaacccttcttataaatctttcttactatactttgtagcctatttagtatactataactttgttatttggtcctcatcatggtgttttcatgatttttcacaatttttccctttttgtgcttaaatggctcatttagggtcattttaagttttgtgcatttttcttaccttggggtgcatgatatggttaatatatgattcttaagatgaaaggacttactcaaatctttgttcctcaagtgttggggtcttttgctcaattttgattacatgtgataatggtcctcagtgggggtactgaggagaaccctaggtaacactggggtgttacacggtgcttgtttattacatatccaaaatgagttatcgaggtcagctacctgagccagccaaagtccgcttcttgtgacctcaaggaaatcatattca

SEQ ID NO: 99291 - DNA, 729 bp, Zea Mays
tagcggcttgtttatttatagagtttcacagcttctgttggtcaagcacaacattcacattcaatatcaattcttgctgtgcatatctattaggatcagtcatgaaccgcaaaacagaactggaactgtaggaaatgatctctttgagcttcatttgtaggtacttgatgtaattaagatgtgttttaacttagaaaagactcgctgaagctttacctgtatataaaaatgatggtcatgtcacatatgggaccagagctaattagaaatttccacggagctggtggacaaactattcatcgtttcctgattagagtacagtagatgcagttatcaaaaagagtagacccagtgctggatgctcccacatgaatggggtctggtgaagggataaaccaaggcaagtctttccctgcaaacgagctgctaataacttagtgagacagttctcaccactgcactagacctgcccttctagtaggtgcaattatcactgggttattttactttttgttgataactaaatgtttaaatgatgatctttttagtgtgtttagttccatggaatataccaagtgttgtggctaccccacccttgctgcagtcctcatcagtacccccacctattgttgtttttcaatgatgctcctttggaagaagctccacaaccaccaaaatatcaacatgtgaccacaaacatatattggagattagggcgtacaccttgag

SEQ ID NO: 99292 - DNA, 403 bp, Zea Mays
tgaatggttttatgtgaaggttgacgagaaaaagagggagaagcttatgactatggtgatgagtcccttgagaatgagcttcggcatgacacgaccattgtgcaatatgcaactcagctccccctgctagttagccgaagtggaatttagggttgttgcggagcatattagtactcgggatttggttcaagaatacctggccaataaaacttttccaatgtatggtgggtgtggaatgccgaagaaaaaagtagaagggaataaatatgaacttgtatgacttccctaccgcttcaaattttagaaaagtttcagcatgcccgatgtcgaatggttagaattaatagaaacaatgtgcaattagatgctttggaattatacgaagaaggaagatcaattgatg

SEQ ID NO: 99293 - DNA, 499 bp, Zea Mays
attcttcatgtcgaagtgaagcatagctacatccgatttttaggatgcagggataacctcctttctctttctggcggcacagcaaggggcggctgcctgcctttgttgcgtagtcgtgtcgtctaggagatcggccgctagggcgatcgagactgctgcgcggtgggtctccacgattccatccaactcagcaatagaagttactaccctattgttgaatatttatggctggctaaaagaaccgagggaacagtatatatttttgaatatgataaatagaaaagaacggagtgagtagtatataataggtcgacatgatcattgctcgcacacgacttgggtacgtcccgtccttgcctctccttgacggttgacatggcattggcattgcatgcatcgtgatatcagccacccatgggcatcattatttccaagcaccaccagccgaaattgcataaatctcccaagtggttaaggtacggatccagttcaccaccta

SEQ ID NO: 99294 - DNA, 439 bp, Zea Mays
catggatgtcaagtcagctttcttgaatggtgagttgagggaggaggtgtatgttcaacaacctccaggatttgttgtcaaaagtggagttgacaaagtgctaaaactgaaaaaggctctttatggtttgcgtcaggccccaagggcatggaatgcaaaacttgacagtgaactgatgaagcttggttttgtgagaaatccactagagcatgcagtttacaggaggtcagatagagatggttttctgctagtaggtgtttatgttgatgatcttataataacaggctcaaacaaagcaagcatagaactgttcaagcaggagatgaaagggaagttcagtatgagtgacttgggattactcagttattacttgggggtacaagttaatcagcaggcaggaatgacaaagctgtgtcagagctcgtacactctgaaaatt

SEQ ID NO: 99295 - DNA, 702 bp, Zea Mays
atgactacttatttcttaattaacttttaaagcttgccactaatttcaaataacctttgctccatatgaataaaatgagaagtacatatttgcctagctaaaagcaataggataattaatataatatacataaaatatttttttgcatctcaagctggagtttgtgattgaacatttgtctcaaattagaaactcagacctgaatacaaattgaaattagaactgaaactaggaagcaggaaatataaagaaaatgaaaaagcaccaaaaccatctcatgggccaaaatcgtcattaggcccattgcccagtcgttctcctggcccaagcaccatatatccagctccacactgacaacagggcccctcctatcagccgtggttcttcctctgtcatgtggaccctacctgtcatcttcttcttctctctagcgtaacaaacggcaagtctgtggcaattccaaacagaaatcgcgagcgcctcggccgattcacggactcctgtcgctggtcgttttccctcaggccaggacgccataaccctgtcatatatatgccaactcgtcgccactattttcccaagctccatcgccggcgcagacaactttggaacatgtcgcaagccactctcacctccccgtcgaatcgaccttgatccttggccacgggtgaaagctgggagactatgggagctctcacacca

SEQ ID NO: 99296 - DNA, 706 bp, Zea Mays
gttcccggtgatctaatgggttctagcttaattgttcgggtcgagaagcatcaagggcacataagggtactgaaacaagagagcagaggacctgaacggacctgtagcacgatggccacggcgaggtgctcacgcggcggtatgtagaccgatttggggataatgggcaattaggcagctctggtggacaattagaggcaagtgctggtgcgttggacgcgtaattacctagcggagttccctgaggcttcaatttatagcacgcaaaggtggtggtgctcaattcggaggagaagtgccggtgaccgaggagaggggtgagtcactacggcgatcaaccgtggcgatcgcagggcaaagagctatggcggtcactaggcagtcactacagctcacgatgacgcgataaatgtcctaaggcatggcgtccccatggtgaatggcgaacatgccggtgatggccgctcggccatgtcaccggtgcgaacagatgaataatcgagcgcatagtacttccaagctcatccgcggcaagatcttttacccggggatcgttatccacgtttatccaagcgtgaatcgcagcgttggcacgaatccgcgtgcaagatcaccggcggcgaggtgcactgcacctgtgattatatccagtgcactgtaccatcagtttctcattcagtcatcctgacataccactttgcagagc

SEQ ID NO: 99297 - DNA, 491 bp, Zea Mays
ttaccttctcaaatattcatattccaccagtttcaccagcactggtttcatgatgttcatctctttcattgagataaatcaaagcccaaaatattaatttcatcttactaagttcatcccctctacaattagaactgtaggtggatataaagacggagagtaagatgacaataatatggtgtggagttacctagtgaagctaggggtggtacagttgacgatgtcgtcgtgctccctatccatctccagaaatgggtagttctcgcacccgttctgcctgaaatacacacaacaccccaaagagcaatcaaattcaaacatgtgagcatgtgccgcccgccaccataagcaataatgctacaacttgcaataggtattcaatgctacaacacaaaaaaataaaatttggcactgattggaatcgagaggggcgacaagctaaaccctacccgctatcgagaacggacaacaccaggcaccgcacgcaggca

SEQ ID NO: 99298 - DNA, 465 bp, Zea Mays
atactgttttgcgcaaggctatcagcaagatgatcctttgacatggccgaaagtccttcttcaagcttcagaaatcccatacttttagctatctctcggcaaacggatatttctttgttgtccgagagacagtacaggaaatcatctttgttagtgtcgttaaacactaaggctcccttcgaatattttaatttttgggcatagtgtctggcttccaggatttcttcttcggataatttttccccgaagcgtgtcgataaatgtaatcaacatcttcgactgaagcttcgggggcaggagattttgctttttgtgccataccttgccctactgtcatgtcggtatctgaagtttgctgatcagccttgtcctcaggcgcgacaaccttcgtctcaatgggcactgtaggctcagcttcggcttcggcctggcccttggcaacttcggcaattttcttaataggag

SEQ ID NO: 99299 - DNA, 461 bp, Zea Mays
gacgttgttatcagatggctattgatagcagtgaagcagatccactggagattatcaaggttgtgtctgagttctcagatgtgtttccaaaggacttaccaggtatgccacctgagcgaaaagttgagtttgccatagaacttcctggcaccgcccccatctttaagagagcttacagagtatctgggccagagttggttgaacttaagaagcagatcgatgagctgtcggagaaaggttacatccagccaagcaccttgccttgggccgcccctgttctatttgtggacaagaaagatggcactaggaggatgtgtatcgattatcgagctctgaatgaagtcacaatcaagaacaagtaccccttgcctagaatagaagatctgttcgaccagttgagaggagtcagcgtgttttcaaagatagatctgaggtcaggttatcaccagctcaggattcaa

SEQ ID NO: 99300 - DNA, 655 bp, Zea Mays
agtctatccaaaaaatccgacgatactgaagagtttgagttcaaagaggatgacaatgaggaccgaccatcaaaactgagccacattatgcttcaacaaatcaaccatgatgaggggccatattgaggtcttgaataatactaattaaattagcgacactactattgttaggctcagcggagaagatactatccctctgctagagtagaatgaggtggtagtattctcaagctttctgctatacctccatgcctttcggcctcaaaaacgctggagcaacttatcagagggcaatccagacatgcttagttgatcactggggcaagtgtgtagaagcttatgtcaacgatgtggtaatcaaaacagaaaacccagaaaaactcatcgaagatttacaacaggtcttcaacagcttgaggcgctaccactggaagctaaatctagggaagtgtgtgttcgaggtacctgtcggaaagctatttgggttcatcattagccattgaggaatcgaggctaacaaagaaacaatcgaagctataatgaggatggaaccaccacggtcacagaaaaaggtgcagaggctcactaggtgcatggcagcactaagccgttttatttcaaggcttggtgaaagggggatgccattctataagct

SEQ ID NO: 99301 - DNA, 712 bp, Zea Mays
ttaaactattttcatatgtctatccactaccacagtcgactagactagaaatttcaaaacgctgtaggggtcggagtaccttttcttgcggtcttaggacatgtacaatcctattaattgagaagtatttttaggggcctctagggggttaagtataaaaaatcaagaaacaggctcttcactaagagtccgtctctttacgactttctatacatattgtcttttaactacattaatattctaggggctcagagttgtatggtacaatttcttatctgtttcttctacttaaaaaaccgaacaaacgctctagtttgtacataccattaaaaagtccgacccaccccatttgcaccagctcctcggttccggtcaacagtctcgcgagtggcggtggtcctccgtcctcgagtcctcgacttcaaaacaagagcctagaccaggggcacgaccatcttttcctcaccctcgcacacccggacacccagtattggaatctcgcgtgcctatagatgccgtaaaaataacgtacaaacgttgaacccctgccaccggatctcaccccgctgcggcatagggcctgactacgctgggttcacgcatcagcgttggagggcaggtaatgcgaacagtaatcgagacccctacgcagttcgggcagcaggacccacgaatttgactggtcaaaaggtgtgtcccaaccaaacccaag

SEQ ID NO: 99302 - DNA, 1694 bp, Zea Mays
ccaccttcctggtctcggtgctgacatcgtcaggcgcgtaacgagccaattctgtgaacttgtgcacgtactcactgacagatcttccaccttgagttagttctcggaattcatcttccttgagttgaacgatcccctggggtacatggtgctcgcagaaagcagtttcgaattctacccaggtagcatccctgacggcctcgctgaaggtatcccaccatgctagggccatcccagaaagctgatgagcagccaattgaacacgctgattttcggggcatccgatggcttccagtttcctcttgatcatgcgcagccagtcatctgcatcgaggggattgctagaccccgcgaacgtgggaggcttgagtctcagaaattctcccatcctgtcctgtggtctcccaccacctgggtgctggttttccagacttctagtgaggatttcaatgagttgggactgattggctagaacttgggccaaatctagtggtagtttcggaggtgtggggaggtgggtctcactctcttctccgccagcttctccttctgctcttaggggaaaacctgctccaatcccggaggcggtaggcatggttttatccgaagccatctgccaggggaaaagagttactactatgcacatgccaaaattttttttcaaccagttactttattcattacacaagttcattacagcatacaactaccataagttcattacacgcgagtgctatctagggtactcccgaactccttctctaaagtgtccccaaattccttgagaaggtcatcaaggctggctagggacatttcctcggtgtcggacgagtttcttattctggtagggggtagggctggaggggcttcttccttctgctcagtctgacatccttggcttttggtcttcttgcggatttttcttgcgggggcgagcttcttcagcttcttgtcgtaatccatcttcagagtgcggtaggcctcacgggtgtcggtttcctcgccttctgctatctcgaggctctcttgaagggacaccttttcccttgtaagttccctgacttgttgctccaggctttccacccgggagtttaggtgagtgcagtgggaggcaaggtcatcatattggttatcaagggtgtggaggtatccagccatgtagacaatggtggggtcatcctcgatagggtctccccctgacagggcctgaagtcttttcctccaggcgggggtatttttgttgctgggtgggaagtagcggaggggggtttcaaagattactctgctgtagctttggcatagttgtcggagggctttttgggcaacattctggcaagtatctaggaagcggtatccggtgaaagtgacttggaaagaaggatggttcgggtagtttcggctttctcccaggtaaactgccatagagcacttctccattccattctcgagatactccttccagtcatattctggcttcttgcggattcccatgcgaagcgcacaacttcgcaatagatgtgggaacccctccatctctgagcagtaggatgtcctaatgaccagagagtcttccatctggaataggaaaagaagggtctgtcaatatcggggaaaaggagagaagatttttcttggggtaagaggtattttcttttaaggcaagttttaaggtcagggctacgacctacggccag

SEQ ID NO: 99303 - DNA, 481 bp, Zea Mays
atcacatgaacacacatataagaatataagaatcttacaccactttaatcacatgtgcatgataagctaataatcagttcataatagctccacaacatgttcattacaggtgattaataggtctaaaatagattcgaaacagtctcaggtagttgctattacacacatacacacacaaatatgtatacataatggtgctaaacattcagctatgagcagcaccatccatctccttaaacattattgatctgcttagaagacgtgcaaaagaatcaggcatcaccaccgccatatacatcacctggccactgagcaaaataataggcaaccacctaaggaattcacagcaaaatagccagccaacaacaccacccttccatccacaaaagagtacctggttgagcctaaaacaagtgcaaaacatatcagctaagtacaagttgaaacaataaaactaatgatatgtgaatcacctaatcac

SEQ ID NO: 99304 - DNA, 333 bp, Zea Mays
tgtatacctacataacttgcaacaaactgaatctacaattttagtaattatgcaataaccatcgtatgaaaaaaactgaattttatgcaaagccaggcgtcaatttatgttgtgtacatatttgcagtggggaggtagatacaacaatttgacaaggaagatacaacaaccctcataaatatttgtgaacaggacaacaatagaactaacagtatattatagataaaacaaatagtgtattacataaattattctaacacagataagcgtcgaatagaatgctgaaattagctttttcatgcattgtattgctcattatagtgccttttaagc

SEQ ID NO: 99305 - DNA, 621 bp, Zea Mays
actaaattacccggttcaagttttactacctttctaccatgactaccagcaagtttatatttctcggtcatcttttctatgttctctttagttgaagcatgcaatttcaaaataaaatcagcacgctcctttgcatcactatgtacacactccatagtaggtagaggcaaaagatcaataggcacacgagggttaaagccatacactacctaaaaaggacttaccttggtggtggagtgttccgccttattatacgagaactccacatgtggcagacactcttcccacatcttcaatttgtgcttcaatatcgctcgcaacactgtagacaatgtgcgattcacaacctctgtttgtccatacgtttgggggtggcaagtagtagaaaacagcaactttgtccccaatttgttccatagtgtacgccaaaagtgactcaaaaactttgcatcacgatctgaaacaatagtagaaggcataccatgcaagcgtacaatctcttttaaaaagaggttagcaatatgaacgacatcatcgttttacaacaaggtataaaatgcgccatcttagaaaaacgatcaaccaccacaaaaatactatcgctccccctcttcattcgag

SEQ ID NO: 99306 - DNA, 341 bp, Zea Mays
ggcggttcagattagagtggcatactgtttcaatacattaaaccctagccgtagatctctgatcgatcggatccgagcgaaacttgttgcattaaattctgggtcgacgatcctcgatcggacggtacctgttcctttccagttcacaccgctgcggatctaatcaggcgcgtagaattctgatctagcggtcagcatttcccgatacccgttcgcgggttagttttacacatgtgcccctatgtttttcctatatagaacccgccgtccacatacattgttcactgagtctaggattttatgcgagcagccccctgacctttctggaaaatgaggccaag

SEQ ID NO: 99307 - DNA, 672 bp, Zea Mays
cccatacttggtgataaatgatgtctttggtatatccgaaggtcggatcctgagctgatggtaatctgacctcaaatctatctttgagaacacactggatcctctcaactgatcgaatatatcttcaattcggggcagggggtacttattcttaacagtgacttcattcaaggatctgtaacagatcctctttgtaccattcttcttctccacaaataacactaggtctgcccaaggcgaggtacttggtctgatgtagcctttctctaacaactcatcaatctacttctagagttccaccaattctggtctggacactcgataggctctgttggaaattggggcggtgcctgggataagctctatggcgaattcaactttcctttttggtggcaagcgtagtaactcttcagggaacatgtcggggaactccgacacaattataatatcctcaattggtttggcctccttgccatctactgacaaatagtgacaggctccttcttctagttctggcaaatacagttcatttactacttacttttcgaatggggacaccaactttacggtcctcttgtcacaactgacgatggcttttttctgtgtagacaattcatccctaggatgacatctaacccttgagtacccattactactaggttagcaggaaag

SEQ ID NO: 99308 - DNA, 316 bp, Zea Mays
tgtaaggctacaaccagcgtccaacaatgagttatgagtgctaaccctaattcatccgttgatgtgttcctcttccttcagaccatcacacggccaccacacatgctcaacgccacagccgtcactcgtcggctcacccacacccagtcaccctccatcggtcaccctcgatcttcatgcatcacgccttggcccttgctcagacgaccaaatacgagatgcccagtcggccagtcatttgcatctcgagcgaactcggccattatgacttggtcgccgcgcgccgccggccattgtgtccttacctagacatgtt

SEQ ID NO: 99309 - DNA, 712 bp, Zea Mays
tgcacagcaaccgccagttgcgcgaccgatgcctccagatgccccacgcgatcctcagcggaagccatgggaagggatgcaccagaaccgcctgaatccgataccagttgatatgggtgttcccgttgataggaacgagttccaggccgcagcccagatcgagtaggctggggcggcaccgggatagctcgccggcgacctatggtagcgattgacggaaccaccggccgtttatcgtcggcgacgcctgagactggaatttgtggaacaagaatgtcccttttctcttctgcctttctcccttttatttccccacaatctctttcctaaacatagaaactatagagccgtgtaatgctcaataaggtaactaatgctaccattacaaaaagggactatttgctaccaaataatcacagccaatcaactcagtgtttcctaaaataaactctatgcggctgggccatatcaatatctcatgcgtctaagggactaaatataagggtcagaaggcgaatgagctggacaatactgggttgaagctttggtacatagggataactgtagatagaaatggagtaggaatttgattgataagagtgtctagaatggtgtggtggagttttgattgataaaagcctaaataacaatatggtggatgtgagaaggcaaagagatatgattatatttgtcaaacttgtcattgataatt

SEQ ID NO: 99310 - DNA, 1407 bp, Zea Mays
agtcctcctctcctgaaagacacaagaggtttcatcaaatgttactgtacacttgaattggtcaatgattgaacttacagaaaggagattgactggaaaagatggaacatgcaggactgaagataagttaagagatggtgtacactcgatagaccctacaccatggatttgttgagatgtaccatcagcaatttgaacagactcagaatgtgtgtaaggaatgtatgttttgaaaaaagtggatatgccagtcacatgctttgatgctcctgaatctatgacccaatctatgggatgcctacatgaggatgaaaaaacttgtgtctgagtaccttcgcccatgtgggcgtagttggcaaagttaccgaaagagttggcggcttgtccattaggtgaagtgaggcactcagaagacttgccctctgccattgttcccactgcttaacttgttccccagtcaaagtaacagagggactctcttcaatggtagctatgttggctttagagccaccacgacctctacctcgacctccaccacgaccaccatggcctcgaccatagctcccacgagtaccacctcgacccccacgagatcctcctcggccatcatttcccttaggattgggacaattgtaactgaggtgtcccttttccccacaattatagcattctctatcttcaattgtaacataggccgacttcacatgatcatcatttcccatcactcgacgtctgctctcttcatcaatcatggctgacacaacctcatccatggttggaagactctcctggtgacaaaaggcagctctcctgctctcaaactcaggatccagattcttcaagaagtgggtcactcttctgtcatttgcccacttatgaacactctgtgcatcctatggacaaatcatttggaggggagcatagtgatctagttccccccacaagtactgaagctcactagcatattgttccactggtctccccatttgtttcacggcatctgccttgctctggatttccatcgtcatcatcacatttccctttcgagagtatatgttactcaaggtcttccatatctgggatgcggtgcgcatagcttctaccctcatgctgacagtgggggaaatggatgccaacaaccatgccactatcacagagtttgttgcatgccagattctccattctatgctaagcttatcaaccagctcaacacatgtctcctccaaataatgctccactcctttgcctcccagaagcacatgcactcttctagaccaactcaagtaattcttgctgccctctaacttcacatcattaggcacaagttccaatttcagctcagacgggcctgtattggccttggcaccaatcaacccaagtcccatgagctcttggatcatgcttctc

SEQ ID NO: 99311 - DNA, 787 bp, Zea Mays
ctcctgtgaacctaataatctgatgttctattttaacttgaagtaaaggattcatctcgatctactcaaaagtacacattataaggactgcatgttctatggaagactgaaataaggtagagtgcaattttatgttaatccacccacaactccatgataccagtatccttcaattacatattttgttcaagatactactcaatactacaaagcttagatattatcatatatatggttgcattgcatatattaaaataatttctgaagccaagcataaactatagttaactattggtgaaacaaaatgaacttttcttaaaaataaaacaaaacaaataacctatcaagtgattgctaatggttaaggatttcaatttatcgtataactgtcaagtgtcaaacattaaaaaatatcttatggtttataggtttatggcccagagggtatcttagaagtgattgctttactgggaaaagaaaaactagaatgcagagtaagatgtcctaatagattatactcgaacaagacgttgagatggcaaaatggaatggtcctactcattggatattatatttttccagtacccattatatttcatggaatatagcaaagtaatatcaaattacgacatctatgagactatgctgtgtttcttagagtatagatgcattggctggcaatggtacactggatatgtgcaaggatgacaacggaaacaacatgctcaatctcaatgaagagataaaaaagagggtggaagagattagggtaaaaacaaagatcaac

SEQ ID NO: 99312 - DNA, 501 bp, Zea Mays
gtcttatgacatttggtggatgaccaatgttaagcactccatcaaccgcaatgtcatcatcttcatggtaacctagcttttgtttagcctttgtaaacacatcgctcaaggagggtctaccaacaaatagtacagacatgtgtcgcatgtcaatgaacttggcattttcatagggatcttcttccacattgcctccatgatataagctcataaaattgtccatctatttgaaacacgaattaaacattcaatatccactatggatggttattgcctaaccacaacccactaataactagctacataactataactataaccacaacccactaaaatactaaccaccttataactaactacttaataactaagtataaattttgacagcacctcccctgcacggggaggatactaaaacctgcacattcaactcacattcatcatattcgatcaaattcgcatttatcacattcattttcatgacactcacattcaacaaac

SEQ ID NO: 99313 - DNA, 294 bp, Zea Mays
ctgcagctgctaaggaaaccccggtcgtagtgcctgaaaaaggggaaaaatgcctgaaaaagagaaggagcatgccgaagatactttggaagaggaaaattttaactttcaaaacctaattgggcaagaattgtcgaaggctgaaaaagaagaactgaaggactatgccatatcgtgcgggtatcagccaggggcactactcttcggcggtgttgccgaagagagtttaggatgccttcgggaccgaattggggtgaaggttgtcagcactttatcgaaaagtgttggttttcc

SEQ ID NO: 99314 - DNA, 695 bp, Zea Mays
gtcttagcttcggcaggagcggggtaacttaactccaaggcagaagaaggcccttcagcaagcttcgacacttcggccgtttcaatgtgtctgggatgatgtgtcaaaactttaaccctttttgtcttcagcgcagtagaaatcgccaaagcagcagctcttctttgcttcccctgctttcgtgaagggtagcagtagtctgggtatacaaaaccaataacatcaaaaaccctatttagcattttcttgccccagcctctgaaggctgcagtcatagcatcatcttcgacccttgagtaggcgccaagcaactcatcgttggttgcgtcaatggcatctagccagtcgtcgtttggctcatcaaattggcttctatatttgaatgtgtacttcaagtaaatcaagccaccttggttagacccagcaacagtctccttcggcatctcccacccactcccgagtggccataccttgaaggcaatgtgttcctagactaagtccctggtgcctatgtaagtgcacactgtgttataagcagcttggcacgtctctatgttgttcccaagggcaagggatggtctcctaatgccgaagtgagaccatataggacgttggataatccccctgatgtcttccctctcaaccagatcattctttacatagaaccattcttgcatccaggctcccggccatct

SEQ ID NO: 99315 - DNA, 942 bp, Zea Mays
cggtattcgaataagtatctattttcgtccctaaaagaatggaaactgcatatacccaagtttagagggttttcaaatatctacttacaagtttttttgtcaaacaccccctaaattagggaggttataatattaaattacgtgccacacaagtcagtgcctagttcccgcgacctagccacacgtcgccctagagcaacacgcactgcagcccacaaccacccatcaaagtatcgaatcgcccggagccatacctagctctgtgctcttgccaacacctgggtcctactggtcagcttcaactcgaatctccaatcatcgttcatgtacagatgggagcacaccgtcgctaagctccccacgttcacgagcggttcggccacctcgcgcccatgcccctatctataaatgcacgcaccccaacgacatcgctaagcctcgcccttgatcatcgacgtcgctaacccacctctctgctcatgtgccatcgtcgtagcagttgttgatgtgttcccatgcctgttgcttgtcaccaccatcgagttatgtcgataagcatcgccttcaaatctcgtacccaaaatacaccacagttcgctctctcacgcgtccctttgccccttttaccgccatccttgcagttggatcgtcgctctagttcacatccggttccaacaacaccagattgcctctagcgccaaaggaaataccagtgagtttctcgtccaagcccaagccacgggctctcgttaggttgccatttacaccttattagctcggcagtttttgtggttctatatagaccgagtccgcctccatcgaaccccaaatcataagaccttcatcagccgttgcagccatgttccgagcttcacaccaaggagaggaacacatcagactgctcttgcatttgattacccattttcttgtgtgtaattgttc

SEQ ID NO: 99316 - DNA, 1564 bp, Zea Mays
ctttctgagtgtaagttgattggtggattaatatgccaccttcaaaatgttcaagctgcaagcctaaacagaatttggttttacccaaatctttcatctcaaattcagacttcaagtatgagcttgcttcttcaatttcttcatgtgttcctatgatgttcaagtcatcaacatatgctaatataatacagaatccatttggggatcgctgtataaagacacaagggcaatcctcgttgtttgtgtagcctttcttgcttagaaattcactcaggcgattataccacattcttcctgattatttcaatccatacagtgatttcttaagtttaacactgtataatgctctatttttctcatctcgatttgggatggggattccttctggtattttcatatagatgtctgtatccaagtttccataaagataagccgtcacaacatccattagtttcatttttaaatttaagttcactaccaatgagatcaagtatctaaaggtaattcctcccatgactggagagtaagtttcttcatagtcaactccagggcgctgagtgaaaccttgagcgactagccttgctttgtaccttgatatttcattattttcatttctcttgcagacaaatacccacttataacctacagggtgtatgtgggatggtgtgcgtcttacgggcccaaacacctctcttttgtctagagaaattaattccgcggtaattgcctttttccatttatcccaatccggtcttttcttgcactctgcgatagatgccggttctgggtcatgatgaatgattgaggcaactttctttgcgaaatatatgtctacgttggttgttgctctattcatgcattctccagttaatacatagtttatggccatttcatcatgggatgcttcttgcatttcttcttgcgtttccctgctgcttcttattgcgggagcgagttcctttagtttttcattgcctttgtgtgcgcacatgtttgggttggcggtttcttcaacgggaaggttcaagtccggaatgcttttcttcatgtgttccttcccggtgccaggtctcgtctggctccccttcttgttttggggcatttttgtgattggttgtggtaagtcctctcaccctcttttcccgggacatatccaagtacttggggtttgagaagccagagttcctgtccttttgttatgaggcttcttaacaggatcgggtataccttcaattttctttggtatttcaaccctctctggtgcattccgtgcgggaacatgcgacttaaccacgctcttcaaatcacaaaaatggtcaggcagttcatttgctaagtcttgcaaatcgattatcttttgaacttctagatttgcttctttggtgcgagggtcatgagcggggattcccatggattgccatataatttctcggcatttctcatccaaaggttcttttgctccccctaatgacgggaaattatcctcgtcaaaaaaacagtcagcgaatcgggtcgtatgcaattctccggtcatcgggtcaaggtatctaattatggatgcact

SEQ ID NO: 99317 - DNA, 848 bp, Zea Mays
gacgagtgtgtctccggcgagcctgtactggccggagaatgcaatgatcggcgctccagtgcggctgacacccaattctacctataacgaccataacccctcaatcaattgcaagattccagctcacaatcgttctgtccacggtggcgatggaaatcggagataacttaacatgttctgggtgattcaaggcggtctaatccaatcggatggttctgtgagcaacaggggacatgagggaggctagaacatcccacagaaaagcacgagctaacctgtagacgtcgggccatggcgaggtgttcacgggtgcggaaaaccgatttggggagaaagaggaattagagagctatggtggctaatcggaggcaggagcgggtgatttggcttcgtgattacctaacaaagctagcggtgtgcttgatttatagtgttcaagagcggtggctcccaattttggaatggcgtgctggcggccggagagaaagaaggtcactagtggctcagtcgtggcgctcgtcggtgcaatggttctaaagtggtgagtttaggcgtgctacggttactaccatgcggtaaagagctacgaggtggcataagtgaggtcgccggagtaccacggcgacaccggcggtctggccacattgcacggctataggcgcagttgataagcttcaccccgtgaccaaatccactccctcgcgagatctttttacttccccgttgatatccactgcgtgtccagcacgaatcacggcgaccggcacaaatccgggcgcaaggtcactggcagcgagggggatgaatctgaagatcttttgcgcactataccatggccaacatcttca

SEQ ID NO: 99318 - DNA, 823 bp, Zea Mays
accgccctaagtcattgctgacttaagccaattgctccgttaatagggcatagtggtcaccctgggttaagtaagcgtgagcatgtcacattgtcacaccgccttaagtcattgccgacttaagtcgattgctccgttaatatggcatagtggtcaccctgggttaagtaagcgtgcagaaaacaattcaagtgcctttgagaatgaagtcattttattgatggtgtatctcccaattacagaatacaatgccgtcccaatagcttttgaaatctagctaggggtaaaacttcctgagatgctctatattccatgagttccctatttccgtgccatccatttgagtaagacgatatgatccaggccgagtgacttctgttactatgaatggtccttcccatagtggcgacaatttatgccgtccttcccccgttagaattcggcggaggacaagatctcccactgcaaaggatcgatgtggtatggccttatcatgatagcgcctcagagtctgttggtatctggctgactgaatcattgtattcaactgttcttcttctagtacatcaacatcctccagcgtagtggctttagcctcagctatgttttcgaagatcaatcttggtgccccaaacttgagatcagcaggtagcactgcctccaaaccataaaccatgaagaagggagtgtttccatgcagagctcggctgggttgagttcttaggctccagaccacatacgacaactctctgatccactttcctgcgaacttttcattcttgtcgaagactttctttctgagtgcttccagtatcattccgtt

SEQ ID NO: 99319 - DNA, 833 bp, Zea Mays
tgcaaagtggtgaatatgctgcgtgggagggagccttgtaaagtagtcggacgcatgggatttcagtcccctaaaatcacaacctgtgctaatctcacccgcataacgacacaagatcccctgccgactgttaaaaacaacagtttaggacgtcatttcaaaaacaaaaacaaacgcgtagctgaacccaaaaaaagtctcagcttgaactcttggtaggcaatagaaaatttcctgttggcatcatggggttggcagcactagctagtactaaatagaagcatcccagctgccaaagttctgtgctgaatagaacgtctgttccaaataaaatacacctgaggagccaaaggtcaagcatcccagttgttcaaactgccactgttacactccacgcttgtgaattgttttcctttctttatccgtaatggactgctaatccaaacctgctacttgtagattcctcattcgtcatgcacttttttccttgataaactggtgaaatacaaaggttcgtttatattatagtagctttttatagacaacgaatatattatataccttacctttgtcacaaatacgatctttcctgcctttctgtgttatctcgaaccagcggcttcagtttcgttctttcttggaccacccgttggttggtcctacagaggagaggacaagacgtcccggattgggttcactccgagctgagcctgagaccgtgagacgaactggtcaagcaaggtgacaacactgttgttaactaacgagcaacgactaacgacacctccatccccatggctgtgctgcactgcagacgggcggttcatgatgcg

SEQ ID NO: 99320 - DNA, 791 bp, Zea Mays
cagaagcgtcttgagctctaggatcaccggacgctgcctcaattgctcaacgtagtccatcaccgccgtggaatccgccgcgcaccatggcgacctactcttcaccacattaacccttggtaagcacttgaaccaattcggctcatcgttacacacgaattagacccatccacgctcgggttgtctcatcggggcaccggttcgaccgattcttgctgtccgccgtcgtgtctcgtgggcggcgccatcgtgctctgcggactggctgggagaaagaaggtggacattggatcgtggttacgcggatgagattagatcaggggataggcagttcggggtcgtttgatcttgatcgggtgattctggggcagggtagaagtactttaaatccgcgtcattagatgttgatcgaacgggtgggaatgcgtacctgttcagatcaaggcagatctaatctgggcggtaacatgctgatcggacggtctgcattccatcatacaccttcggtgcaactgctttgtaaaatggtccctaagtttttgcataatgaacccacaatccctgatagtgatagaagcactttagaaaggccctggaatttactttttaaaccctgagctctcaggattttgtacccagcgcccctggactttagtaatttatataaatgtttatagaaaatgatttgtaatacaaaaataatactagaaacttatataattcataggaaattcatcttagcttatttttaatccattccagtgccggtaattttgtattaatattgtcta

SEQ ID NO: 99321 - DNA, 310 bp, Zea Mays
gaggcgccctagccgaactagtcagcttgagccttctgctgatgagcagaagaagaagagaagacgcctccggcgagtatccagctttgacgaggacgccagtactttagctcctgctgctgaagaaatgactgcaactggccttgctgacattgatcccaatgggtgtgctccacctgctgctgaccccaacgaggatgctgtttgcgctgttactgtggaagatgaggaggaagaaaatgaagctccattaactcggaaaaacagtcggcagtttgtcgccagtggtggaagtagtggagttccttct

SEQ ID NO: 99322 - DNA, 552 bp, Zea Mays
gagaggtttagtctcctctggtcagctaggggtggcgctctccgcggacacggaggcgcagtcgccggaggttaggcagaccggggcttctagggcactgggggttggtctgggtagccagagaggttggggaggactcggcaagcactatggcaaggtctgggtgccgagaataggactaagatgggcagacggtggagggggatcctcgggcgaacccaaggttactctggcgagcaatgcccgtcgcggtgagggttaaaccggcgctctgcggtcggcataggctccggggagagggtgggggtgctctaggcctaagttcgggcttagggaggggttgtagtggtcgaacgccgtgaagatgctgcggcccggcgaggggcaacttcgacggccgaaatcccccacgtatagcagaaatggcgcaaaagagggacacaagaatgtcacttacccagatacggtgcttcgggcagcttggcacggcgcgatggggctctggttggccggacattgaagaatcacgacggcggcgagctccgacctgcg

SEQ ID NO: 99323 - DNA, 579 bp, Zea Mays
gtaatagtgaggtatgacatgtctagtttatgagtatcattaatccgatgttctataataaaatccgctacgacctggcctctcatagatttaaatggttcataggcaagtcatattctatgagtgcatacgcccacttaccaattctaccactcataatcgggttatgcaacatgtatttgatcacatcggcttgaacagaaaccgtgcaatgactagacagtaaataacatctacacttggtgcatgcataaaacaagcataagcataacttctaaataaaagtgtacatcatttcaacatccaccaacctccgacttagatatgtcaccacatgctcctttccttcagtttcttgtgtcagaacagccccaatgaccttatcttcagctgcaatgtataatctgaatggtactcctgcttgtggtgcttttaatacgagagccgaagacaagtattttttaatgagatcaaatgcttcctgctgctctgccccccaagcgaattcggcatcattcttaagccgaaggataggggtgaaggcatcaatcttcccgactatgttagagataaaacttc

SEQ ID NO: 99324 - DNA, 398 bp, Zea Mays
gttcagcaatggcgccgccgtctgtggctcgggcgccgtcggtgtctggccggagaagttgggaaagttgcgcagaccatagatcctgtgacgtacgattgagattagatggcgaataacgcttcggtcggaatccgcgttagccgtagattcccgatcggatggatactgggtgatttgccccctttaaaactgtgaccgttggatggagatttggcggccttagtttagtactggttcggttagaggtagatgtaatctgatccgtgggttgcgaatcgtgtggttcccgtgcgatgataccccttcgcccgaaacaatttgctaaagagccctcgtattttaatggattcaacctgcagtccactgggactgttcacagagtcttaggaattttc

SEQ ID NO: 99325 - DNA, 739 bp, Zea Mays
ttcgtgatatctcaattgtgagggctggaggggaaaataatgtccctctgcctgaagttgatgaagtgatagtttacagaagcttcatgaaggcagggcttcggttccctctggataaattgttggtcgaagtctagaaaacctttgaaatttaccttcatcaacttactcctgaagctatcatcaaggtggggatctttctatgagccatgaggagccagggactggaaccaaatgcaaaatgtttctgcaacatccatgagctgtcttatgagacgaagactaccgtaaaggagcaatatcacaacaacttcggttgttacagctttgtgcctcgctttgaggcgagctacccagttcccacatttcggaagagatggccgggggcctagatgcaggaatggttctacaagaagaatgacctaagtgaaagggaggatattaagggggttatccaacgtcctatatggtctcgcttcggcattagaaggccgtccactacccttgggaatgatatacaagcatgccaggcggatttcaatacagtatgctcttacataggcacaatggacttagtctaggagcacattgcttatagagtgtggccgcttgcaaatgggtgggagatgctgaaggaggatgctgttggctctagtcagggtggtttaatctacctaaagtacactttcaaatacatgagccagtttgatgagccaaatgatgactggctagatgccat

SEQ ID NO: 99326 - DNA, 390 bp, Zea Mays
acggccagcagacctctctagcagagtcatggacggtccatcgaccacagagacagaaggttttgcactagttcaaaagaattctaattttgaaacccgaagcactgttatccctcatgaaaatgctatcgtttatgctctacgaggcactaagttttacaccaatcaagttcattgacccctcttaatagtacaactgtgtatcttattaatctggtcaatttcttctctaaacacctgctaaccggcaaaagcaaaaacctattgtttcacctttgccttcacttgatccacaatcaatggttatgagtcccaaagactttactgtttcctgtggtccagtcctgcattcttatttctccaagaattgttagtccacagtcagttgtc

SEQ ID NO: 99327 - DNA, 925 bp, Zea Mays
cagataactcaaaagggctatagcctaagttgtcccaacgaacagcacattttctagcacccgtcttgccaataacttgagtgaaatgattatgggcctcgagcaatttatcttcctaactagtgagcagtctgccgtctcgaaccagcgatctaataaagttttttcttcttctgttatttgccatcaagtgaaaaaaatttgtgtttgcatcacccaggcgcatccagacgagtcttgaatgttgcttagctcttgccttttaaactgacactattccgaggattttcaattttagacttctcctgaattctagctcatccccagagagctgtctggattcctgctctttctcaaggaaggtaaggacggtctgaataattgctagttacactttaaaattgcctacagtctttcgactccagatctttagagctttagccgttcgggccattttcacatgcagccgaaggatggcatctgaggaactaacactagacgtccacgcttgctgaaccacctcattgaacccatcaatttttgtccaaaaagcctcaaatcgaaacccctatagaaaccaaaatccgagcaaccttgcataactagagggcaatgatccgaggtcatggtcccaatggcttgcagatcggcctgaggaaacgtatcatgccactccgtagtcgccaaaaatctgtcaattctagtcatcgtagggtcgtcttgttcatttgaccaagtgaataatttaccattgagatcaatctctaaaagctgaaggtagtcaattgtgtgattgaattgtcttatcactcttctatttattgaacctttgtttttctcccttgctctccttatcatgttaaaatcacctaggatcaaccattccggcttcatcatatttcgaatattgcgcagctctgttaag

SEQ ID NO: 99328 - DNA, 721 bp, Zea Mays
accaggtgttcattacataaattaaaagtgctgccaagatgagaatccttctccccctttttggcaactagcaccaaaaaggagagaaccaccagacacacatcaccactgaggaggaggaggatcaaagaactgatgcgccaggtgagttgcaaagtgttcttccccagactgagctgggggaggatagcttcctgaaggatcctggggcggaggataagaagaggattgacccggatccccctggtgggggaggcgaggcaaactgctcacgatcatcaaagtattcttcatcttcttcttcatcttctggagacatgaaaggcaccccatatgcctgctggtgccactcattgatttctggtggaggaggatgcagaggcatatcaggccaacggggagcaaaaggcatacccatagaggaagcttaacgacgaagattgtcattagtctcccgctgccaccgagccagctcatgcacatctgaagatatatttctgcacatggaaaagaatgctgcaataccatgggccagacgagcgcccatcctgcgaccatgacctcgaccacgaccatgaccacgtggtgtgggagatccgcgaccaggagatggacgcgagggtccggcagcagtaggtccacgagagctggagggcgctttcctcaaacaccctgctggatcctttggatcaatccagaaggggtgtaagatagatgtctt

SEQ ID NO: 99329 - DNA, 357 bp, Zea Mays
acgtgccatatctttgaattcactcaattttgacccaagtatcctatagtaagtttgaagatggttgttaggtgaacaaactttattaatgaagtttgctctatccttaacaagaatcaagagatcgagaggctggaaggtggtcagttcaggaaaaagctgaagatcaaactttgcaaatatctgaagaacactggtaaaagatctacggcactgttgaatcagatgagctcgagcgatccagtggggggaatcgatccgggggaggatagcttcgaacgtggcaccatctcgtgagttcagccgggcgtggccagagttattcaccggtggccgtcgtggctcggtcaattccac

SEQ ID NO: 99330 - DNA, 283 bp, Zea Mays
taatattcaacatcttctctactgactttagccaatcatcagcgtgcagaggatctggagagctggcgaatgtcggtggattttggctcatgaactgccggtgcttctcccggggtggaactggtggtggtggaggcatttcttctctcatcttctgcctttcctggcacatctcttgacgttcctgctgcatctgagcttgcatatccatcatcgtattcaccatctgttgcaacatttgcatctgagctacaaccactagatctgtcctagccggtggagg

SEQ ID NO: 99331 - DNA, 323 bp, Zea Mays
ccgcagccacggaggatcaccaggacccacatgcaagagatgacgtcaaagtgaagcatccatgcggcatgcccaggaacgacgctagttgttgagagaataccggagagcgtttgttgcgatctgttgtggtccgtaggacggagggaaggagatgacttccacatcctggccccacgcaccagctgttctaaatcggaagtggatgcaagatgggtgaggggatgaccactgggtcccgccagcaagtgagccgagtacgtagaaaatggcagggaaatacgagtgactccaggctgatggaaataataaaacaaaaaaat

SEQ ID NO: 99332 - DNA, 583 bp, Zea Mays
agcctccccatcagcagtagcctgaactcctccaagattagctccctcaggctcgagcgaaccccaagtagtggaagtagacctattgggtctgtcgtctgaagtcatcaatgcaggcacaactggggcagcctgtggagtcggctaagcattaccctagtcagtgtcattgttctcctcccccacaaagatggtctcacccatatgatctggacctacaggcttaaaaataggggttagactacgcaaagtctcatcaaaggtcacctcacaagtctccatgattcggttactctcaaggttaagaacacgataagaacaagagtgtaatgcataaccgagaaaaacaccatcaaaagaccgtgactcgaacttgtctaaatttctctgcttaaaaacaaagcatctgcagccaaactcccaaaaatgactaaccttgggtggccgtccaaagcgcaactcataagaagtcttgtttagaaaagctcgaagaaatatgcgattggacacatggtaggcagtgttgatcactttggcctaaaaatgcctaggagtcctatgctcatcaagcatcgtttgggcc

SEQ ID NO: 99333 - DNA, 586 bp, Zea Mays
gtgcaacacttgaagtggaaccgacagtatgtgcccatgctccatgggcggtagaggttgtggtccatcagtcggcatcccacagtacgactttaggaagtcgacatggaagacatcatggatctttgcaccttctggaagtcacaggcggtatgccaccatggccacatgttcagcaacctggaatggccctgcatagcgtggtctcatcttgacattggggcgagagacaagggacactgcttgatgatggagcaaccgaagccagacccagtctcccactgtgaactccaagtcgcgatggctggcgtcgtagtagcgcttggcgtaggcttgtgcttgcaggagacggtcgcagacttctgccaagaacatgtcccgttgttgtagcatgtcgtccatggtctgggtctgcgatgtgcccgtcataaagggggccaatgtcagtggttctcgactgtaaaccacctggaacagagtcgtgcgtagggcagtgtggaaggaggtgttgtaggagtactccatctatggtaaccaccccacctaggcgcgtgggcggtcaccggtgaagcagcgtaggtacatg

SEQ ID NO: 99334 - DNA, 683 bp, Zea Mays
cctggtaaagccaatgttgtggcagatgctttaagcaggaaggcccagtgcaattgtatgaacatggatgcaagagtcaccaccctatgtgatgagttgtgcaagctaaacctagaggttgtttcctctggtgccttgagttatatctcagtggagcccaccttacaagagcaaatagtcgtggcacagattggtgacaagggtgttcaggtcattaaggaaatgatcaagcagaaggcagaaaaatacaaatgcttccgtcaggacagcaaggggatcctatggtttggagaccgattggttgttcccaagaactccgagctcagaaagaagatattggatgaagctcacctttcaaaattctccatgcaccccggcagcaataagatgtatcatgacctcagatctttatactggtggaccagaatgaggagggaaatagctaagtatatatctgaatgtgacacctgccagagagtcaaggccagtcacttgaaggtagcaggcactctacggccccttcccatcccatcttggaaatgggaggatatttgcatagattttatcgtgggattgcccaatacctcccggcaccatgattctatttgggtcatcgtggataggctgaccaagacggctcatttcttgccagtgcataccacccacaagacagagaaatatgc

SEQ ID NO: 99335 - DNA, 379 bp, Zea Mays
attcgccatacgaacacagttacacgccgcctactagtttctaacataatccttacataactcgtaatcccactactcactaacaatacatcacgcacgacaactaccacatcaaccggttaatttatttggacaccgcctgcctagcgtaccactagtaccccacatttgactcatgctcaacaatacatcctttattcgattatacaacagcgacctaagcgtcatgttacccaatgcgtacatcttttctcgttgcgagtataaccatatcacgacatatacccgcacacctcaatcaaatatcttacgccaccaccactacaatacaccacaacacacacgcacatacgtgtccccgatgcattctcatgccaaa

SEQ ID NO: 99336 - DNA, 448 bp, Zea Mays
tttgtggatcccagggtgttacaggcaacgaggttgaatacaacgagaaagcgagcaagtagtcatgtagagtgcttcccaaaaaccttatttgtcctctcctgatgtagcattgctaatgacgatggtttcggatacttgaactcccgttcaccggtttacgctgatgatcaaaatgaaggagcgtatgcatcaatgttgtaagcaggaagaggcaagactagttgtgttggcttagacccgatttcggcacaccatttacacgcatgttgtgtgcccgcacccttcgccccacctggcctgactcgatgaggtgagtgagcgtgcacatgtgttcttccttctataccttcacctctctcaacacatgcaatatcatggagttcactcaactatttaatttgggttccctccacctcaactagcaaggcgggactagatgttgcca

SEQ ID NO: 99337 - DNA, 415 bp, Zea Mays
tttcgggttcgggtagcccgttctacccaatttaaaactacaagcttatccgctacattgcttcactgtagttagctttgtacattccggcagcaaacaatataatatttaatgtaaatatacaatgaaaaccaggaagcaaacctgcacaataagcatttagtttaaatttttttcacatagcatcactcactcacatcaaagcagccgagcatcaatgatcactgatcacagctcacggtctacacagtcacacatcactaatcacggtctcacacatcgttgatccactgtccacactcacggtctcacatgcacaacagacaactcgcagcaacagcaaggcagcaatacgggtgcagcacacaacaacaaggcaacattgtagcaggaaggcgagcaggaactaaacgga

SEQ ID NO: 99338 - DNA, 381 bp, Zea Mays
gacaagagcaagccacatttacttcctatagccacttgctatcaaatttttcattgcctctgaagctttccatccacttccactttgaatactagcttcagcaagagcagtttctggtaaaattttcacagatggctagaattcgctcaaccgctaagctcatcatgcctacctgtttggaagagcgccaagataccgtgccaatctacgaagccatgaaggcttcgtcatcgtcaaggcctgtctaagagctgcctagggacagaccatcgaaaccaagctatattgagattggccgcactactttgatggaaaaaggcctgcaaacaatgaagaagcttgactactttagcagcaaggtcaatgtgtgccttcctggtg

SEQ ID NO: 99339 - DNA, 567 bp, Zea Mays
tctcagatctactactttgaaccctgtggatcatttagaacatctcatttccaaagttaactgggtgaattttgagatcaatttagttttacccagtttgcttctagtttttgttaaaaaggttttaacttgcctattcaccccccctctaggcaactttcagtataagcccgcccaaggagaagagatgactccggaaatgatgcaagaggtacaccgcaatgctcaagcgatgagcataataaaaggaagtctttgtccggaagaataccggaaagttcaaggaagagaagatgcccgtaacatttggaatattcttaaaatgtcacatgaaggagaccccaaagctaagagacatagaattgaagctttggagagtgagcttgccagatatgattggactaagggtgagtcacttcaatcactctttgatcggttaatggtgttggtaaaaaaaataagagtgctcggaagtgaagattggagtgactccaaggtcacgagactattcatgagagcatacaaagaaaaggacaagagtctagcaaggatgataagggaccgtga

SEQ ID NO: 99340 - DNA, 2066 bp, Zea Mays
cgttacataaaaaaccgttggtctttatctgtcccgcaacctttctcttctcctccccgcaccttctcggtcggtggccgcttggttcctccagcacgcctcctcctctcgtcgtgcctccttcctctgccactcgtcatgcctcctccctccgttcgccatgcctcctccctccatcgggcgatgcgtcaggggtagggcgaaggacactagtacatgaatttgtatagtttttagttctagtacatatggcctgacactagtacaacgttgtagatgtagcattccccaaccgtcatggatatctaggtcctacatggaacctaattgtcctaaagaatagttcaattgtgttcactcatacattcgaaatgttatagataaatcatctggattatgggaaataaaatgacattctttatatataacttgttatccgcagtaaacatataaacatccaaaccaagggtaaacatgtcttgtcacacaaaaaacacatttctggagctgattagtgattacaatcttcttgccgaatgcctcaaactctagaatagagttgctccttcctggatttttggagcagagttgttccagggtggagtggagccaagccaaacatgtcctttatatcagataacttcagcacatttaaaattacaaaagattatattgctttcacgtaggttatacctctttgtacttcacctgatggttttcatatcttgttattaagccctaatgatgattacatgtgcagccacaattatacgttggacgaggaatgcaagaaggactcgtatctatactgaagttccgtatttttttacaattgtattacttttatgtcaaccatttaacatgagctaaccattctatttatacctcacaggtacacaactttttggactattctattgtcatgcaaatttttattcagctactactttgaggtaatattccctcaaaaatgcgctgaacacaatcctagttacaactagaaaaaatctgtttgttgttgttagttttttactctgcttcctgatgcattgtttcttaaacaaaatatatacagattaagccacttgtgggaccaacgaaagaaattatgaagatcaatgtgaacagatatgagtggcatgaattttttccacaaggtcctctatatgttatcttgatttttgtgttttttcctttctgtaatagtattatattcgtccagtcaaattacagtcaaacaaaaataatgataccatatgtctcttgcaccagtcaagagtaatgctggcgctattcttgctgtatgggctcctataattcttgtgaggattctattcttgcagtactttggttttaattgcgcatatgcctctgtaaatgtgattgtctgtttttatttcttccaataggtctattttatggacacacaaatatggtattcggtattctgtactattttcggtggtatgtgtggtattatccatcatcttggtgaggtgagatggaacatcacttaacatgggtactcatttcagatggctatagtgtactaaattgttaactccgatactcgtctagattcgcacaatgggaatggtgagaagtcggttttattccttaccagaagccttcagtatgtctctttgtcctcctgcaacaccaatacagagaaagggaatgttttttagtttcttggagaagagaattttcaaggtgaaaaatgttcatgtcaatttttgaactacccgaaggtgccttttccccttatgtgcctttttctcccaaatggttccacttttcagaaattaggtaaagatgaaagatattacccaagaaagtttgcgctggtttggaacaatataataagtagcttccgttctgaggatttaataagtaataggtacactttgattactctgctgcaactcatgtctctccagatttgtaaataaaaaatgttatttttctagagagatggaattgatgacaatgcccatgacaccaatgcataattctggttctatctgttggccattgtttttacttgctaaaaaggtatgttgatc

SEQ ID NO: 99341 - DNA, 470 bp, Zea Mays
tttgggtatccccaaatggcgcaaatggaatcagagaagctacaatgacgcggcatcttgaagcctgacaaagtcgtaggtggacactgctcaaagaaaacgagacgccaattatagggaggccgtcatggccatggaagcacatggcggacaggcacatggagtagaagcagatgtggacatgatgctggcgaagtggcgagtggctgcccaattttgacccaaattccgccacatcgcaatcttgagcaggtcagaccgggggaatctcgacagatcttgacctgtcccaaagacccggtagatccaacattgttacatgttgtgcgcgtccaaacattgatgtgcacaatactactagctcttaataacaagcactctgcaggttgctgtagaggacactgtccttcatcccccctagaccctgccatcaaaatcctcaccattttcacgtcaccttctaattcaag

SEQ ID NO: 99342 - DNA, 667 bp, Zea Mays
gagcaggtggactgctgtatattgaatgttatgagaggaggatcataggctcatataaataggtacagggagggagggataaataggtacagggagggagggagggagatttttttctcgaaaatcgcaggagaactgcgcctaattttattaagtaagaagaaaaaagggtcggaaaggacccgaatacagggcctccttatggagaccagaaacaagcataaaggaaacaatccatacacaactaaagattacaacttatctcagacattggtactgggagcagctaaaaaggaaagacccttagctcctgcaaccatccatttctccctttcctcagcagtggcctctaagattgtagtgatatggggggtgggccgtcaaacaccactctgtttctgaacttccagatcatccaggctcccagaatcaaaagtgaatttacccccttcttggtcatatctgacacaatatcagcaatacgtttccaccactgtaggaagtttgtgtcaccctggagaggggcaagaatgtggagccgaaatttctgaagagtgatgtacatgttaaggcccatatattattgtctgcctatatatatgctacaatacccgagggggctatcatctcgcctaatccaggttagtcacatggtaacagagcaggt

SEQ ID NO: 99343 - DNA, 431 bp, Zea Mays
acaataggtacttgcgtttgtactgcaatatgcaaatcatacatgttattgtgtctccctaaaaaatataaacgacactgaatgcaataatccattgaatagagaaaaggtgaccatgaggtctcttgagtcttaacactactaggaagtctgaattgtgttcatttgtttaccaacctgaagactgaattaatctcttgttgttttttaatgtgctcttgttttttatgtcgttctccttttagctacactatattttcttatggcgaaccaataggaaaaagttacccaacagattgcatcaaaatcacctagccaagcttggagttgtttgacggttgcgtcaaaagcacctagccatttctactattgttcaagagcacttttgtgttgtgtggtattgctgaagtttggattaaggagaatagttc

SEQ ID NO: 99344 - DNA, 423 bp, Zea Mays
ttcgagttgaattcaaataaaagtttttgaattcgtagcggtccttattgggacatggaattttcaaatcaaaccgtcggaattgaattcaaaacacaggaacgtgcgtcgcagcctggggcgggaaaagtacaggaccggcaaaaagatatatatgtacgtatgactttgtgctgtgtgtgactgctgtctggacgcctgacagcgacgtacgtacacgccctagctactttcataaacaactgtacgtatgtagaaaattaaaataagtgttaaacaaatatggagacgacgaagggggggcaagttcgtggttagcagcaatagcaagacgtggcatgcatcaagaacgcaaatgtaggtggggtcagtggttacacgcttgacctagctgatcaagtgggatggtggataatatcggtg

SEQ ID NO: 99345 - DNA, 834 bp, Zea Mays
ggaaacttcaccaactgcctttcttctccgttatatacacgcctatctagaactatgctgcccctccgtccatcccacgtcgcccccgtccgtccatcccatcccaggcaagctccacatatctccacctcgcatcctcctttctccatctctccttcatccattgatcttcctcgcagcctccttcctcgacgatacaggaacttgttgcctgatcttcccctcctcccctttccatcataggtgcttagttctggtctatccagtcgcccctccccaccgttcgcgatggatggacgacaagcacccaaatcccgtcgtgattcgttggatgctgccctaggtatgatttctagatcccatcgaagttctgtgcaagacattcgagggaactccatggccgccagtggtattgctcgacgccatgttcagacagcaccagcctctaatcaatctgcgtccattagtgtcgatccagcatggatgatgcccgagtacaggtttgtaatcaatttttagtacctcagttaggtacttgcataataacctactgctatggtctgctagaatgttgcttcgcagaatgtcttttagcagctgtatgagcatagttgtgcatactgactattgtgaaaagaatatatggaaaactggaatatagatgtgatgcttcaatggccaaggctaacttgaaatatatgctaaaaagaatacaatgacacctgtgaacaacaaaattaggggggagaattaccctctgaaatacattttttggttttctgtgcattatctgcaaaactggtaatgccatcagctgttgggtgcattatctga

SEQ ID NO: 99346 - DNA, 391 bp, Zea Mays
ggaagttttctgataacggaaaatttatgggtgctttggctacttctttgatcacaattatgttcattggaattactgagatgaacatgaccattaaaaagctacaagtattctacaaacagcgagactacttgttctttccaggatggacctttggagttgcaaccattatcttaaaaattcctttttcattcctggactcatttatgtggacaactgttacatatttatgttatgggtttcgcgcctgctgcaggaaggtaactgttctccttttctgtccccacagtttttcacttttatatatttacacaaaaggttaacaacagaaaaaaaacaaaaaagcttttcgctcccaagtaatctagtataggctagagatgaacccaac

SEQ ID NO: 99347 - DNA, 427 bp, Zea Mays
ctggactttttgattgtacatattgaaaattgaaaccacaactctaattgagtttggaatttgcaaattaaaatagaaagcacaaaaaatagaaataggaaaagaaatgaagacctgggcaagatttcattccctcagcccaatttcctttcactctcccgcggcccgatctcattctccctcaagttctcgcctgtgtgggctaaagtggctgaccggcccaaccccgcccttgcgtggcccgcaatctatacctcggctgggtcactgacaaacggggtccacattatctcctcttgctgcatgtgtaacactcgatggctgtcttgtggggccgtcttggtagaccttctccaccatgtggcgaactcatcgcagagtttgtttccatcactgtaatccccgtaatcaccggagttggttttgc

SEQ ID NO: 99348 - DNA, 328 bp, Zea Mays
actgagcgggatactgccgaggcagccatgtaggatgcagcatggtgtgcactttcatagtactattcattgtttagtggggtggctaacggtctcgacctaaagtactacaccattcgaccgtcagtaccgggagtgtgattgtctcacccgttggtgaagccaatcctaggttgagcagcatgaccaatctggtcgccgtgctcaacaccgagctagaccacgcccttgacgagttgggcaaggcccgtgcggagatcgtggaactgcatgttgactgcgtggagcaccaccatcaagaggatggttcccccgcccctgttgggac

SEQ ID NO: 99349 - DNA, 346 bp, Zea Mays
tgcaaatgcttgtccagcggggaattctagtgcattagctcagaacaagcaacacactcctggccagggatttagtattgccagggttaatcaagtcagtgctgaggccactgctgacggtgcagacatcgctattggtatgttttacattaatgcaattccagcagcattattatttgattctggagctacgcattcgtttatttctcctcgatttgcaactaccaatgaattaccactgcaaaacatgaaaaaacctatggtagtaattacacctaaaggacctgttgaagcaaactatatgacacaaagattaacactgacaattatgggaagggaattctgg

SEQ ID NO: 99350 - DNA, 385 bp, Zea Mays
tgggaacccactacaacatcttcacagatcataagagcctcaagtatatctttactcaggctgatctcaacatgaggtagagaagatggctaaagctgatcaaagactatgacctggaggtacactatcacccagggaaggccaatgtggtagcggatgccttgagtcggaagtcgcaatgcaactgtgttatgatggattctcgcatcaacaccctgtgtgatgagttgaacaaaatgaagatcgaagtgattccttctggtgcgctgtctcacatttccgttgagccaactttgcaagaccagataatcctggcccaactcagtgacaagggagtgcaaatcattaaggagaacctccatcagaagatagagaagtataagtg

SEQ ID NO: 99351 - DNA, 591 bp, Zea Mays
atcccaagggagtggggatcgaaacgcgcgcacacgctctcaaccttcactccgtaccactgtagctccagctctgtgcgcgtcgaccggattaccgccgccgtgatcacgccaggattggcctttcggagttgcttgatccgaaggtgatcaccaaccaaagcatattctgcctgcgtgcgtgcgtgcgtgagagcgagcatcagtgtgaccgtgtcacggatcgaccagggaaaaaaagaacagcagctgcaaacgtgcaaaaatcatgtgtttacagcagccaccatgaaccagtgtggctgggcagcagctggctcatgacttcatgtgcggtggcgacttggatcacgagcccggctcaggcctctggcattctcgttacaagacctgccaggttatttgggtctatgagaaatgccctagacagtgaccagtaaagttttgtcgctgccgcccgtgctgggcctgggcatctcaacaattggcacgtatgtagatggccgcctacagtacacaacatatgttactgcagctaaggcactgtagctaaggcacaagagatgacgtatccttccagtatagtacagc

SEQ ID NO: 99352 - DNA, 325 bp, Zea Mays
gagaacaagcacagaggtggaagacgtgctcagcaggagcagcaggcaccccaggaggagacagctcaacagcagttgccaccccacccccgatgactattgagcagatgttcctgatgcaaactcaagcaatccaagagattggttagactttagcagcaatgcagcaggtgtatcagtagcaacccccacctcaaccccaactgcaagttcagatgccacaggtgcccagagacaagcgggcagaattcaagaggggccatcccctgtctttgcccattctgtttatcccatggacgtcgaagattggttgcgtactgcggag

SEQ ID NO: 99353 - DNA, 362 bp, Zea Mays
ccagtaccagcctagacaactctcatcacatgaagaagatagctctctgctccacaaaattaccaattttaactcctaggaggtgcaaagattctgatgcagtcgtccgaagtggcaaagggtgctgagaataattagagtgccagagaaagggttcaggatcttggttagtgaatccacagagaccaaaaaaatcatgataagtggagtagcaaccagttttatatctgagaggaaaagttatccaagtcgaaggaacattgtatatgagaaaaaacaacattggtagagacaatcaaggtaccataaattatattatctcgagcagcattcttatctttactgttgtactagtacattac

SEQ ID NO: 99354 - DNA, 290 bp, Zea Mays
aggagttgaggttgatgttgtttaatgttcgttaagcaggccttatcccgaaggctgagccattgtagcgtttatgctgccctcgctcttgtattgcggtagtgagtgaaaacgctgccctccccggctcgtgataaagaggaagggcaacagaatgcggtgggtatttatttgtgcaaagtggccagtggccttttgttgtgtatgtaaactatgatattgtttgttgtaaaatgagaaagggacttctcttactgcgttgatgtgtgagtgccgaagacacatgcttg

SEQ ID NO: 99355 - DNA, 337 bp, Zea Mays
ggcggaggtgcgctcgccggtgacaggcttctccctccctggtgggtctacgcgtggtaaaaaggatgcagagggattgaagggaccttaccagtgccgattccatcctgagttccttccgcggagggtgcaatcaagcggcaccaacttcatcaattgcagcttagattcaagcaccgggctgcaccatggccaccactgcttcatccaccccgccgtcacgtatgagcccagctgttcacggtgaaaacgcgaccacaacgacctccccagccccagtggcatctatcccgacggcatgctcgacgatgaagatctgcaccgggtgttctttatc

SEQ ID NO: 99356 - DNA, 522 bp, Zea Mays
tgtcgctccatcggaccgaggtggggacgactcgatgtggacatccatggaggcattggaaagagaacacacctgaacaccctcgggggctgggttgtagtttgcactacccacaagagctggatcgctaccagcaacaccctcgagggctgggtagctgccagcgccactctcggaggctgggtcttctacagtagccacctctaaggatgaaggcccctcagccacctccatgggagttggatgactcagatcagcgtctctgcatggaagactgccctccaaggtcgacgatgcatgagacaccactcgggttacctcttgcccggcagaatcaagcaacgaaagcccaccatctgggacctctgaacagacggctaggatatcatcttcaggaggctctgatagcatgtcttcggtgatgacctcctccatcacttgatcaaaatctgatattgaaagcccatgaagattgtcaagagccgacagagctggagagggaatatcgcgacccccctcgtt

SEQ ID NO: 99357 - DNA, 636 bp, Zea Mays
catgggcggacgtatagcgaagcgggggccgcggcccccagtcaatttgcagcaaccgccaattgtgtctagagtccatttaattaggcccccactataattcaattgtaggcccccagtcccttatttttcattgatcgcttggcctgttgggcttcttttggaggcccacaaccccacactgcagacctgatcgctcggctactatattttgctgccgtagtatcgcgtcgccgccatcgttttgcatttgtgcttgtgcgcatccatccatgactggtgcctggtggtctggttccatcgcaggttaggtaagcctcttgtttttacttttctaattcttctactgttctgcagtgatcttttatcattttctttatccacaccaaacactctaatcgggattttttaaattagggcagtaacaaatggataaatttttgatcaagagagggccaacaacaaattgcacgaatattggaggcagttcaagtggggatgcagcagcaacaaccaggcataattcgacagtgccacaattagttgatttaagcactctttctcgtgatcctgctaaaagaaagagaatggtggattatcaccccaatcagcatgaagagataaggaggaaatatc

SEQ ID NO: 99358 - DNA, 356 bp, Zea Mays
gtaagcatacggcagctggcgtcgagcacgcagaccatccaagacagtgtcctcgatctcacaaatgaggaaatccacgtcgtcaaactcagagtgagagaccagggcaccaaggagccagagctgaatatgtgtggtagcctccctgtatcccatcctcggcagaagagtccgtctgataagctcaaataagtacttggctgttgtagtaaaatctgtcggtaaacgtcgcgacccatctgagaagggtgggcggaacagagccgcgacgtgaactgtccggagccacaccgccgtgagggcgacgaggagggtcagaggtgccgtagcagaggctgtgaagtcgagtcgtcgac

SEQ ID NO: 99359 - DNA, 566 bp, Zea Mays
tagtgtgatggttttgaaatttcgtcgtggggcatagaggttgccctaagatgggtgatcgcaaacgtgccgagtgtgccgtgccaatttaagtcagtgccaacttaaaccgaccgctccgttagtagggcatagtggccaccccgagttaagtaagcatgagcatgtcgcaccgccttaagtcattgccgacttaagccgattgctccattagtagggcataatggtcaccccgagtttagtaagcgtgagcatgttgcaccgccttaagtcattgccgacttaagccgattgctccgttagtagggcatagtggccaccccgagttaagtaagtgtgagcatgtcgcaccgccttaagtcattgtcgacttaagccgattgctccgttagtagggcatagtggtcacccttagtttagtaagcgtgagcatgttgcaccgccttaagtcattgccgacttaagccgattgcttcgttagtagggtatagtggccaccccgagttaagtaagtgtgagcatgtcgcactgccttaagtcattgccgacttaagccgatcgctccg

SEQ ID NO: 99360 - DNA, 402 bp, Zea Mays
gaatagcgatagagtgttcacaaacccatttttgcaggaaatatcaaagctcccagacatgaagttattgatgaactcatcatattaccctcatatcgatggtcgaaccgaaaacttgaatcattgattagaagggtacctcaggtgtacaatcctctcatatctaatacaatggagtaagtggttgtttgtgggtgaatcttggtacaacacttcctatcacacaactctgaccaagtcctgacttgaggttttgtatggctacacctcacgacattttgttgtcaaggattcatttccaccagcatcgtccattgttccgcaaccgacgcaatcttgccagccaactaacccctcgccttcacatgtgcatcataggtaaactcgtttattccattcaag

SEQ ID NO: 99361 - DNA, 491 bp, Zea Mays
gtaactcgagtcaaagtgtcaagaatcttgataggatactccgtgtaagtcaaatcaccctgaacactgagctcttccattggtaactgttccttagggacacggaggcacttctttagttgagacacatgaaatacattatgcacatcagatagattagaaggtaactcgagttggtatgccatctccccaactcgcctaaagatcatgaatggtccaatgaagcgaggggacaacttgcccttaactttgaatctcctcattccacgaagtggtgacaccttgaggtacacatgatatccttcctcaaattctagtggtcttcttctattatcatcatagctcttttgcctggtttgagctaccctcaaattgtcccgaattatacggacttgttcttctgcctcttgaatcagtttaggcccaaagaactgtctttctccagtctgatcccaatatagaggagtcctgcacttcctcccatataaagc

SEQ ID NO: 99362 - DNA, 563 bp, Zea Mays
ctatcataaatgtcccatgtgtcttccatttcatgttccacgaaaaaggaagacaactcttggatgtttttgagttaaaaccctacatctctcaaagtcacttaattctctgtgaacacaaagccagtagcatgtatgattgcttgggtggtagtggatcaatggcaagttcatgatgtatgggagcccctagagacaatgattaatttcttcagttgtattggtggtaaatatgcaatattggtggcaatacaactaaaagtccatatttgagctccacaaaatacatgctattagacaccaaaccttaccccagtcttgatgttgggcaagcccaaaatgccacccacaatgaagacaagttccttaagccaataatgctcattacttgttgattgactctcctatttaccaaaatgtagtctactaccaaactactccactatagggtaccctcaagcataatagagtgagtcaccatgttggtcatccataccaagctcaaacggtttatattttctcaagaacatcgagacctctctgacttaattacaaggacaata

SEQ ID NO: 99363 - DNA, 755 bp, Zea Mays
gccgggggaagaacctccccagcgagaagctcggcgacgaaggaacccacgccagaatattcgacgacatcacaaagctagggagcgggacccagtgcagcccatatcttgggatgaagtttcagaagtgggagaaatccccgacgaccgggtacaccgagaaaggcggaactctcgccgacgtgaccgccgacaagcttaggaccgagatcaagaacaagtcgagcagggcacaaggttacgccgagagaatcctctatttgctcgaaacctgaaccctaacttcgctcacgcaatgaacacgccaagcgaagtcgaaggagtgttggcccagatagctgatgacctcccgcggactccagatgttgaaggctatcggcggctgcttactcgagcggctaagcaccttctacccatcgctcatcccccgagcgacctgtgacacaccatcaacagtcggcgagatgcgcggagctccaacaatgcttcacacgaccgacgacacaaaaacaagataaggcgccgggaggagtatgaccaggaccacggcgtcccggctcgaagtcacgccacctgagttgagtcggctgcggcttcaactagtggcccgatccggggatagtcgagacaacacatcaccgactcccctccccgggaccaacaccatgaacgtcgacaggaagacacatatggagtatccacgattactccgcgtcttcggaccatccagtggccccctaacttcaaggtctcca

SEQ ID NO: 99364 - DNA, 761 bp, Zea Mays
gttttctcagataaaatttcttctacagattctttttccgtttcttttctaatttccaaggattccttcttggcgggctctaaaggcccagtttcggtctcctcaatttgtgtttttgaagcttcggcagctctctttggagtagagcttgaagattttattgtttctagcacatctaaaacgttgaccattctcttcctcttgggagttgttgtaagatccttttgtgccttcggcattgacacctcaactcttgccgaaggacttaaaacttccaatgtccttgtctcttcagccctcggttcttcaattttttccatttccggcattgcagccggctcttcaatattctgcagatgtgtaggttctctggcttcagtggtcgaggaggtctcaccaccaaaatcaggcactatggccggctcaatgtagcgtggccagtaggtaagaaccttcaccttttttctcttcggcataggatcactagaagtggctgaagcaatttccttcacagaaactgcaccttttcttttctgaccccgtagcgggtaacagtagtcaggatagatgaacccaatagcatcgaaaactctgttcaacctcttcttcttccggcctccgaaggtcgcagacagcgcgttatcctccgcctttgagtatggtccaagaagttcgtcgctcgtagcttcgatacatttcagccaatcatcatctggctcaataaatttaccctcgtatctgaaggtgtatttcaatctaac

SEQ ID NO: 99365 - DNA, 293 bp, Zea Mays
attccacaacgttgcattatggattttgtttcagaaatgcatggtggtccagaaaacgttccaataaccatgcaggacatgagtaacctgtaagtgtattatgcattgacaataatggtattatatattaccgaaacaatcgacatgtgttaaaaatatgtagtgcataatcattacattttttacaggaagaaagcatggcaaagggaaagaaatgcaaatgatgtgtctaagctattatctttttttcattatgcaagaaagataatccacaattttttctgactttcaac

SEQ ID NO: 99366 - DNA, 326 bp, Zea Mays
ggatccgagactgacggtcctgattttaagtagccgaggccctgtcagatttgcccgatcgtgatccaagggccaccgctgatccgcgcgacgctacacccctgattgaatctgcactgcacatcagccaatccacggttcccacagacccagccctttgtctaatcctgactgcccatcgaatcggatggccgaaggcgcgtcttcaacctccaaccagaccccggtcccagttccctcatcaccgcacggagtcgccgaccacagaggggaaaacaggtaacgcgctatgaagagcatctcaccaagattggaggcagtgggac

SEQ ID NO: 99367 - DNA, 515 bp, Zea Mays
caaggatcaccaatgagttgaaaccttttctcactcgatttgccacccgagagttgccaaaagcccaccaagaatcaaaagagaaaacctcgagggtgggacacaactcttccagccccagcatctttaggagatgaaaccaaaactgtctggcaaaaacacatctgaccaaaagatggttgatagtttcagcctcttggtcacacaatgggcaacactcaggatggttcagccccctcttttccagtctgtcagctgtccaacacctatcgtgctccaccaaccaaataaagaacttacacttcccaggcgaccaagatttccacaccctttttgctggttcaaactgaagtactgaacagccccaaagaagagggcactataggctgatttagccgaataaacacctgaagtactgaatttccatagatgtcgatcttgcacaccagactgaagcacaacagcctcaagaacttcacaaaggtccagaatttcggcaaaaactctaactgaca

SEQ ID NO: 99368 - DNA, 425 bp, Zea Mays
ctcaccgactaggtgtccaactccattgcctcctaccaaaccactaaccactgaacatcggtatacattcttcttcccatcctgctcacccatctcatccttcctcttatcattgtcagcaatggggacattctcctggtcacctcattaggtgactcaatcattcatggtcctttttatctctgcattattcttgtcgtatcaacattattcaaaatcttttatctgtttgtcagtaataaatcttgttctatggagttttaccattttggcttgtccgtgaaggatctttctaccttaagcctcctcgcctgacgtgatagctttaggcccttgtacaccctacagcctccatcttccactactccacccattttgcatcaccaccttcatccccgccacacactgactactttacatctagc

SEQ ID NO: 99369 - DNA, 279 bp, Zea Mays
cactctgtgggacccgccaggtaccgctacattatcatcagacaagctacagggacacaaacaccgggtagacaagacgaaatgccacattaagaatacgacagtgtgcgcccctatggacgacgctaagagggctaaggcaacccaaggcaataggccaaactcctcccgagaagaatatgagttcttaatgtaaaatctacccttgagctataaaggggcaagacaacccccatcttctacacataagcactcaattgtaacatgttccaatcaata

SEQ ID NO: 99370 - DNA, 406 bp, Zea Mays
taatataaagttaaatacttaagacataaattaatatcgtatgatacaaaagtacaacatacttatataccttccggtggatgggggaacctgtccgcataagttatcaaagtatcttgtaatactcttgtgtcatgtactgaacctggccaacctatgacaacaaatgtgaacctcatagcgaagtcacaaacggccattacattctgcgatgcgtaaccgtgccgaccaatatatttggcttgctccgaggccgggacagacgctggaaagtgactaccatcaattgctcctatgcaatccttgaagtgcggccaaaatctagtctctcgcaaacgaggatgaatctctatgaaatttgggtctttgggcttgattacgtcagatgacatcttatatagtgcat

SEQ ID NO: 99371 - DNA, 315 bp, Zea Mays
atttctttgctcaattaaaacatattcatacctttggaccaaatcatcatgagagcgctttagcttctcatgttctttggtcatcttctccaggctgttgtcggttttgatgagggactcctctagcctgagaagcgtctcgccttgttccttgttccttctcaacagcttaaccaagagtgccttgtcctctttgttgagatggatgtagaaacggcgaatctcctcttcttccacatcatcggtctcattttccatgtcattaatgtcagtggaagccaaataggaaaatgtaccttgaggtgatgaagattc

SEQ ID NO: 99372 - DNA, 924 bp, Zea Mays
aaccggcccaaactggcccatgcctaggcaaagtcgcgcgcgcccgcgcccgcgttgccggtcttgtgaaaaggcccttgatgttttaaataacttgaacagcggccaacgaactattccttgtgtcactgacaccatacaaaaacccccttcaagttctgtttcttctctaactcgacccctaggccacgacatactcaccgccgaccacctagttgctcggaccggccaagactgacgacggctgcccaaattaactacgaggcgagtattactgacccgaggcgaccctagaacaggttctaactggattaatgtgaccctggatttgcctgaccacggtgatggcgaacaccgtacatagaccaagatgttccggttgattaattggtgtcaagctcaatgggtcaagcagacgacgatcacaagcacatgtgggtgctaaaacacggacaaaaagagcgaggacggacctggaggtagctagccgcgatgaggtgtttcacggcgccacagtcgaccaaattgggggaagaaggaaattctccggctatggtgggtaatcgagggcagggatgggtgctttggcttgatgataacttagcgcaacagacagtgccgtcaatttataaggacgctaagcggtggctagtgaatttggttttgcacggtggcggccggagaaagaggagatcactggtgcaagtgattggtggcatctaccgtggtggctctccggcgatcaccgcatacagatgacccgagctattgcgacgtggttaagggcttgaggcgtggcacaatcgaggtgaacaatgcagattccggtgatggccgtaaggccacatcgccggcgcaaatgaccgagggaaagcgcggccacagtgtcccggacctatccgcggcatgaccttttcaccggcg

SEQ ID NO: 99373 - DNA, 293 bp, Zea Mays
ccctcagctcccgccgaagcatgccctttgggggctactcctgtgcttgtggaaaaagagagtgtaactgagaaacttaaatctcctgctcccgaggcacctactgaagggtcagagtttatcgtgcgacacacttgagggaagcaattatcggaagaacagattaccgaagctagacaatatgccagggatctgaagtatccataaggatccttggtatcattatatctcattcttttgcaattcgacaagtatttttgaaggagtaatttcccttctccgcagacttttgc

SEQ ID NO: 99374 - DNA, 482 bp, Zea Mays
gcaaaactaccatcatgagctccagcctcaaggacaaataggaaagtgcgcttgtccggttcctgcaagataatcgagatgtattcgcatggcaaccttcggacatgccgggagtcccaagagaactgaccgagcacaaacttaaagtatatcctcaggcaagaccgatccgacagaagctgtgtcgttttacgcctgacaagagagaagctattcgtgcagagttagctcacctagtgtcagcaggattcattagagaagtactgcaccctgagtggctggcaaaccctgttcttgtacctaaaaagaataaagttgattggcgcgtgtgtgtcgactatactggtctcaataagcactgcccgaaggatcccttcggactccctaggatagatcaggtagttgattcgaccgctggctgctctatgctctccttcctagactgctactcagggtatcatcagatcaatctagcaaaggag

SEQ ID NO: 99375 - DNA, 1187 bp, Zea Mays
gtccggaccacccagacagagtcacggggcaagctggagccaaaatgggaaggtccattcattgtcaagatgaaggcatcccccagcgcgtacaggctggtaacaccttccggcgaagatttagagcactcctggaacattgataatctctggaaattttttgtttaaccctcagggcccacgcgcccttgtaattcagcaaacaatgttgtttcggcccgcactcttttcctcccgaggggtgaggtttttaacgaggcggagccatgtaatataccagtaaaagcccctgcaaaaaaaactcaagtgcaacatgttgaaaaagaccgcttcgacggtcttcggcattcgaccaattcaaagtcaccgcgacaggtagcgtagactaccctcgcgtgcgacactctctgcgcaaaagtcgcctaagggtgcagctagactagcacaacaagtgcgcgatacgaagtctcactccgtgcaaaagtcgcccaagggtgcagctggataagcccaaaaagtgtgtcaatcgaagtattttactaaaaggacactccgtgcaaaagtcgcctaagggtgcagccggattagcacaacaagtgcgcgatacaaagtcttttactaaaaggacactccatgcaaaagtcacctaagggtgcagccggattagcacaacaagtgtgcgatacgaagtctctcactcaaagaaggccaacaggccacattacaatacaagttgcagttacatacactcagcgaatggtcactagacccaccgcacaaataaacacaactacaccctccattaccgccggacaacgcgagggcaccacatactacatcggctcaacctttgggatgatgcccgcgtccctataattgaacaacattattttcaattcctcaccctcaaaaaattccgcagatccccctcaccaatgctcgtcccaatcggtgaagacagtagctctcgtttaccaaaccgatctacacgaagacggtcccgctccatccccatccgacggtgcctaccacttcgcgaaacctcgccaacgctatgcttcgacaccacccttcgtcgccggcacttggccctcgcactaggaaaatcagacacctcaccaacctccacccgcggcgaggactccatcgcggccacatctaacgcatcaaaataatccaagtcttca

SEQ ID NO: 99376 - DNA, 682 bp, Zea Mays
gcctgacactagccttcagaggacgaggcaagaaaagattaaacagggtttttgatgtaattggctttttatacccaaactactgatatccctcacgaaagcaggtaaagaaaagaaaagctgctgcttcggccatctctgctacaccgaagggaaaaaatatcaaggttttgacacaccggactaggtacattgaaacggctagggtgccaaagcttgccgaggggacctcttccgccgctgagcgggaataccctgctcctgccggtgccaagggagaatcagctgaagtgctgaaagcaatgggacaggagaatgccgagatggccaaagagccgaagcgccctgttgaagccaagtagaaaacagtcgaagaaccagaactggaggaatcggcagggcagccaaaatcctgagcccgccaccagagcctgagttgccaaaggtatccaaagctcctacaataactcccaagaggaggaggatggctagcgtgttggacgctatcttggagtcgacaagggcaccaactcctgcctctgcaaaggaagccgctgaagctcgttcaactcgtgttgaactcgaagctgggccctcagtgcccatcgaaatagggcctattgaaactattgaacaggataccaaacaaggacctacggatgccactctgatcttggaaaaa

SEQ ID NO: 99377 - DNA, 464 bp, Zea Mays
gcaatgttgtgtacaactttgcaatctgaagcaatgttgtctccatatgtttcaagtgttgccaagtttaagcatcctaaaatcataagcatgttgatgcatttaactggaggtgggacttttggcctcctgttgtgctggctcgacccattcgtctgtgatttatgttgtttcacgcaatgacaatcaatttttttggtacaagcatgatcgatggcccatcgattcgtctttgactcttcctgttgtgctggcccaagcatagcctgtagtaatactgcaaaaatctattcggtagattatcagcttgcacattttttgtataagcggatcgcggttctccgcgcgcaatttgcgtttttgtggcaccctgttgtgttcattatgcttgagtgttgagagcagcaccgttagagtgatgtactgacatggatgatttcaatcgtgcggcacacggaactgtt

SEQ ID NO: 99378 - DNA, 372 bp, Zea Mays
gttttaggcgtacagaggcagagccatgttttggtgctctgcccttctggctctggctccgaaggagcagcgtctggggagcccctcccaaacatggcctacgtctatgaacattgtgaatatttccgacaatctaacttttagaccaactacaattatttcctatcaagctgaaagtggcttagtcgagccgacaacactacttgatggcagtgaacaagcagttatattgctttgtcaggatattgatattatttctgttatccttattttgttaacgtcatttctatgttttgattagtgctgtatcatcgactggtggaggacttgtatgtaattgtaagcagccataccattatgtataattgattt

SEQ ID NO: 99379 - DNA, 282 bp, Zea Mays
tattcttttgatcgtaagggatactgatgtattgatccctcttccaacctcattattgtctcccaacacgttgtgtttgatgaggtagatttctccttctctgcctcgccccatctaactaaccatgattttttatttgagtcatgttctttggttttcgccattgggatcccactccttgcatgtacatctccgccagcacccatggtaccgcctagattctaaccttgggcggccctggctcttgtgccacgcgtgcccctggcgcccctggccccgccg

SEQ ID NO: 99380 - DNA, 719 bp, Zea Mays
atttttgtgacaattgtgactatacccttctccggtattgcgattttacccaacgtcatggaggctttcaagtatggtggtctgggcaatcggctacaggatatgtaccctaaaagcataactgaccatggcattcaaagcctccatgagaaggataaacaccctaaacatactgggaaattgtccagtggcctttccagtatggtggtctgggtattctcaacctggagatgcttggatgggccttacgtgccaagtggctttggttacagaagactgatgcgttaagaccatggtctccctaaccgagtgcaccgtaatgcaaaggcactctttgatgtggttgttatctccgtggtaggcagtgatgaatctgtgaagttttggtctgatcgttggcttcttggtaaaactgtggctgaacactgtccaactctgatccaaatgatttctaaaagggctttaaagcggagaatagtagcataggggctcacagatcgtaaatgggtgtcagatataaggggaggcttgtttctatcagttctagtggagtatctgcagctctggaacttggttgatggggtagatcttcaacctgacatcgcagaccaacatatttggcgcctctctgctcatggtacttattatagcaaatcgtcttatgatgctttctttgttggctctatctcttttgccccttggcgacacgtctggaagac

SEQ ID NO: 99381 - DNA, 687 bp, Zea Mays
ataatactttaacaaagtagctaaacgtgacaaattagatagtacaatacgacatcgtacttgcctgagattgcaactttagaatttcttgattcaactactcatttgacttctgcaagtgttcaacaccatcaaaatatagctaaaaatagttaatctaaagctagctatttagaaccttgctttgcgtgttttctactaaaaattgtattgttgaaaacatttatcatggacaatagaaagttataatatgagctgaaatctctttggaacatgtttgtgttcaaatgattaaaagactaacaaaaaattgttgaaagtaaaggaagcataccgctaggttgtgcacttttgcctacataaaattaagccatacatgatattataaaccacataaatggcatgaaacgagactcatagaaaattgactaaatataaaaaatatcaggatcacaactgaagtctattgttagtatgttacatttggcttgatagtatttactgtttccagtgcatgaaagatcaacaatattctaaacctgcatgtcaaaattaaataggcaatgtgagcaattgttacaagtttgtgaatgaactaacccaatgtcaatatgccattgtgacagcgtatggatctttcccagcgatttcaaatattaatggcaatgcagtctgactaacttggtc

SEQ ID NO: 99382 - DNA, 753 bp, Zea Mays
cgagtccggaacaggccaggaaggtggcgccgagctttatagccgcgggcggcggggcacggcgggcgaccaccggacaccgggagaaaaatacgggggaatgtgatggctgatgagacggttggtaggctccacaacacgctctaatgaaccatatcattgttttccttgggaggatctcactagtagtactagctagtcactacgacggggcctaatataatcgtagtagcacccccacccacccatgcactcgtcaggatcttctgcttgcaaaaagagtgtgttccctagctactctctccctctccctctccctctctcgacaagcacacggtttgagtgacacaattgccgacgccacagtcctgccaatccacgcttgtagccaatatgcaagaacgagtctctagtagtacgtagtagtaacattctgctagctagctttatatggcagatcatctcgatccagcagaacaggaggaggtctcgttcgtttcacacgctatgcctttgaatactgatctgcagtatgcatgtgcagaagtagaaactatgcatgggctacccgcatctgatggtctgaaaagacggcgaggcgatccaatctgtgttctgttctcgaatatttgtcgtccgctagtttgtactatacacaggaggagagcctctcgatccgctgccgaccgtccccggtttatttggcgtgtaacataattaaccctctgcataaacatgcatgctgccttttgc

SEQ ID NO: 99383 - DNA, 402 bp, Zea Mays
ttcgtgggatggtagtacggctaagtccgccaggaatactaccccacttaaaagaattctggcttgggagcatttgaggtggcagagaaggtctgaccctggggtccgggtgaccagagggacttctaatggtgtagtggggatgccatgcttttccacaaaactagtggcgatgaaagaatgagatgctccagaatcaaaaagcatagcagcaggggtaaattcgactatgaactcaccgagtactactacaggggcttgctaagcttcctaggcgtcgacgtggttcactcgagccctaccgtggaactgaatcttgcttaactgactgttggtggagggtgccttggaggcgggtgctgtaacattcttggggccattcacagagttggaataggcagg

SEQ ID NO: 99384 - DNA, 495 bp, Zea Mays
gtacataaaataagctagcgcattcgttagaccaaatgacaagaccgtgaactcatatagtccatacttggtgataaaggttgtcttcggtatatccgaaggctggatcctgagctgatggtaacctgaccttagatcaatcttcgagaacaccctagctcctctcaaatgatcaaatagattttcaattttgggcaagggtacttgttcttgatagtgacttcattcaaagatatataatcaatgcacatcgtctttgtcccatctttcttctccacgaacaaaactggagtggcgaggtacttggtctgatgtagcctttctctaatagctcatcaatttgcttcttgagttccaccaattctggtccggacactcgataggctctcttggaaataggggtggtgccaggtataagctctatggcaaactcaactttacgctgaggtggcatgcctggtaactccttagggaacacgtcagggaattccagca

SEQ ID NO: 99385 - DNA, 361 bp, Zea Mays
gtaagtcatgcatggagtactggtaccaaacatgcattttgaagtttgtcttcatagctcggtcatacgtccataccccttcctcccaagcacataccaattcatcaatcaaaggctccatgtacacacccattttattccccgggtgtccgggaattatcaacgacgcgaatatgttctgcctgtgaaagcataaactggggggaaattgattgggataacaaacaagggccaatatgtgtacggggcagcactcattccatagggattgaacacatctatggccagcgcaacacgtacattacgagcctcctcggctttctcacggtgaatggcatcaaagtgtttccatgcttcacca

SEQ ID NO: 99386 - DNA, 313 bp, Zea Mays
gaagctcaaattcaatggactcatgaccatagtcatcagcttctcccttcttttctagtaagcctttatgtaaaaccattcactcttctaaccagtcggccacttagtacgatagctgagaactggggccttcgtatcctttcgatatgcaaagttgtagcagctgaagttatcatgaagaccatctgctctggccttcgtttggtagtgcagctcgtgcacccggtagaaagctttggcattgggactcatgccctggcttcggaggggccatatgtagacactaagtctaacgattgcattaggtgtcaac

SEQ ID NO: 99387 - DNA, 345 bp, Zea Mays
gagcattttactttgtccaattccttagctagtatttgtagtaatgacttagagttgttgttcatctagtagtatttacttattgctagtagttgggtgaagttggactcatgcttagggtttaacttttgttggaattttatgaaagcccaattcacccccgctcttgggcatcgtgatccttttagtgtcgtctcgggagtttcccaccggttttcatttaaaaaaatagctactggacttcccgtccaccataactcacaactcaatgccgaacctttcaaaaccttttttcaaaatattctagaaaacaaaacattaattgtcaaatccatgccataactc

SEQ ID NO: 99388 - DNA, 469 bp, Zea Mays
cgatttctggcaaactccataaacacaggagtatacactgaacgacaggtttagtttggcttttgtgcgtttaatagaatattgaggcattacattatatgggcattcctccccctaatgccaagatgttctaaaagcatacagataaaatccccaaccacaatcatctagttgtggccaatgtatgctattgtggtgatttatttgggaaatcttacgcacattacagataggggttttatgcagtgagcattggacttagattaatgtagtggcatgaatactacatctttttccttcaacatgaagggttagtctcaacatccagcgagacacgcaacaacaggttgcttcatggttacaattctgcaaacttattgttattattaccaaatgcacagtcaatcattaagatttagactaacatgcacaacactattttttcataaggcttcttcaggggctcatg

SEQ ID NO: 99389 - DNA, 463 bp, Zea Mays
tctaagttcttaggtccctgcccttctggtgtcaccctttcggcgactaacaccatgctcactgctttggcagccgccgcaatgtacaggtacatcggttcccctggctctggagcaaccaggatcggcagggaagttaggtgttgcttcaattcttggaagacttgttctgcctctttggtccaggtaaaaggaacagattttcgtagaagcttgaagaaaggcagtgccctctcagccaaccttgaaatgaagcggctaagggcagccagagatcccgcaagcttctggatgtccttgacacgggcgggaggcctcattatctcgatagccttgatcttttctgggttagcttcaatgccccggtatgaaaccaggaaacccagcagcttccctgcggagacgccgaagatgcatttctccgggttcagtttggtgtgggttgcccacagcttgtcgaaaa

SEQ ID NO: 99390 - DNA, 478 bp, Zea Mays
tagttcccgtcctcgctatactaccactacaagtgcaccagctagtggcagttccggacaacaaactcaatgggcaccaactgctcctccgaaagcaagcaccccagcaggacccattgctcctaacacaaccaccaacagggcatgcttcaagtgtggacaaccgagacactacgccaactactgtcccaacagggctgcctacactacaccagctccaatgaaacaaggtcaggcttcggcaggaaagagtcagcccctatctgtcaaccggggacaagcccatcatgcagaagtagaagctgaaccaggtgaacatgaaattcaagaagaagagctagttgaagatgaagtagtcggtgaagaagtcaacgaacaacaagaatagagataaacataaacatagatacatatatacatattttactatttgtaagacctaaatattagtttagctaatagtagtattttactattt

SEQ ID NO: 99391 - DNA, 775 bp, Zea Mays
gacgcggagatagatgttgtgcttagtttgctggctggggaatcatctgactcgacccatgccgagccaatggctatcacatctggtcaagaacttggtgaagaggtgggactcggaaacccgaaggtgctcgcccaaaacgtacacaccgagtgagccgcccgactgcacctgttgaggaaaaaaggaagaagaggtagcttcggcgactgtcatgcttggaccagggtggaggtccttctgctctagttcatgatgatgtaccggcagaggcccttctcgaggttgatgccaagggttgtgatcatgcacaggctgctgtttgcatatttgatgaggacgaagaggaagaagaagtcccactgatccgcaagaacaaccggcactgtagaagtagcgagggggtagtgatattccttctccagttctgttggctcttgtcagtcttcatggactttcaatattaaactttgatcaagtactagaggaggtcatccctgaagatatgctatcaaagctaactgccgatgatatcccgaccgtctgttcagaggtcccagacggtgggctttccttgcttgactctgctgggcaggaggtaacccgagcggtgtctcacgcatcgtcaagtttggagggaagtcttcaatgccaagacgctggtctgagtcacccgactcccatggaggtgactgaggagccctcagccttagaggtggctactgcagaagacctagcccccgagggtggtgccggcagttacccagcccccgag

SEQ ID NO: 99392 - DNA, 1042 bp, Zea Mays
cacacaatccgtctgtcgaaaggggaagggcgagtcgtatcatgttccccttaacgatggaggtcgtggcgagcctcctttttgcgaggcgagccccaagtcccccgtttgctaccgaggatccgtctaggaggcatgtcccgtcttttatttattctttcccacacatctcgtccgccaagaggggaaggatgagccataccatgctcccctcggttgctgagattatggtgctcagtgggcttcggtttgctgatctaaatgggcccccttttttgcggagcgagcccccccaagtctcccgttagttacggaggatccgtctgggggcgcgtcccatctttttaatactcttcccgcacattccgtttgctggaaagggaaggttgagctataccatgcttcccttgatggtcgacattatggtgctcggtgagagtaatctgagtggggccccggtttctttagcagcatccaaacgagtaatctcagcaactgagccccaagtcccccgtttgctaccgaggatccgtctaggaggcatgtcccgtcttttatttattctttcccacacatctcgtccgccaagaggggaaggacgagccataccatgctcccctcgattgctgagattatggtgctcagtgggcttcggtttgctgatctaaatgggccccttttttgcggagcgagccccccgagtctctcgttcgttatggaggatccgtctgggggcgtcccatctttttaatactcttcccgcgcattccatttgctggaaagggaaggttgagctataccatgcttcccttgatggtcaacattatggtgcacggtgagcgacaaatgagtaatctgagtggggccccagtttctttagcagcatccaagcgtgggttccgctggtgaccatccacatactcctaggttctgactcatagttgctagccctgttcgaccgggtttgacagctcgctgcctctctccgtgataaactatgagtcagacattccctaggactcgaacataatttagaaatgcc

SEQ ID NO: 99393 - DNA, 601 bp, Zea Mays
ggaatacatgctacattttagcagaagttttagcatttcttgttggagctatactggacatgtaaaacgtctatatttagggtacatggtgtttacagtctcttgttggagacatcctaaggttaccttcagcggttaccgcgaggtgtccccaccacttctttagcggctataggagcacgctacataccgcagcggtgccccctatggtgcatgccaaatcgcggtaggcttctctctctccctccagatgaagttggactataccgagcggtcgccaactttgctctgtgtgccgcgttcatggcgaggttggcaatgaatggtattcgggcaacgcttgaggcgaagatagtctccctcgtcgctcgaaccttccgaggagttcctggagcgcagtgtcttcatcccgcgtcactattgtcatcctagatcctcactagcttctgcttcttccctgcgtcaccctcagtatgcagcgacggtggcgctaatacttgggcgctcagcaatggtagggcaatcacagactccatgtctgccttagtggctgtcccacacttgtcttgccaatcgcctcacacccttgcctccgatcgtt

SEQ ID NO: 99394 - DNA, 1320 bp, Zea Mays
gagccaaggaacatttaagccgcaaagggagagagacattctaacggctggtctcggtaaccctgagcatcctggtcgtgtacgaggaatctcatctaaggaaggatggaaggaaggattcagaccacaatgggaaggtctgtacaagaaacgtgatcgatacaaggaagagatggcgaattattttaaggaggaggccaagaaagagttcaaaggcctgatgtctgaaatgctatcgaatcctcctctagaattgatgcagcaattagcgatggcgagtgcgatgtctattcaacagatgactactccacagatgcaaataattccagcagctcaaacgccggcttccaccgagggtacgaccatcccaagctctatcgtgtcaacgagaaataaggtccgctatccagttgatgacatcacaaggcctgtggcatgcacactagttataagatatggtattaaccatcagcgtacaaagaaagtagtcataggccttgcgatcccaggacgcaagttccatggaaacgacattccaaaagaatattgcagggtagaagtgacgatagtcgtccaaggatccgaggacgacatgctagacatccctgggcccgaaggtatcgagacacttggacaagctatcaagaattttatcctttggcctcgaagggatgtcgaattggttgatccaccacgacagccgtcgtcgcaggcccaatcgtctccgccttctcaaattgtcgttcctattgtacatccatcatcacctcctcaaacttcacatgctgctcctcatcctctttctgaccctccttctcctcatcctcatggtggcccaccgtcttcgccacatacatcgcccttcagggatccaccttctccacagccatcaagggatccacggccatcaaagaaacctaaagtttctataccaaaattagtgtccccgttcgagaagaaaaagaagagtaaattcactgctggcatagctcgttttttgaaagggattggacggagcctcacgtcagacactgttgatttggccgatctcgaggagtccgcaaaaaaggctgaggcaatggccgcaaagataaagaagccaactaaggcagattataaaaacgtgcctaaaaaatatgtgtcgggcagaccactactcacttttgagaaactaatgaaggtcccggctaatattaaaaggttgcatgattggtacatgcgggcatcttcagttggcatcgacaccatcagtgtcaatataccagcccatgcttttattggttcaaatcaaaaatcctttgttgcattcgaggacatgtg

SEQ ID NO: 99395 - DNA, 537 bp, Zea Mays
aaaaaactattcccagcatctgcaaagatttgtccaacagcactgttccgccaatcccattatgtcgtgctgcatggagacaggcaactggatgaatcgaacgctaggcttttcatgccattgccggaacactgcaagtgtattacatcacgtagatgtccctttgtcccccctcgcctttgcggatgccacttttccgtggcacagctagcctgtctttatcactgcaaagcgaaggcattcctgaagaattgttggaagatttgatggcgagagcaagtggaaagccatgcaaagaccggcttttccttcgactccactgcacttcaacgagtctccagcctatctttgacgagtcatttcaagtcaaaaaaattctcaaaatgacataaacaacaaatactgacgcttcttttttttaaatgacgatgtgttatgacttattacaatggctcagaacttcagatgttgcatttgagtaccaaactgtaaaatataaatgacgatgtcgaacatacaggccttccctcatcaacg

SEQ ID NO: 99396 - DNA, 359 bp, Zea Mays
cttgtgtaaacctcatgtatgttatttgaactttcgagtattgatgctgttctagtttattatcttgcttggtgtcaggcattgctggaaaatggatccaatatgcaagagttattcacaatttggcattttttaaaaactaattttgcatgttgatgaaaccaataactcatcacatacttttgactgaacaatcatgaacgaattcttgtcctggtttgggtattgataggcaaaaatgtatattgacttaaaaaagggcagaatgtgctgtgatgaacctcatacttggttatgtgtgcacttcacatgtttcaggagtaattatgcacttgtttgtgtgatgagagagatgtttg

SEQ ID NO: 99397 - DNA, 329 bp, Zea Mays
gttatttttcattagtgtaacacgcattcgtgtatgtgtgggctggcctatgacaggttacctcaaacgatcgttcctcgttatcatcgataggtgctcgtctcttgtcgcaacagtggctcgccggaggccatgaggtgttacacctggtatcaaagctctcttgtcctcgacaagggagtgggtgactcgggagcgagaagactcattagattatgcggtcaaccgctagagttgaagaagggactgagcatggtgtagagagcgaacacgacaacactgaccacaaccttcggtatagtctcgattggtgttggaggtgatggtcg

SEQ ID NO: 99398 - DNA, 636 bp, Zea Mays
cattgttggggtctaacatagaggtactaacacatggcgtaaaattccataagattacatttgctactgagggacctaaagcacttaggtgcacatcttatcggattgttcttccatttttaacaaggactgacttatgaacgctactcgcctccaataattattgggctgcgataacgctcatacaagatatctaatcgatcaacaagacatttatttatcccatgggcatggaatgtgatgattgacaaagcgaagcatcagattgccatacaacaaaaatcatgacaacaccgatagatactatccactaaccgtttgaaaaaaaaccaaacttacttctcgcttgccactacatcactcctcaatcacacgaccatcatgagcatacttcacacgactatataatagcgatctaagcgtcgtgttacacaatacatacatcctttctcgttgcgagtataaccataatgcggcatatacccgcactcctcaatcaattatcttacgccaccactaataaaatacaccacggcacacacaaatacgtgtccccatattacgcacaagacatcaaccgcacaagtgactccaacatgactaatcataccctcatttgcatcgactatcacaatc

SEQ ID NO: 99399 - DNA, 529 bp, Zea Mays
gaagtaacagccgagtcatatcaggccacgtcgacgttttagaaataatgaccgagtgatgactaagcactttttagaaacggtgtctgacccgggaaaaccccatttgtatcacgtcgccgcacgcctctgcattctaagccctagcctcactttttgccttcgaacctcctttgtttccctttgatttcacttccgctcagtccgccgacgagattgcgatggcgcccaagcggaagaatcagaattatgttgttgcggtcattcctcctattgatctcaacagccaattacctttcgcaggtaatcatatgtctgttatttctgagtcggatcttctccaccttgtctctgtcggagttcttcctccgaaggagcttttctcttggtagattggtcgtgggtttactgtcctgacagaggatacacacgagtccgttgtttacatcccttttcttatccgctgccttgctcttcccatttctcccttctttcgagatctccttgacttttacaatctgaatctgac

SEQ ID NO: 99400 - DNA, 676 bp, Zea Mays
tgacacccccactatgtccaagatcgaccactgctttgccactcttgaatggttggatatgttcccacgttccgacctgcaagcgatcgcctctctcatctcagaccattcaccactattccttcaaggggacgccaattttgatttctatcagggtttcaggtttgaggctttttggacaacaatgccggggttccttgatctggtggagcacaactggaatcagtcggttcacactagtgatgctattttgagaatgcatgttaagatgcgatgtcttgcagtagccatcaaaatttggaagtcccaacattgtggtaatctgcaactgcgactggccattgttcaagttgccttattgtgtttagagaaggcacaagaattcagacagcttattccgctagagttggagcttcttcgtttcttgaaaaataaatcgttgggcctggccgccatgcaaaagtctaggccaaagcagcactcttgcttaaaatggatgcgtttgggggacgctaacactaggttttttcatcttcatgcgaatattaggcggaaaaagaatttcatcggggagctgcattctagcgtcggtatcgctttgacccatacagataaggaggtggtggcttttcagtattttaaaaatctgttaggatctcactcagctagggagcag

SEQ ID NO: 99401 - DNA, 392 bp, Zea Mays
ctcgacgaggtacgcgacatcaccctcatgaagtcagccaagtaccagcaggccctacgtcgatatcacaattgtcgggtaaggggttgggcgttcagcgttggagacatggtaccgcgccttgtctagagcaacaaggatcgccacaagctatcacaggtatgggaaggcccctacatcatcacataggtacttcgaccgggtacgtacagactgcaaacggttgataagcaaattttctccaatgcatggaacatcgagcaactgtgtcgtttctatccctagaaatattatgagttttgtgctgtcgagatgtatgactaaccaaaaacgtaaaggttcacgtctcagcgctcggcttactcaagaatgaaatggtcgaccccatcgcc

SEQ ID NO: 99402 - DNA, 565 bp, Zea Mays
gtcgatgtagctatcgaggatgtagaaaacaacaagccacacaagtaacgggcgggaaggcccatggcacgccaggaggtgccagagtgatggtggcgtagaagaaggacgccataaacgaagacgacgatgcagtcgtagaggaagtagccgatgccgaggacgacgctgtcaaacagtcatggatgaggcgtgctccaggttttccacgcctggaaacgtgtcgtagacgaatgcacgtgccagtgttgccagtaccgcacgtactaagtagaaggtcccaaccaagtgtcaatgtatgaagggaccagtagaaaaaacctccatgacagttgtagtgtttgtatggcaggagtgtcgtcgcaactcgcagttgttagagcggagtagacgaagtagtcgaggatgagacgacgacgctgccaacaagggtgtgctggacgaaggcgaagatgtaggtgcggcgacacatcgaggttcgtgaagtcgcagcggcgagagctacgacacacaagaataagagactcgtcgatgccagtggagtgcgacgacggtacttgtcgac

SEQ ID NO: 99403 - DNA, 276 bp, Zea Mays
ccacgatatagacatcgtctcctagtaaggtggaatcttgtcgaatttcgactatcccaagattagaatgtgtctgtctcgtcacttgagggtcaaaccaatgacatttgaatatcactggagtaagaggtttggagccataaaagttgagctcatatatttcttcaatttgtccaaaataatcgacatcgtcaaggccgggcgtaaagactctagaacacgttgttttccgattgggctgactttggtcgtagtttgttgtgcgaaaacggtatc

SEQ ID NO: 99404 - DNA, 395 bp, Zea Mays
cagcgctgcccctcgcggtgacttcgtggttgtcgaatgccgaagaccgtcgatgcggtcttttttcgacgttgtaattttttgcgggggattttttgcgtgtatattacatggctccgcctcattaaaaacctcaccccccgggaggaaaagagtgcgggccagaataaaactgtttggggaattacaagggcgagttggccctgtggagtcaaacaaaaaaattgtgaaggttgtctatgttccaggaatgttccaggtcttcgccagattgtgttgttagcctatatgcgctgggggacgccttcgtcttgacgatgaaagggccctcccactttggctctagcttgccccgggactctgtccgagctgtccagacgagtacaaggtctcct

SEQ ID NO: 99405 - DNA, 798 bp, Zea Mays
cagtcttaggccatgctcagtagagcgtgcatatggccgtgcaagacactattttaaactttaggttgtactgtttacataatggagtttaaaataggaagttggctaggaggtgggacagggaggctgctggaaatagccttgggcccaggctttacaagtgtgttgccaaagctgaagatgcaatgcaactggctttctgtcagcctgagcagctgtggttattgacctccccctatgtcacatcattcgtcaatcgtcactgacctccccctccacacaaaacgcaaacacccgactctccttcaccattcatgtacgtggagctgaaggcagtgccttgtgtcaaccacgcatacctgctctggtgtgatggccaacgaccctctccgctggtgtgctttccgtactcagggctctagtgctccagcaccatcctggtgcacagccctatggctgtctgcatcaaggtggttgtctcgtgtatatggtcgcggaaaacactgctttcagtgagagtgaagtttgaaatagcggatgaggtggggaattggatgggtaagctgctggagaccgtctaaacagctgctctccctgtagtgtgtttagattttgcttcttgtgctgctgcttctttgatcaggtagcataaaaaatacagcgctagagtacccaagcgcacagatgtgtggtggttgtcttcttcagtactgtactgaaatgaaatactccctgacccactgggccaattggttcgatgaccttgatgaatttggtcgacccaaagccaataattag

SEQ ID NO: 99406 - DNA, 343 bp, Zea Mays
gttccctcccagatttcatcgaaatccactaagtagtcggtgggatttgtcgaattaaagccaaaatcgacatgcaaagaagatattttacagttttctggttatttagtgtgtaattatacttatatgccttttggcaacaatatttagtgagtatttgttatgttggtgaggcaatatgtagtagatgctaactatgtgatatatttcagtttaggcatactgcggtttaggcgattgttgttagttgatattttgaacataagtgttagttctgtcatggcagttcatagttgttatctcatatttgtattatatttgttgcatccacaagaaagttgat

SEQ ID NO: 99407 - DNA, 330 bp, Zea Mays
aatatttagcaatgctggcttgtttgctctaggtgaggggagctgcctattttactctttcgaacttcctaatctttgctgagtttatcatgtggaggtgttttttagtgaggaagaagcatcgtcgattggggaagttcacacttttcatgtacaatggcggatgtctcttagtgaattgggaacacatttttcatgtaagaaaagatagggaaggacaattagttgcacttcctgtttacccagacaatgctgtcttgttgtgctgtacaacttgtgtaagatttggcgttggagaggaggcccacaattttaattggaagtggtctt

SEQ ID NO: 99408 - DNA, 479 bp, Zea Mays
gtctagcaaaaaaaggttaccataactcgattgtcaccgggttttgatgaggttaattttgacagttggtggagcagatcagctgaacgtatccacgaagatgcccggaaggggtttaactctgtggtgattttaggagcttggagtgtttggcgccaccggaatgagtgtgtgtttaatgggtcgcaacctagtatcgctaagagcttgaccttagccggggatgggtatagtctgtgcctctgtggtgtattgttggggctaaagggccttctatgatgtcaggttttgttcatgacctaggttgaggtactgtggtgcttcctttggtgtctagtgtgggtgatggggttggatctggcagtgagtgtgttgtgggcgtgtgtgttggttcttgtatctctgtttctcttttctctttaatggaatgatgcgcagttatcttgcgtgttcgagagctaaaactgctttgccattca

SEQ ID NO: 99409 - DNA, 513 bp, Zea Mays
gcaaggtgtagctcaacccgtatcgggtctgcactgtaaagctgatatatgaaagcatagagattgagtcaattggagaccttggctttgatggggattgttagaattaggctcactagtgtgtggcccaattcaatatggaagccaaggaggtgtgtagagatgacatgaggctttagtcccatgttgctcatctaggtaggagagaaccaacttatatgttggagtgtttcctactcttcacatgagacaaataaagggccatggaggctgtcacacgctcgcgctcgctcacattttgcatttttcacgttatttatcacgtgacttatgacttgcgatgatacgtgatcgtgttgtgacgtgttcctggaatttagtagatcgaactcgtccagttattgcgaccctctataaagggggaggtccttcagccagaggacacgacacatcaaccaactcgtcttctcattctcttctctcagtgtcgccgcttctctaccatgatgtccc

SEQ ID NO: 99410 - DNA, 705 bp, Zea Mays
agaatataatgtgcctttgcagttttcagtcttgcatactaataatactgaaaaagattacatcggctatatgaagccgtccacctccccagttgcacgtcgcccccttcatcgccatatttctaggatcagcgactaggacttgctccggtcgtgatataccggattcttacttaattctattgcagcttctatctgttgactatgatgtttgtctgtctgcttgcctccagtccgaacactattggtcaccgttcactgtttctctgtgcccttcgacatatgtggtgtccgtgcagtagtgaagctagatgtgctggctctggctacctccatattaagctccaataaggccacgagaacttggtttctgttaactctccgttatcgtagtctcgggttcgggctgaacttcgctgttcctgtgccccatcgcttcgtttggtgctcaccatccctttacgcttgtgttaaccccctaagtccctgtgactggtgaccgcgctatagcagagagtatctataaaaacatattgtaccaatcaaagctattcctgtttattgtgttgaaatatatttcaagccagctagtaccctatcctttcataaacagattctggtgatgcattgtctgtagacagtgtaatcaaataaaatgctaaattattgaccactaattaaggtgtagtgaaaaatatgcctatc

SEQ ID NO: 99411 - DNA, 366 bp, Zea Mays
ggttaggctgcttagggtgattgaggttggggccatcctggtcagggtgactaggttaaggccatcctggttaggtgggcaagtcgagattgctaatagttgggtcgaccaggttaggactgacctatttggagtgaccaaatcagcgctgactaggttgcctttggtccaggtcatgttttggcgctctttagcggtatttcggttaagggttctcctcgtagatttttcgtagtctttggttggtgcaggtttgtttgtgtttcgtttggccttagagaatgacattgttcgttgaagtttaggttggttacggtcatcctagttgaccgatagtgtgtagtgcgcctgatggatgtagacccc

SEQ ID NO: 99412 - DNA, 321 bp, Zea Mays
aaactctccaaatgtgacttctggctaatggagatcaagttcttaggtcacaccatattgtaggatgggatagcggttgaccctgtgaaagtacaagaagtgatggattggaagcctcctaccatcgttcggcagatttagagtttcgtgggtttggcaggatactatcggcgattcattccggatttctctaggattgctaaactaatgactgagttattgaagaaaggagtgaaatttgattggaatcagaaatgtgaagatgcctttcatgccttgaggcgacatttgacaacggcacccgtgctcgcatagccttac

SEQ ID NO: 99413 - DNA, 280 bp, Zea Mays
attcgtccaaattaaacaccaccgctcaagcacactataaattgagcacaccgacgggtccgtagggtaatcaaacactgatccaccaagtcgtgcccccaattactcaccagcaagccccaatttcggttttcccccaattcggtccgaaatcccgcaccttacaacctcgttgtggccatcctactccaggtccgctcatgcccactgctctttcgtttcagtgtctttgtgtgtctctgatgctccccgaccccgctaattaggctaggacccctta

SEQ ID NO: 99414 - DNA, 468 bp, Zea Mays
aaaaaaaataggcaacagtcatctgagttcaagccaacagtcaataaattagaaactgaaaatgggaataagagaggagatgagaggagagaagcaggggacgaggaacaaaacttgggttgtctgctgtcgcgcgtacaggagagaaaccttcaacaagcagtagctgcccgcgtacaggagagaaacaagattgggaggagagaagcaagttttaccggcgtacaggaaaaaagcaagcaactacaggggtctggcgtacaggagagaagcaagcagctacaggggtcttctctaccgcatgttttctctccttccttccttttttggcgtacaacttctttttctggcgtacagtcctttactctgccgcgcgccagccttttctctaccgcgcgcgtcctattttctcccccgcgcgcgccattttctctcctgcgtgcgcgaccttttcccgcccgccatttt

SEQ ID NO: 99415 - DNA, 496 bp, Zea Mays
attaaatggtggttttaagtgaactagttagcgttgtagttcgtcagatcgtcatccaacggcttaaagccgaccacgccacccggctaagctacacccttagatcaccgatctacggtcaaggcatgatccaccaaagcaatatgcccgatcagatctgagtcgttcatcaatggatcgacgacagcgcttggcttcgccattgcgacaccagcacatggcggcgccgcccagcttcctggtggtggagcacgtcggaattgcgtggatcgaccactacggcactattcccccaatcgtaaggtgctacatgtggaggagacgatggcgaacacaacaaagggattcttaccgatggtggggatggagagaaggttaggcatggtgattggcggcacccaggctacagcgagtgattcaccacgaatctgtaatgccccgagtcctgatgcccacggtatggtctccgcaaagcacggtgatgttcccaaacccg

SEQ ID NO: 99416 - DNA, 532 bp, Zea Mays
gtgtgttttcctctaatttcttcttaacaaccatgcttacacccttaagcaaagttgttctcctttgtttgctatacaactttgatgtggtgccctagggcaaaaaccctataatttgaaagttacaaggctccaaagttgagcccaaaactctgaaattcagacttaggctatatagtgcttaagaggtgacttttgcaaattagtccaaaacttagggtttggcttgtaaatctccctaaatgtgaaccatgtgactttatatgctttaacatagtagtttttacactttagtccaaatgtgcactgtttttgcacataggcccctagggtttggacttagggttttccagggttcaaatgggggtttttggtatctcaggggtataaatgtgattcaagttcattcttgggaacattttatgactattcccctaaagcttttaggttttctcaatttgggttatgttttaccctttaatccctatttagggctaagtcccctgttccagggttctatttgcaaaatacc

SEQ ID NO: 99417 - DNA, 301 bp, Zea Mays
ctacttgttattgaattttgacttcataattatctatttttggaattcgtgatggaacaatctttttatgcagcagaactttctccaccaccagagcagtatgatcccaaagttgatccatcattaaaaggaatccttgatcaattcaaggtggtgaacgcagttatagatgaagctattaatacattgttgaatgaagctgcagagaaagttctgaagaaagaataggattgttagaaatcttgttcttgtttgttgtggtcttgagaaacttgtaaagacatttgaatatatgtttgct

SEQ ID NO: 99418 - DNA, 666 bp, Zea Mays
aatttcactagcctctgtttctgcccatactactgatcttgctttaaatacatgatttgagtagaaactacctggcttgattatgggcatccctctttctctgggtctaatctctgaaccaatacttggccaatcagttttgtggatgctcacattttttataaactgtcgatgattgatgcctgcttcataagaacacctcctgaatgactttttttatttatcgagttgctactatctattacaatttttgtgcacattataggttgggatgaccttgtatttcaattatcattacccaaagcccttgataaaacacagtactgtgctagtgttctgttgcttgtttttttttgagaaaggggataaccccctatttcattacgaaatagaaagagacataagttcttacaataccacatgagcacccagaattttaaagctgacaaaacacacaactatcagctaaaaaggaccaaaccctgaccaaaccaaactactagtagcaacacaaaaagtaacacagagctgaccaacatcaaagttcacacagatcacaccaaagcagcaagcagcatttctatctcatagtttttcctgtagctaggcgctacaagggagaagaagtagaacgaccgcacagttattgaaccaaaataaccagat

SEQ ID NO: 99419 - DNA, 508 bp, Zea Mays
ggatttattgcctcaaacagtcctgagttaggaatgaagaggagccatatgcctttgctttggctgctgattcagatgatgatcatcagattggtgaactcacagagagtgacattgagatgttgcaacgtgtttttccaaacggccggcatccaagagtgcatgagttcagcgatcttagtctttctcatcaggcaaatgcagaaggaagggatgatgagctgttagacgctcctgagggcggtcctagcatgatgattgaaaagggtaggttctacaaggactgactgccttgaagaggtggttgcaacattatgcagtcttacaaaagaggtcgtatagagtacttcattcgtacgagaaaagtcattacacagttgtatatgacaaggataactatgcatggatggtctgtgctaggatacaaaagatcaccgcaaagtggaagataacaaaagtagtgaggccacacacctgtgatgaacatgagttaacgatgaaacatcac

SEQ ID NO: 99420 - DNA, 479 bp, Zea Mays
cgagtggccagcatcaggtggttggaggagctcgcttagatctttgacaaggaaggaaggctgagtacctgaatattcccctgaaagatagcatcaaagggtgacgattcaaatggtttaccatggagaaccaaaacaattcccttcctccccttctagaaggcagccggatgtgagagtttccaattggatagaggccccaactgactcggaggtgaatgaagcaaaggttctattggctgagattgccaacctgaaagtcataggtctatccgttgaggctatggttattgacttcatgttcaagaatattcatcctctcaaagacaaggtacatctcgcctatctatattacggggtttaatatccctcccgagtaacagacaaacgtatctcagaggaagatataatgggccgagttgagctgatgctaagaggtgccattgttaatgatggtgcccctcggtcttactctgcgt

SEQ ID NO: 99421 - DNA, 485 bp, Zea Mays
ttcatgggtcacattgtggtaagcagccaccacctgggaacgaagggaagaggttgctagaatgaataaccggtgtttgcgatagaccaggcccccatgtgtggaccaaatgtgtgcagcgggtgtcactaagttgctggaatcagactcctcctaggaaccctaaccactagcaagaagttgtgcacaacattgttgaatggcaggatcctgtctcaactcgatttcccatctctcccgggatgatagtgttggagctgaaatagctgcacaagtactcactggagcatggaggcgggatagtgcatcggcgaccacattcgcccgtcctggtttgtattccacagagaagtcaaaccccataagtttgctaagccagtgttgttgcggtggagttactagagcttgatccagcaggagtttcatactggcatgatctgtacggaccacgaatgggcgcccccataaataaggtctccagtgtc

SEQ ID NO: 99422 - DNA, 313 bp, Zea Mays
catacacaaagatagagctgagtaccttccttgacacatacatcacagtggcatagactaatagacacatagttactcacattataatattacatagacagtagacacctatctaagaatccaagacaaccatacatgtgatgtgaccggctcctagcctcacattatagaacattagaacattcaaagatatgttgatgatagttgacaatgcttgtccgcttgaggctatttgctacaacccctagataatttcgctacatacctatagttgaacctcaggcaagtcatcatcttcagcagccacgttgtc

SEQ ID NO: 99423 - DNA, 530 bp, Zea Mays
gtctactgtccggcttgtgctctctattgccatatctcgtcaatgggatatccgtcaacttgatattagcaatgcttttcttcatggtgttcttaatgaggatgtgtatatgcatcaacccccggggtttcaagatccttcaaaacctggttttgtctgcaagcttcataaagctatatatgggcttaaacagtctcctcgtgcatggtactctcgtcttagtgatcgtctctgccagcttggttttgttccttcggttgctgacacttctctcttcacctttcatcaaggcgcaattatcatgtatttattggtttatgttgatgatataactgttgttagctcttcaccgtccatcactcagcttctcttgcagcagctttcagtgacttttccagtcaaggatcttggccctctgcatttttttctcggcattgaagtggcttccaattccaggggtatgacactcactcagcagaaatatgcccgtgatattcttcgtcgcgctgacatggagaattgcaagtcag

SEQ ID NO: 99424 - DNA, 371 bp, Zea Mays
aaaacgcaagcgcattacatccatgcacaagtctacaccaagaaactatctgcgcacagaccaactacaggcacagccagaccaacataataaatgcgccagaccaagcgtgcaacgcccctataaacatagccggatacgcgaaggcacagagcctcatcatacaaactatagtacacacttacaacgagggcatcacaccttacatcggttcaaccttcggaatgattctcatctccctatagttaaataacattatcctaagctcctcaccctcaaaaagacttcgcaactccccctcacccacactcgccccagccggcgaggacaacaattcctgcttgccagccctgcccacacgaagccgaccg

SEQ ID NO: 99425 - DNA, 679 bp, Zea Mays
caatcgcagaagtaaatgcagtatgaaatttcttcgcggggcatagaggtcgccctaagataagcaatcgcaaacgtgcttgtgctgggttaagtagacgagagtgtaccgtgccgatttaagtcattaccgacttaaaccgactgctctgttagtagggtatagtggtcaccccaagttaagtaagcgtgaacatgttgcaccgccttaagtcattgctgacttaagccgattgctccgttagtagggtatagtggtcaccccgagttaagtaagcgtgagcatgtcgcaccgccttaagtcattgctgacttaagccgattgctccgttagtagggtatagtggtcaccccgagttaagtaagcgtgagcatgtcgcacggccttaagtcattgctgacttaagccgattgctccgttagtagggtatagtggtcaccccgagttaagtaagcgtgagcatgtcgcacgtccttaagtcattgctgacttaaaccgattgctctgttagtagggtatagtggtcaccccgagttaagtaagcgtgagcatgtcgcaccgccttaagtcattgctgacttaagccgattgctccgttggtagggtatagtggtcaccccgggttaagtaagcgtgccggttgatagtgaacaattcgagtgccttttgaagtcttttt

SEQ ID NO: 99426 - DNA, 457 bp, Zea Mays
ctggtttcgtgattggagctttcattcattactctgctgagtccgttgtttgttcatcccaccacgttcggttcctggtatgattcctatcctaaagttaccaacggtaaatgagaagaagggaaatgaaaagaggaaaaaattgggagaggggagaccaaggtacaaccgaggctctctcccccgcttatcgtgtttgtggtaaagagcattcttgataacacatattatttataaccatttgggggttttacaaagaaggtgtggattcgctctggtcggtcatctactactggctctttgaccataggcattacatccggtgtttcctccgatcctgccgttcgtggtgtcccatcctactaggactgccgacgaagccatcacgactgaacgatcctcgttccccttgtcgccaggggcgctactcatcatcgctcctacagggacccaaatc

SEQ ID NO: 99427 - DNA, 346 bp, Zea Mays
tctgagtctgtcccctgtaacgttgtgttccttcccttttatagtctaagggaggcacatacaaggatgctgagccctgacatgcgggcctaggagcataatgggagaaatacattatgtgaataactaatgctgaaagagtaacacatgagtaatcggcgtgagtcatgatgactgtagtccatgcagtattaataggtcattacccttttcctggtaatgcgggagtaatggtgagtaactgcacggcccacgtatcgtggactgagtatgtcgtctgtcagcggaatggacaggcgcatgtcttatacgtaatgaatgcgaaggcacgtgtagcccagaggcg

SEQ ID NO: 99428 - DNA, 2437 bp, Zea Mays
ttgcgattagtcggccgactttaagaccatgacatgtactgttatttaaggcattattaccaaaggaacagacatgtgacaatatgatagcttgttttggttttacatggtacttctgacattggaagcctaactgcatatttaggatttacaaatttttattttttattctctttgttccaggcatggtaagtcaatttcctcctgcaacagtgaaaatgaagttgccattttctataaagccttggactggatctgaggataacattggaaagcttttgatggtaatgttgtattcatcttatattctttactctattatttggacaaaagatgttgagatcctaaacatatcttggttatcagcgaagattttaaggttgccttgagtcattaatggccacattatatttattgggacatcagttcccaagaaacattaactgtgatgacagtcgccagtcgtctcccttgctcaaaggcttagggtgtgtattgggtttttgtaggggagacctcttgacgcctcccctgttttctgtacattttgtatggtccctttctcatctatactactctattaagaacataatgtggacacctggtgctaccacggcttcaccctccccacgctcagcgcgtgcaaaaaatagtgcaaagtgagcactcgaacccacaacccatgctctagaaaattgaggctaactattagaccacacgtaacttagtgtttagaaataaacaataattatatttgtagtctaggcgccgctcccctgcttcgtggcaacgcacggacacatacctagttattaatgaaatgacacaattctcctgcattgtttgagggtaaaaatagttcttaagaaacattaaattacatctgaattctgaagtgttttgtttcttttatttattaagatgctttgctcttttttagaaaatggaaaaaattctggcctttgccaccacacagccaggtcttagaatgttgtcagcttatttgctgacagaaataaggaaaaaatgcatccaaatcaaagaaaatcatatgtgaagtttattattactttgccatccattcttggcaaacacatctaaaagatgctatgctcttctttgtttgtcactttatcttcccttatgcttctctctagtatgtgtaaacgttttcaatttttaatacattgacatcaattctatgtttgtctatatactatagtatctatggtatttgtataacgccactttgctaactggactgcaggtgtggaaattcttaattactttcactgatgttctgggtctttgtccagttacacttgatgagtttgttcagtctcttcatgattatgtaagtttctttttcctcgggacttcagtatgtttttttttcctttttttgctggtaaagtgatgtataagggtggaaaattgaataaatagatttgtatggttatgttcttcaaactttctgacagtggtaactggtaagatcatacacaatgaaagacacacagatgattgatcaaatgttatatacttatatgtggctttgggcaacaaatgattgatcagtcactaggattggaagttagcatctattgaagcaatatactgaaatctacgtcctacgatcttcttttttatatttgtcttagcctaaattgttatcacatttccttttataggattcaaggcttttgggagaactgcatgttgctctgttgaaatccattatcaaggatattgaggatgttgctagaactccatcaattgcactaggggtgaatccaggaggtggtcatccacaaattgttgaaggggtgggtatcgatttatacatgcatatttgatgttaatcacaaatattctatttcttttctttttatcctgtctgtttcatgcttttctttagtatattcttgaacattcatgtttctttctggtaggcatattcctggggattcgatatacgtagctggcaacgtcatcttaatcttcttacatggcctgagatattaagacagtttgctttatctgctggttctggaccccaattaaagaaaaggactgtggaagattctcactatcattatgataatgaggtatgtgctcctatacaacccacctgtctctaagattatttcagttcaaagtatatctctaatattatttactctcctaataatatgtatttctcactttaatcagtaagatatttgaattttgttataattttctccttaactgatacagtactttgtaaacgaatggtcaattgatatttgtgaaattcaaaataatctcgtggatgctgtcagcaacttaccagtaatactaaggctgacctgttttgtttgcagtccttccaaattttgtgtacttaaactacatcatgttgcatcaatttacggtactaaatagtaaatattca

SEQ ID NO: 99429 - DNA, 661 bp, Zea Mays
tgggctactttgggggaagctaaaagaaaacttatccgatttgccggagaagaaaccaccccagcgccgaaggatgatgaagtagtggttttcaagagttttttcaaagcaggattacgacttcctctgaacgagatgataggggaagttttgaaaaattttgaaatatatcttcatcagctgacccctaatgccattgttaggcttagtgttttcatctgggcccttcgaagccaagggatgagcccagatgccgaagcattctgccgagtgcacgagttgcactaccagacgaaggctagggcagacggtctgcatgaaaattttggctgctacaattttgcgtatcgcaaggatacgaaggctccagttcttagctaccgcaccaaatggccaaccggttggaaaggtgaatggttttatatcaaggccaatgagaagaagtgcgggaaactgatgacgatggtcatgtgcccgctgactttaagcttcggaatgaccagacccctgtgcaacatgtggctagggtcagcatgccagctggccaaggtagaatttagggtggtacctgaacaaatcagcacgagggacttggtgcaagaatacctagccaaccgaacgtacccaacgtcaagttattgggtgatgccgaagatgaagg

SEQ ID NO: 99430 - DNA, 557 bp, Zea Mays
gagacatcagccgtggggagagggaaagccaacgagggtagtagaaccactgtaaccatcgctaggaactccaaagcgacgagcgctagtgcgggaacgtgtgtggaggggatgtagccgtggtaaaggtcatcacggggagcagggatgacataaatgaagtttggagtcgtggtcgactgtcgtgactagatccaaagcttctacctctgatacagggtggggatggccattgcagatagcgtggaagtcgatgatgtagagcgaggccacgactgatctttgagagcagcgttggagtgacatagacgaaacgagactagaggagggaagatcgatggcttggggagtggcgtcgtagagcgccaataggggtcgacatctacttcaatttgactcaaatgaggaacattttgatgttgacgatgggtttcgtctgtaaatggatcgaagccatcgtacgtgtaactgtgtaagtgacatcgtggacaaaattactccataaaaatatcaacatatatgaatgctacactaaaaaactaagcaagcgatggttc

SEQ ID NO: 99431 - DNA, 332 bp, Zea Mays
agaggtttgggcaaggttgattagtgtaagaaatttatttttataacattatgtctttgcttatttaatatgatctttttgttgctgagaactaattacatttcatgttgcatttattaggctcacccaaaggttgcaaggtttcgcaagaagccatttcctcttttctactctttagaagcactttatgaaggtgagtgtgtgtccatttcctcttttctactcatttctaataggctatgagctattatacctattcgtatttgttcatttttataggtagtgtggctacgggagacttaaatttcacatcaagtcaacaactgcctcct

SEQ ID NO: 99432 - DNA, 506 bp, Zea Mays
gaattttttaagcgacgagattcaatatttgttttgtcaagtatttgtttttcagttttttaggattgttctgttcagcatttttgtttagcgattgtagcattaattttacagtatatgattagtatattttctagttttagtttgtcccagattgcttgtatagtacatttattcaatttttttgtgtgatttgttttctattgttgtttacgattcattagtttttgatcttgtagcttggaatgtttgtttctatattttttaagttttgatgcacatattaagttattaactgaattgtatttcaaagtttataagccactctgatttaaaccatcttttgtagttgtagtccagttggccaaactttaatgcattttaatttattctaccattgcagtttttcattgtattgtttttttttgcagaaaatgtctcgtcgtcattgtaatgtgccagattcattgactgacgacaatgattttattgatatgccaacatca

SEQ ID NO: 99433 - DNA, 1725 bp, Zea Mays
ctttaaacacaggaatgacctgaaaaatgttagacatgcaacagattacaatagttttcttcttccctacagctaaattgttagttagccacaggggcgaagccaagttggtttttcctggtgcaccggcaccagggtaaaataaacttttgttaatatttgtattaaatttgtcatgtatttcttttaaaactgcatacttttctttatgtttgatagaatgtgcaccagggttatttttgagctggcttagcccctagttagccaagtggcatttggcagtttcagatctgtaagactgtaacaatgtgtttatagagtatttctttgaggttgtttgaagtctgcaggctgcagcagcatcaaaaacttcaaaaatggatatacctaatttttttatttttctacccaagctcaaatatctctatccttgagattagcaaacaaaattatctgccatcaattctgcttgctgaggcaattataaaataaaactatatgacaatgttgtgaccgcatcaaatgaaaaagcacaaagcatgttgagctgtagacagtagatactcagtttcacgcacatcatccaaaatcttaagttattgggaaagaaaattggagtgtgcaagacacatttggaatttatttcccattgccaaaatattgcaggtttcaaatgtaatgcatacctactgagcagcattagcttatgtcttgcaagtatggtttatccccataagccaagactaagaagcttgctttccctcaaaaaattaaacaaaagaaagcttgctcttttgttaagttggttccaatagattgtttttaggttcggttcagattagtttaagttttatatggccttccacagcattaacatgaacttaaaaacatcaggctccgccataaaaaactggcatcctacttgaaaggttgcaacatgtagtcactgccaggacacatgtgataataaaaacaaaatagaaggagcaactcctctcgtcttcctcacaagcaccagctctgctctttttccaactgtgtacatgaaaagcagctcaggttcaccactattgcggggtgtttctaactttccgccaaagtaggactcctacttgcatgtatgagagtcttggagaggactgtataaacaaggggacaaagggtgaaggccacaggcatcaacgaaaccaacacaaggatctcattcaaggcttgtaaggagcaactgaaagcgccaaaaagaattagggtagacagttttaatgcactagattcatgtatggggcaagaataagagggtcctagagggtcaagtagggttgtgagagagcaaggaccatggagttatgcttataaaatttgtggtcggcttcaccaaattctaacctcttgttgtggctgcttcaacatcatcttctagggttttctaagagatccgtctacgttgttcttgatatagtggaagcttgtgtcatactggcaatatcctttcaaagatccgagggcaactacgcataggggtatcaaattctaacaaggcggcaccacctttggcagggatggtggcccagatggccatgttagggagccatggcgccactaggagggccaagtatgagtcaatcgggagtgtgacctgaagctcttacacagaaactttgaactgcccactgtcaagggctctatggacaactcatctcgacctccacgccactaacaacactg

SEQ ID NO: 99434 - DNA, 409 bp, Zea Mays
gccaaaaaggctttcatgcattatattatatattttcgggttacttcgggtaaaactttatgcatgaggagagagcagagaattaacttatccaagttctgttgtatttcaatttagtttcccagattattcaagcactatagagcttgatatagttgttatggccacttggcgatatataaatatataatgccacacaacacaatcaaataaaatatagagctaaacaaaattgtttacgaaggttgcgcataatgtgactttacgggcttgaacaacccaccacaattcacgcgagtacaagctctagcgtatctagcgtcaacacgtgtgcgggcatcagggctacgacaatatagcaagccttcgtaataaacgcaacaggcataattatggctcggtaattgtg

SEQ ID NO: 99435 - DNA, 348 bp, Zea Mays
caaacatgcattaaccaaacatagtcaggtgctcgtgcgttgccatgactcacaaattattaatctttatttttgcataattttagatttttaccgtttaaatgtgggagaggagagagaggtgaatggaatagtagagataagatttataagaaatagggatctgcaccaagaacataaacacaaattaattagcatattcttgcccctcaagttaaaatcatgcatcaatagtacgacaataatacaaatccggtgtgcatactacagaacaggaatgtaggcattaccttaattaaaaaaagtaatgtgctagtattagtagtaccttctagggttgagtcttcc

SEQ ID NO: 99436 - DNA, 867 bp, Zea Mays
cttggaggtaggtgccgatggaatcttggggccattcaccgagttggagtaagttggtccgggtgccttcaactgagggcagttgttcttgaagtgactggggtctccgcagtgccaacaggcgtttgctggcggctggttgcttgcaacggagggtgcctgatgggagctctgactctgctgactgtagcgcgatggagagggtccagattgcttattgaagtttggacccctgggtggaagcccaaagggtcgagctctctggtgacgttcttgctgttgcgctcggaggacttggaatttcctcttgatgtgccctttttcttcttcctttgccctttccacttgaatagctttgttggagaggtgagagaagctgtggaagtcttggctggcgaggatggtcttaagctcgggtcttaaccctctcagaaaacgggccatttttctggcctcggtgctgacatcctcaggcgcgtagcgggccagctctgtgaacttgtgcacatactcactgactgttctcccgccttgagttagctcccggaactcatcctccttgagttgaactatcccctggcgtacgtggtgctcacagaaggctgcttcgaaatctgcccaggtagcatctctgacggcttcactgaaagtgtcccaccaagctaaggccattcctgaaagctgatgagctgccagctgaacacgctgattctcaggacaagcgatggcttccaacttcctcttgatcgtgcgaagccagtcatctgcatcgaggggattgctggaccccgcgaacgtgggaggcttgagtcttaaaaattctcccatcctgtcctgtggccttccaccgcctgggcgctggttttc

SEQ ID NO: 99437 - DNA, 352 bp, Zea Mays
gttactaagactcaggcgagcccctttacggacggcgggttgaatactagaaaccagggggtttcttttataaaactgcatgtccgaagaggtatggatcaatactgggcgcacgattaaaacccgacggccaggattagactttattaaaaacgaaccgttacgcgatatggaccgttcgatccgcacaacggctcagatttaatggggtgcaatccaatcggtaccgttcggtccgatccagcggcccagatcaatccatcgaaggggtacgctggtgttctaatctaggccgttcactagagatccggcgacccggggacatcttccccaacccgctggcagaccacgg

SEQ ID NO: 99438 - DNA, 814 bp, Zea Mays
ttgtacttgtgcgtggattaggccacaaggttcattcacgctcatgggaggaatcgtaatttgtgcctcctcgacctcccgtatcgtgtttgcgaagttgtggggtttagggttcaatggggcgctgcagtggctcttgccattgcacagctacactttagtggtaacctccatgatgccatgggcttgcctgatggatcaacgatggtggatctataccttttaacatgtgatttcgatggtgccacgaacgttgtacttagggtagtgtcagtagagaaaataatagatgatctcccatagctcttgttttgtggccagaccgtcttgacattgcaacgtgcatgggttttaggtccccaagatcctagccaatctcaagatttttcttggtccgcggggcacttttcgtgcggctttcactcgtccaccatatttgtgcggggcgagcccacgatcctctgcttgatgctgaggtctgtctagggggtgtcccgtctttttatcttactctcccccatgcatccccttcacgagaatgaggggaggagattcgtaccacactttcctcgatgggctagcagtgatgctcgatgagttacaaatgggtaatccgagtgacgccctcgttcctttcacaggatccaagcacggggttcgttggggaccatcctcatactcccgagcaccatctcatatagttatcgactccgttcgactggaaccaatggctcgctgcctctctcctcgaacatgagctgattatgcccttaatgcttcacacgtcagggtcctggtcgctagtgtgcccatc

SEQ ID NO: 99439 - DNA, 656 bp, Zea Mays
gtctgactgccgaggctgtggttgccgattttgttttcaagaacattcagccgctaaaagacagagcgtatccagcttatctgtatcgaggccttgctgattcaacccgggttaccaacagaaggattcctgctatggatttggtgagccggcttgagatgatactcagaggcaaggtgtctaatgtcggtgctcctattgcatacttagcctggaatctgtctccttccaaggccttcatcagttttgtgtcaaatcctcctgctggtgatagcagtttgggtcctagagtgtgaccttctcccgaagaagttgaggctttggttgcttcacttggcgaaatccccgacgacgagaaacaggttcatttcgaggtgcctttgaatccgagtaacgcagaaataagtgccatgctggacatgttggctgaagattcctctgatgcagcccctgctaaaacactggttgtagcacccatccccgagtctggcaaagctttggatactcagaggtctaatagtattcgcccgaagcgtcctcgccgaaccaatcctccaacttctcctgctgaggggaagaagaagaaaaagagacgtctttgtcgagtgtcatgcttgaatcaggatgccggcccttctgctcctgctgctgaggaa

SEQ ID NO: 99440 - DNA, 1035 bp, Zea Mays
gtatctctatgaaaggggaacaactttgcttaagagtgtaagcatggttgttatgaagaaattggagaaaatgtactcaaagttgggctgtcaggctatctaggactgaattctggtatgacagtgtaatgaagccatctttgagcttaaatttgatcatgatccagtcattatctggttatgattactataacaagattaaagctgaataatagagctacaacttctttaaagacagattgtcaagtcattacatgggaaagggagatttctgctctgcaaatctggctgtcagtccaactgattggagtttaccatggtagagtgcctgaacaagatcagaccgccatcgcatctcactgccgatgatccccaccgcgattcgtgccgacgccgtcctgattcgtgcacggtatggagtggataacgccgggggtggataactcgtacgtggcgtcattccccgagtccaaccggagtcctcaccggcggccaccgtgaccagtaaattttgccgcggtggcactcatgccgtgatctccctcactgtgtctcctaccgacgtggtcggcatgcgctgtaatactcaaaagtgtaataaagagaatagagataacctcaatagtttgtggcctctactatttattgcatgtgatcaacactagttaaaagtggatgaatagaacaatgaacacataatcaatctgtgcatgatggtgagtttttatttgattgtgcatttgtgcttaaaaaaataaatgtatcattaatagcatatcaatggatccatagaattcaaagtctaacttaaaaataaaaccatgaaaatagaggagagaaaggaatattattcaataaataaaattataatttaacaacttcatcgcagtgggtatgatcaaactaaataattagtcggtgtacaaatgagccataaagtttgaatttaaatttaagtttgaatttggaaagaaggaaaagataaaagaaaaggaaaataaaaaaagaaaaaggataaagcctacctgggtcgtg

SEQ ID NO: 99441 - DNA, 386 bp, Zea Mays
aattggacaactttgaaaacatgaagagcctaataagcaagttacaaagtaaatggacaactcatgatttgtttacaacaagagggacacacaagtcaggactatttgcacatgatgtccttaagctgtacaacgaattgttgcatcagtttttttgaaacttgtacatttaaataatactttgtagcaggaaacatactctagtgttaagaacaggacatgtgggagacaaaataaatgatgtcctcaaatgttgcatacgaatatgacatagaagttcctagaaatgtgatatttgtaatagtagtagtaaccatataattatgctgctaagacaagaacagaaactaaaataatgtggcccgcaatgtatggtccgtattgat

SEQ ID NO: 99442 - DNA, 334 bp, Zea Mays
tcctcagctcctcaccctcaaaaagacttcgcaactccccctcacctacactcgccctagctggcgaggacaacaattcccgcttgccagccctgtccacacgaagacgaccaccctccacctcactcactctacgcttcgtcaccgcccttcgccgcctacgcccagcactcggaccgggaacctcagcacccatcacacgcggagaagcctccgccgcagccacatccagtgccgcaaaataatccaaatcctcatccgaagactcttccgtccacaccaccgaactcccagaatcatcaggctcaaaaaacttagacacagaatgtgacac

SEQ ID NO: 99443 - DNA, 640 bp, Zea Mays
cgcgcggggcggcggctcctcgatgcctgtccctggtttcctcccacagggcgttggccattttcccatggactccagctttattgagtgcaccgcacggcgtcctgcttcagcagtggcggagtgatggctgttagctctgtcttcggtgtcaaggctggtcagaccatgagttccttggaggcgctgttggatcactagaggaaggacgtcgtcaacaagaagggcgagccagaactctgccaggacgaggtgtagagctcgggaggctgctgctgctagggactgctcctccaagggaatcttggactccaagatgatgagaaggcccaggtcagcactattcttgcatcccgtttcagaaacttgtcgatggtgtccttgacgccgccattatatccatgctgaggtatttcaatctaccatattgctctgagtgtagaatgtatctcccaaacaggggccccaagaaaaaaaatttgaccggccaaccgccaaaagggataggaaaaaaaatatacatgctggagcgaactcgtgagatctaagcatatctactaatgtcactatatggctctgcatatctacgtcaatatttcttttctgaagtaactgaaatacatggtgtttaacatatttg

SEQ ID NO: 99444 - DNA, 483 bp, Zea Mays
ggccgaacgacatggaggtatagcagaaagctccaaacggggtaatgaatgctgttttttcctcgtcttcttttgccaagctaatttgatggtatcctgagtagcaatccaagaatgatagtatagaacatctggcggttgaatctaccacctggtctattctaggaagtccgaagggatccttcgaacagtgtttgttgagatccgtatagtcgacgcacatgcgccaatccactttattcttgtttagtacaagaacaggatttgctaaccactcaggatgcagtacttctctaatgaaccctgctgcgactaagcgagctagctcggcacagatggcttctctcttatcgggcgtgaaaagtcacaacttttgtcggatcggcctcgcctggggatagaccttcagtttgtgctcggctagttctctcgggactcccggcatatccgtaggttgccatgcgaatacgtctcggttatctt

SEQ ID NO: 99445 - DNA, 288 bp, Zea Mays
agcaatcattcattcaacacacttggggaataacaaaagaacaatacaccaaacatatgcaacagagtaaacataggttcaacaaaaaggtaaagacaataaagtgtttcctaagtttggggtaggtcactatgccaagtggtttattattctctaacaaagtctatcttgttataacacttgttcaaatatagttagttcagggatgggattactcattaggtagtgttaggtctataaacttaagtatttgaacatttattagaggttcctacctttattttattt

SEQ ID NO: 99446 - DNA, 787 bp, Zea Mays
aaactatccaggggtgttattgtgaatactaggtactaatttgtaaattctaggaccttagagtaaggctttgtctgtggacgaggacgacatgtttatacaaagaaaagacaggggctctttagcaattgacgcgcaacgaatgggtatccttgcgtctgggccattggatccatgtccgatggtgctcattagatttgggcactttatgaaccggtacacgcgatcaaccgcacgatctcgatccaacgcacaggattccatgggccgaaacgttatcctagccgcatctcacaagatcaatgaccacgatttaaactgtgaactggtatcctattgatctattcctagccacctatcctatgatctacgaccacgattttaaattactaagatctattcgcatccgtttgatctcgaatcgatggctcgaatattccctagcagaaccggtatgctcctcccaatcccagccgttcatccggccactaacgaccagggttcacctccctccccgtggccaagcacaccggtgccacagtgctgcgacaacgttctatgtcagcgaacactactcaggcgcataggcgcccacttctaccttggacagacgctatgagattcccaaatcatggcaaaatgatggagggtcttaccgatgttggaggcaatgactcggccgaccatggagcacatgtaactccggtgaggaattcaacctaatctgagggctcccacgcacaaccaccacttcgcccactctccacatggctttgcgacgcccccg

SEQ ID NO: 99447 - DNA, 405 bp, Zea Mays
cgtgcgacaactccgtgcagaagtcgcctaagggtgcagccggactagcacaataagtgcgaaaaatcgaagtctaacgcgaagacttaccgtgcaaaagtcgcccaagggtgcagccggactagcacaataagtgcgaaaaatcgaagtctaacgcgaagacttaccgtgcagaagttgcctaagggtgcagccggactagcacaataagtgcgaaaaaccgaagtctaccgcggagactatccgtgcagaagtcgcctacgggcgcagccgggctagcgcactgagtgcgaagaatcgaagtccttcgcgaagactatccgtgcaacagtccgcgcaaagaccgaccacatgcgcaccagtccagcataacaaatacacctgaccaagtacgtaacgccttcg

SEQ ID NO: 99448 - DNA, 637 bp, Zea Mays
gtccacatggtgcagtatccacgtgtgtacttacaaacttatggactcaaaaaactattaccgacctaaaaatatatgtgtacttattagccttttattctctgtcttagtccaatcccttcatcgttggaattgaggagcaccagagtaaccaaatggattcgaagcggaatcgttgtccctggttgggggtactattctatctgtaggaggacaaaatggaggacgagcaccatattagatgggggaggaaacaaaggaggagcaccatatgatctatatggaggagcgacacatggatatccatatgagaggatacgtttaagcgaaaagtggtggtaggagcttcaatggtagaagcgtcgatggtaggattttcattagaaggagtgtccatggacgatcagtagggatacagaggagggagatataagtatagaatggacttagggaatggggacagacagaaacatcctcctaatgacgatatataagaaaaatacctttagaaaggacccactccactctgattgggttgttagaatgttgtgtagattggtcgttgagtaggttggtgaaggttttaaagttcgaactccacctcagatccaaattgaaataaagagtgggaggctac

SEQ ID NO: 99449 - DNA, 495 bp, Zea Mays
ctccggggcaggatcgggtcgggaagcaagctcgcagatagaagtgcactttccaatgcagttagacagagaaggcatggctgtgatgttataatgctgaacgaccccaagaagagattaagccctgtagtctaccacctcccgttatttgtgggcttcaccgagggcgggaaacatttggtgacatcaaacgaccttcgggctggggacgtctgcgagcttaatttgctaaattgtactactgtgctcgtagcccaaaccgtccatgtcaccatttttccattagtcgtctgatcctttatcaatggctttcgactatgtttgttttttgttgtgtcccttcatgtattgttcatattgttttgaaggagcacatttgctctttttgttgtgccttagtcgatgtgtcatgacatcttaatttagaccgaagatcatatgttaagatctaatgtagaattatattatagaatatcaaagcttttaagatcctgc

SEQ ID NO: 99450 - DNA, 509 bp, Zea Mays
cttcgtccaatgcaattccctgttgttgcatcctattcctgctagcctagctactctcatgtagcatggtgacagtgagatcgcgggcgaagtaggactcatcgaccttgtccgggaagatcccgtccctgtccgacggcgacgtgcactgctctaggacataatgtttgatttctaaaattgtaagtgataaatcatggatcattaaaaactaaagaaaatgaaattattcatgtccactcctgctaacagaataaggagagttttacttacacatggcttatccaaaaggtagttttacatttatgacggtcagaaatttacagattcttgcagctacaaatatgatgacaataaggctacattagctaattcatagcccaccttacagtgccaaagattatgagcttggtagtgacctgaccatatggccccatccacagaactcgtctcatgtatgaatagaacaacctgaggaatgcaactttaagttacacatatagtaattg

SEQ ID NO: 99451 - DNA, 706 bp, Zea Mays
ggacggtccgccatgctggcccaaacggtccgcaacacctcaattcagcccatattcaaaatcgcttttgaataagtttttatttgaaaaaccaaaagtgttgttagccctcatgcacatgcatcaattataagttctatgaggcactaaggatctcgtcaagaagatataattgacccctcttgatagtacgactatctaagctagtccactaatccgatcgatattcttctttaaacaccttttcactgacaaaagaaaaagctatcttttacctttgccttgagcattcaattctgtctcctcaaatgatgaacaacggtcattcataagtgtagccaaccatcctactttataccatttgttcatagcatgaagttcctccatcatcttcattaagccacttgatcaatagcctagatcaacacttggcttgatatctctataatgatatgatccactccatgtcatcacatgaccttattggttcatcaatctcaacatagcttgctcttcaccattgtattatgtccatcagtgccaagtccttgctcttgcttcaccgccacgcggtccctcacacatgagcctctgacttgcccttcacactaacaacttggtccatcgaagccaagccatgtcttcatatgcaatgagcaccttcatcacactagatgagcatatcaatatcatcaagccgcatcac

SEQ ID NO: 99452 - DNA, 892 bp, Zea Mays
tgggccgcccagtactttgctcgctctgctctatttggacagcaataagacatcccgcccacgacgtctgtggcttcgtttttatgggtgttgcaactttaaattagtaccatatggactaccaaatgatgcagaaactggcttataaactcaggtgctgaggctgtagtaccgtttctcagttcgttgtgtaggcgccccgaggaggcaccaagacagtctgcaacgtcacactcctattttgtgtttgtttttggttaaatgggctgctgggttgcgtgagggtgagagacgtagaaactgacatggggaggagccatgggcccacctgctagagtcctgggggcagaacatgaggcagaaccacattgcacggatggtctacattagtcttatagagtagtagagatatctatcctttatagaacatacacaaatatgagctcttacagttttaagatcactcaagtctcccaagtgtacaccggagaagtttgagaaaagtcctgatgatgaaggtggagagagctcatagattttgtggtacggtaacattggcgggacaaactccatcaacatattcaagcttcctgaagcacatgaagaaaatgaaaattaagtcattgtagttttatttttccaatttgtacaacgacaaccatcttaagaagcctttctcaataaaactgtgggtggtaccgtcttaccaacaatggtgccaaatgtaaccaacaagaacacataaagtaatgatatgtgaaaaaagtagcaatagataatatatatttggaaccagcttggctccgttcggcagcataggaacagttccaagccaggaactgtttcaggcctggatttagtgcatccggctctttcgctctttctagtccag

SEQ ID NO: 99453 - DNA, 1610 bp, Zea Mays
cagtaagcgataagctaggttgcccactcgggccaagatagtgaacggtccaatctatctcaggttgagctttccagaggcaccgaaccgaacaacccctttagtaggtgaataccctgagaaggacttggtcacccactgcaaattccaaatcccgcctcctcacatcagcataactcttctgacggctctgagctgccaaaatattcggacgaatttcccgaaccttttcagaagtctgctgaacccaatcaggaccaaccagggatctctctcccaaagtctcccagcatagaggggagatacaccgcctgccatacaaagcctcaaatggtgccatcttgatgctagcctggtagctgttgttataagcaaactccgccaatgcaagatgatcctccgagctacccttccatgacagaacacaagcactcaacatatcttgcaaggtttggatcgttcgctctgactgaccatcagtctgagggtgaaaagcgacactaagtgaaagcttggtgcccaatgcactatgaagactctcccagaatttggatacaaatttggagtctcgatcagaaacaatggacttaggtaccccatgaagcctgactactttcttcatatacaagggaaccaaatctgaagctgaatttgtggtcttcatgggaataaaatgtgcagacttagtcaagcgatccactaccacccatatagcatcccatccccgaggggaatgaggtagacccaccacaaaatccatggtgatatgctcccatttccactctggaatttctaatggcttcagtaaaccagcaggtcgcttatgcttggccttcacgcgttgacatacttcacaggcggccacgtacatagaaacgtcaaccttcatccgcttccaccagaagttttgcttcaaatctcggtacattttggtttcgccagggtgaacggtgtaaggcgttttatgagcttctctcaagatatccatcttgacctctgatttctgaggcacacaaagacggcccctgaaatgaaccaaatcattctcatcaatggtgaactctcgtggtttaccatcaccaaccctctttcgagcttcctgcaatagacgatcctgttgctgagccgcacgcactctctccatgagggaggattgaataagcatccgagtctcctcgctagcggtgcctacataacacaaagcgatccccaaacggtccagatcaacgatcaacggcaaggccacttttggaaccccggacctgctaagggcatcagccactacattagccttccccgggtgataatgaatggacaaatcataatctttaatcaattcaagctaccgacgctacctcaaattcagctccttctgagtaaaaatatacttgagacttttatgattggtgtaaatgtcgcaagcctcgccataaagataatgcctccacgactttagagcaaaaaccaccgcggccaattcaagatcatgagttgggtaattcccctcatgcttcctcaactgccttgagccataagcaatcactctgccttcctgcatcaacacacagccaagaccaatacgcgaagcatccgtataaactgtgaaacgc

SEQ ID NO: 99454 - DNA, 317 bp, Zea Mays
agaaaactggggttgtaacagaacgactccatctagtgcaaatcacggacccagtgctcactaccaaggattgatgaagaatcaaggaatatgtagcaacatttttacttaatatggctccattgatcggatcaaggctcattctgatccatgcaccttcctccccccgggctccactcttcggaaacaaagcatgccgaccaaactaccgggcaacctagtcaccacgctatgctcgggaggacaggaaatagggaacactctcccaagaaagatacataccatacgacggaaggccacaagtgacctcgacgaag

SEQ ID NO: 99455 - DNA, 308 bp, Zea Mays
acttgattcaccctggctatagaatatcccttgccaggagtctgttgcttgttctgaactggagtagtagcaattctctgtgggcagacatttgcataatgaccagtcttcccacacttgaaacacgtagtgcctggactctgtcctgcaaactttgtcggggtgccagtgggggtagcctgtcgagtaggtgtcctcagtggtgattgctgaactgggcgcggtcctcctggtcgagtcggtgtaccctgtggtgaactgtagcgaggacgaacactgctgctaccctgtccttgtgagatagcctt

SEQ ID NO: 99456 - DNA, 634 bp, Zea Mays
accaacaccgccattccatgtgccaccactttcacgacttcatcacgctcgcagcactgtcctgcttcggctcctcgctatcgttgtggcactgccaaagccccgcacgatgacatactcctcggtgcctaagatgagacccaactcagatgtcgagctactggacatcatcgactcagagatcaagtacgcccgaggactcaggactgcgatgaccacgatagggtaatggacagattcccctatctattgtgtgtgtatctattttcacaatattagagtaaaaaaacaatccttgtttcttgtgtagattcagtcacgctagagagtgtatttggtctgttagttattctgttgcattgctgtgaattagatcctccagaacgttgttgtcgtgtttctattttccttgggaagtaatgtcgtgtttttatttttggttaattctatacgatcattctacgattgatagggtaatccgtaatcttgtactcctgtctccactctactcaatgcttgtagttcttctgcattgaggcagtctttgaattgtgatacttttgacacacataatctggtgttcttaagtgcccttttaattttgatgccttcctttatccagtgactatagtct

SEQ ID NO: 99457 - DNA, 889 bp, Zea Mays
tgtgggacttcggtcaactcaccttgcagttctggcagggctcccaagccgtctgctggcacgggatcgcggaaccggcccgggctcccaagtcatctgctggcacgggatcgcaagactagccagtccgcaactccatgcgacaacggacggcgacctcctcaacgccatcctgacggagttccaacaaatctccgccaagccgaccggtctaccgccgccgcgtacgcacgaccaccatatcacactgttgcctggtgtcgcccggtggttgtgcaaccatacaggtacccattgagccacaaggatgagttagaacgtcaatgtcaagccttgctccaacagggactcatccgcccaagccaggcattctcctcgccggtcctcctcgtcaagaaagccaacggctcagggcgtttctgcatcgactaccgcgcattgaacagcatcaccgtcaaggacgcattccctattccagtggtcgatgaactgctggatgaactacacggcacactaattcaccatgctcgacctctggtccagctatcaccaggagcgcatgttcctaggcgacgtacacaagacggcgttctgaaccaatgacagactatacgagttccttgtaatgtcgttcggcatctccaacgccctggccaccttccaagccctgatgaacgagatcctctagcccttcctgcgtcgcttcgttctagtcttcttcgacgacatcctcatctacagcaccacatggatggatcacctccaccacgtccacacggtactcgaggtgctccaacaacatcgcctcttcgtcaagcgtaccaagtgtgccttcggcgagcgctccatcacgtacctaggacacggcatctcagccaaaggtgtggcc

SEQ ID NO: 99458 - DNA, 338 bp, Zea Mays
ggtaacatccatcacatcgatggttcgatctagaacccgaagacacttcttcaattgggatacatggaacacattgtgcaccgtagacaatgtttcgggtagttggagtcggtatgccactggtccacattgttcaagaataagaaacggaccaatgtatcggggtgcaagctttccttttacaccgaaacgggtcacacccttcattggtgatactttcaggtacacataatcttggacttgaaagtacaagggtcagcgtcgcttgtctgcataactcttttgtcaagcttgtgctactttcaagttatatatgattcgttgaaccttttcttcca

SEQ ID NO: 99459 - DNA, 502 bp, Zea Mays
atgtgttcttatcaacaagcgagtgcaacagtcgtttgtgcttaggagacattggccaaatactatgaggtttgtattctaaaacttttacttagccaatgcttgagatatctgcgccatgtgctttgtagcagccctatgatggaattgtagaaacctgagtgctgtttttaggcttctgatacatgtgaggtgatatatttgctttgccctgtgatggaattgtagaaacctgagtgctgttttcaggcttgtgatacatgtgaggtgatatatttgctttgccctatgatgttttctttgaaaatattgaactgactacactaggtctttttgtgaaaattagctgagggcatcaggctgtttgctactgtttcattgaaaatattgaactgaggcttgtgataatgtgagatgatctagttgctaagccctatgatgttttctttcaaaatagtgaattgtatactacacttggtttttttgctgaaaaataactgag

SEQ ID NO: 99460 - DNA, 282 bp, Zea Mays
agttgctcttttgtgaagcagaaaaatagcttatttgaccaaagaagaaacagtaattcatatatgtgattacatgcccaaatcatgctaaattaaatccacatattgaaagtgttgtaattgcgaatattcaaaagaataaaaagggatatgtagctataatcttgactcacaacacttgctgcacaaaaggaaaccttaaggaaatcgtcatcatgttgttgttgacatgaatggggactttgggttcaaaatttggcatgaatatgtgctcttctattc

SEQ ID NO: 99461 - DNA, 382 bp, Zea Mays
catcatcatcatcatcatcatcatcatcagctgctgtaccctgggtgtcaaactgtcgaagtgctgcatcctcggcctgagtgtcaaacacagaagcagaagctggtactggaatctcaggagcagggcggtaaggtccaaacacaaggcgtgaggcctcaagggtgctctgaaatcgaggtggctgaatcagctgcgcaaaaatgtggcataagtagtgagcatagggtaactgccgacgagcacgaatcccatccagaacggtgtcctcaatctcacagatcagaaagtccacaacatcaaactcagagtgggataccagggcaccaaggagccaaagctgaatatgagtggtagcctccctgtatcccatcctaggcag

SEQ ID NO: 99462 - DNA, 464 bp, Zea Mays
ttggctacaaaacattctgaatgctttggagtcaaactcagtgctattatcaacagttagagactttgagactctgaagcggcatatgatatttttccaaaagaatttatggatcattgtcgaagtaatcatggctaaagtttttgcatcaatctagttggagaagtattcaactgctactacaacatacttcaagttcccttgtgttgctggcattggaccaattgtgtccattccacatctttttaagggccatgttggctggattagttgggttaatgacgaagattgcttctagtcttttgcacaactttggtagttgtcacatttttgcacaaattctgttgtgtctgaggctacctgtggctagtaaaaaccttgatgaaataattttcccaacagagttgttggcccaatatgtgatctatagatatcagagtgaatttcttttatcaattcttgac

SEQ ID NO: 99463 - DNA, 280 bp, Zea Mays
gtgagtgaggatgaaaaagagtccacgggaagagttaccagtgtgaagagaccaaagtatgcgacaagatctaaaagctcagatagtagggaaaactcgaagactggaagtgacagaagtatcgacgaagatgacggcactgaggatgagcaagatgagactctgggaggttttttagttaacgacgaggatgacgagcctgcggaagagctgagcaatgaagaggaggaggaatttgactatgaggaagatgatgattgataaccacgtcaaaaaagaa

SEQ ID NO: 99464 - DNA, 728 bp, Zea Mays
cgaagatgcttgcaaaataacaaataacactatagaaggggtcagacttcaggcaatagaccacatcaataaatatcaggccgaaatagtaaagtggcgagacatgaaaataagactaaaaaatattaagctaggacatttggtgcttcgaagagtagccaacccaggcacagtggggaagctggaactcaatgggaaggtcccttcttggcagtatcttgtcaagactagggttatacaggttaaaagacatggacgggaatgacattccaagatcttggaacgcagacgagcttcagagatactatgtgtgacaccccagtgtcacctagggtttctctcaaagtgctaacccatgaaccatcatcttatgtgaaccaaatttaagtatgaacatcaaattgacttaagaataaaggatccaccaagcctatacttaaaagtatcatgatcaaaacaaatgggtttttcaaaaaggcaaaaatgtgcaaccccaacaaaaaccctaattgagccctatgaacaaaattcaagaaaatggggaaaagagtgtgaaaaatttagaatcatggcttgggccaattataaacattgaagtatatttaataagcaacaataaatattgaggaagcttggccaaaataattcaaataaaaccccaagcaagcttctcatgtggggactcaataggaaattctgaatttcagaattctgaatttcagaccttg

SEQ ID NO: 99465 - DNA, 663 bp, Zea Mays
gaagcggcggcggtcgacgtctccgggtagtgcttgctcctcgtcggcgattggcccttcgagccctcggtacgccgtccagatccgaactccgttgtggtttctattaggttttagttgcttcatttgttcgatctgtgtggttctagggtttgtggtgtgcgaatattgggcatagaacctgaacgacggtttcgatctgtgtggttctagggttatgttgcgcgaatattggttctagggtatgtagatgctagcggttctaatttgtggcaggtctggtcatgttgtgctttttgttgttcaattgattcatctggaaactaaaaaaagaacacttcattacatatcatattggcacgaaaatgaaacaatggtaaccagggtagtaccgtcgtctgaaaatgtcgtcattgtacacagggatgtctgcaaagtagcattgcacaagcctagcataacctgaagacctatcccgatgaataatacgtctacctggaactgatcctctatgcacatgtagcttttcttcctcgtctgcaacgttagatgcatgaagcatgtgtaccacttgttcatcctcgtacatgcgtttcaaacgttggtgccacagattagatgaagaagccatcttgtcagtaggatagctgcaacctaaaaacc

SEQ ID NO: 99466 - DNA, 418 bp, Zea Mays
cgaggggctcataggtcatgagtgcgtgtaggccagggggttgtgcaggtcatgagtgggaggcggaccagctctctattgcaactcggtgtatagtgtagttaatgaggtcgaccatttatagaggcttagcctcaggctaggcgaggaatctactcgagtggtttcctttcagttcgttcggcccctctgtatctccgccacgcccgaccctaggcttggtgcctcagggtttattcgggggcagatgcttccttggtagacaattcccttaccctctcgctgacgggtggtccccagtagttcggaggttcttatctcatgtgctttctctggctggtaggggcccagggatcttttccatgacaaatggcttgaatataatatcaaggattctttattttcctttatatgttac

SEQ ID NO: 99467 - DNA, 291 bp, Zea Mays
gctgaacaagctgacatcgaagaagaaaatgctgatgaagaagaggaagactacaacactctgaccccatcaaaacccagccacttggactttgaaaaatctactgtgtctgaggctgatgtacccatgatgatgaagctgggttactttggagaagctgagaagaaacttattcgttttgccagagaagaaaccactccagagcccaaaaatgatgaagtagtggttttcaagagcttttttagagcaggattgcagtttcccttgaacgagatgattggggaagttttg

SEQ ID NO: 99468 - DNA, 434 bp, Zea Mays
gaggaatgaagctacagagaaggataaaattctgctttccttagtagacagattcaaggctagtgaagccaatcttgtcgcgcagtccgaagctcataaggttgaaattgaaaacttaaagaaaaaacttgccgagaagaacgaggattttgaagtggctaaagcaaaacaggaaataagcgagtggactagcgcaagattgcaaaagaatgtagatgagcttcaggaattgaaagaatgatattacaaaaaatccttggattgtgccaagaagctgaaagatagttttgcaagggtgggtgcttactcatctgagcaaaaatttattaaaggcaatcccgaaggaatcatcgaatggatcggtgaagaagctaaagcttttgaagagatccttagtgaccatggtgatttctgcgcctttgccggtgccagag

SEQ ID NO: 99469 - DNA, 630 bp, Zea Mays
ggggggccatgtgagcagaaaaaatatctctacgacaactcgcacgatcagatcaacaggggtggcagaggcaacacctgcacaattaatattattggactctctcgatttggcgcatctgtgaggttcggtttgtctctgacaggtatggttcgcttcctctagtgtttacggttctatttgctctttccatgattcgattttcaccaacactgaagctgctctcaccttttagtgcattgcaagagttatgtgtctagaaaagccaaaaaaacatcttataatttggaatagagggagtacagtataaaaataatagcaccaatggacatcttatgcaaaaaaggcttgctggatgtcatccatgctcatttgtgtaaatcacattctacctctgtaacttcctccttccaatgcacaggtagcctaacaacacctgacctgatcgttgcagcattgggcatggggcataggcccctaaatttttctacatcatcttatctacagagcaaaacttgatacactccaattggaaacaaatctatccaacggtccacaatcagactccgctcagcaagtcaccggatggaacagacgaatcacatttggcgcactaagaatcagactacg

SEQ ID NO: 99470 - DNA, 491 bp, Zea Mays
gatcgcgccaccggtagataagatcattagtagagatagatttctactagtgttcctatattaaaggagctatttggttagttgctagattaaaggagcctatcactccagttagttgggtcggtcggcatgtatatatacggggagacgatcaatcaataaaggcaaccgagatattactcctctagtgtcctatctctctctcaatcaagcatgcggctaagggactaaccttgccagagaagacggatcaaggctaagaactacgtagccaaggtccagctacccgagggcttaatgcccttgacaacctggtatcatgaccccgacgatcctcgccttcccaaccaacctcaccacaagccgccgccaccccacctccatctgcgccgccaacatcttcatcgacatctgtcgcatcgtgtgccaccaacatggatgacgtcagtgacctcaaggacaccgccaagatcctcaccaacaccctcaag

SEQ ID NO: 99471 - DNA, 735 bp, Zea Mays
cataagagcctcaagcatatctttactcaggctgatctcaatatgaggcagagaagatggctagagctgatcaaggactatgacctggaggtacactatcacccagggaaagccaatgtagtagctgatgccttgagtcggaaatcgcaatgcaactgtgttatgatggattctcgcatcaacgccctatgtgatgagttgagcaaaatgaagattgaagtgattccttctggtgctttgtctcacatttccgttgagccaagtttgcgagaccagataatcatggcccaactcagtgacaagggagtgcaaatcattaaagggaacctccatcagaagatagagaagtataagtgcttccgccaagatgggaagggtatattgtggtttgaaagcagattgatgcttcctaaaaataaggatctcaagaagaaaatcttggatgaagctcatctctccaaattctccatgcatccaggaagcaccaaaatgtaccatgatctgaagcccttgtattggtggaccagaatgaagagggagatagcccaatacgtatcagaatgtgacatatgtcagaggataaaggcaagccacttgaaatccgctggtgccttgcaacccctatcagtaccttcatggaaatgggatgacatcaacatggattttattgtgggtctgcccaacacctctcggcatcatgattcgatttgggtcattgtggaccgactgacaaaa

SEQ ID NO: 99472 - DNA, 370 bp, Zea Mays
aaaagacaacacctagcgtttctgtgttgactatcgttacctcaacgcattgaccttgaagagtaaatatccggttccaattttcaacaaattgatggacgagttggctaactcgcaatggttcagcaaactagacctcaaggccggttatcaccagatactgttgaagccaggagaggagtaccaaacggcttttcaaactcgcatgggacattgcaaatttagggtagtggcttttggcttgacaggagcccgtaacacattccttgctgctatgaatgagactttacaaccagttttgcgtaaatgcgctttggttttcttcgacggcatcctcatgtacagtccttccttcgaggctcatatttcc

SEQ ID NO: 99473 - DNA, 1165 bp, Zea Mays
cacagatgttctaccacagtgccattacacctcgttgaggaaatgtgggaattagcaatggagggggagacgctggtggaagaaacagagaatgctccagaagaaccactgggagagagtgtgttagctatctctgttgctgcagtaagtgggggagaagggaacaaaaccgttcgattgtgggcgtctattcactgtcaacaagttttggttcttgtcgattcaggtagctctgccagttttctgggaagccatctcatgggagtgatgcctggaatacatctgttgtcaacaccagttcaggtgaaagtagcagatgggagaactatgtggagtagatatggggtaactgattgtaaatggctttgtgagggtgtgaccttctctagtagcttcaagatccttcccctaggaagctacgacatgattcttggcatggattggttggaatgccattgtcctatggctgtacattgggcacagaaatggcttgaatttgattatggtcaaaagagggtgcggctgcaaggcattttacccaaaacacaaacctgcactagtattactggtttacagttggattcactaatcagacatgaagctgtggaacaacttttggagctgcagcaagtggacaccatcaatggaggagaggttcccgacattattaagcagctgttggctaagtatcaacacttattcgttaaaccccatggccttccaccgaagagatctgtggatcacgtaatcgagctgataccaggggcactgccattccgactccgaccttaccgttatacaccccaacaaaaagatgaaatcgaaaaacaagtgcaggaaatgctggacagtggaatagttcaacaaagctcaagtccattcgcatcgccagttttactagtaaaaaagaaagacggagaatggcgtctgtgtgtggactacaggaagttaaatgcttatacagtgaagaatcgatatcccatgcccatatttgatgagattattgatgagctggcgggtgcatcggtgttctctaaactcgatcaccgctcaggttaccaccaaatccgattgcgcgagggggatgaacataagacagcatttcagactcatcacgggcacttcgaatatcgtgtaatgccattcggtctgaccggagccctgg

SEQ ID NO: 99474 - DNA, 334 bp, Zea Mays
cggtaccagcagactctaaggcgctatcacgacaaggttgtgcgatagtgatccttctcagtaggagatctcgtcctccgccgaattctaacgggggagggatggcacaagttatcgcccttatgggaaggacccttcatagtagcagaagtcacttggcccgaatcatatagcctcactcagatggatggcacagaagtcgggaactcctggaacatagaacacctcaggaagttttatccctagctgtatttcaaaaagctatcgggacgacgatgtactctgtaaagtggaaatatgtcatcaataaaaaaggggtttcaaagatactcag

SEQ ID NO: 99475 - DNA, 375 bp, Zea Mays
gtaaaaaccgcaaaaaactcagcatcagatggccagggtacgctcaactgcaagggtgacccgcgaaggagaggaagccgaagccaccgagacagccccaatttccgaagttatgaggcaagcgagattggttgtaacagaggaagttattgatgaaggtccacctactgccgaagttgaacaagctgacatcgaagaagaaaatgctgatgaagaagaggaagactacaacactctgaccccatcaaaacccagccacttggactttgaaaaatctactgtgtctaaggctgatgtactcatgatgatgaagctgggttacttcggagaagctgagaagaaacttatttgttttgccggagaagaaaccactcc

SEQ ID NO: 99476 - DNA, 763 bp, Zea Mays
ccgccactctctgtccttcttcttcaccaacaatacaggagaggcaaacgggctcgagctatgttgtatgactccttgctccaacatttcaataatctgcttttcgatctcatttttctgttggggggtgtagcgatacggtcgaagtctgaatggttgggctcccgataacagtggtatcgtgtgatccacttctctgggaggaggcagtccagcaggtttgtcaaacaactcatggtattcttccactaactgagccatttcaaaaggtatgttctgggactggcccttgtcttccacactcaactccaatatgtgttcccaggcctcttgtttaagaatccaatttaactgcaccttggataattgatggcaggtgctcaactttggaaccaccccttgtaagcgtacaactcttgcttcatattcaaactccaaccacttaccaacccagtgtactttcatgggactgtgggcctctagccagtccattcccaaaatgatatcatatccactcaatggcagaaacttgaagtcagtatggaaagtgatccctccacacaaccactggcagtcaggtacaaagtatttgctccgaagacacctcccatcagccacttttacttgaacaggttcgagtaggctctgaactccagtcacctttcccatcagatggtcactcatgaaactcgttgaactgcccgagtctactagaaccagcagctgttggctttgaattaacgcccaaagacgcacggttcgg

SEQ ID NO: 99477 - DNA, 695 bp, Zea Mays
ctcgccgcctcgtcgccgacctagcaaggagaaggtcgacgaaggtgacgtcaccgcgggagaacgggacctcgggtatcagtcacctaagggggtcctcaaggacagtttcactggagactccgactctggtgacgacaacgaccgccgcaagaagctgtacgtgatgtacggtgggagctgggagctcacctcccataggaacatcaagttcctgcgccaagaggtcctttcggtggtcccaggggtcccgaaggctgctccacatcagcggtggaggagcaccactatctcctttggggcatccaactgcctcgaaaacatggcaggggccggtatactaccgctcatcaccgcccctgtcatcgccaacatgcgactgcatcatgtcctgattgatggtggggctgggctcaacgtcatcagccacgctgcattcaagcagctgtagatcctagggtctcgactgggaccctctcgtccattctccggagtgggcccgcaaccgatgtatccccttgggagcttcgcactcccggttacatttgggaccaaggaaaacttccgcacagagaacgtccagttcgacgtcatggaggttaacctccccttcaatgccatcattggcaggccggccctgtaccggttcatggccattgtccattatgggtatttggtcctcaagatgttgtccc

SEQ ID NO: 99478 - DNA, 507 bp, Zea Mays
cttaagttatgctccgaatcttgagcctgaactgggtgcaaatggtgtccgttcatcatttatacgacaaactattgattggatcggtgaaggagtttgaccttactttctgcaattgggaatttgggacgaggcgtgtggcaactacattccatttgctgttaacatgttctgtagtgcaagggttttgatctagtcaaaaatctgaaatagattggggcaaatttgatggcaaataactacggattggttgaaaagaagtaaacaactttgcatttgggaattatgatgggtggtttgtgcttaaagccctggaacgagggaaattatttgagctaaacttttggagaatatgttggtttaactaaggtgagagctaactgtggtggttgtcgtttccttttctcttcttttccgtgcctgtttcttttatgtattctcatcttttggttgaactagtataattattgtttatttgtgcttgaaatcagaagagtttgatagcgg

SEQ ID NO: 99479 - DNA, 458 bp, Zea Mays
aaagatttacttattttgatttgggccttttttgaatctacatgttaaatgcatcaatggtgcatttaacatgttctagacttctagtggactagtaacagctgagtatgaggtttgctcgactttttaagtttcaacagttttattatacttacaagttgcaaggattggatttgttttgaataagctgcagattttggccagtaattgatgtcctttagttgtctcgtacttgtgtggttcgcgcgctagaggtttggggatgttactatgtctatagagaaaaacacaagacagaatttagcttgcagctgttagtgcagctgcctaagagttacaatggaggttaggggatgttacaatagggtgccgccttgactggagggaggctggcggcggggggctggaagacgggacctggcaggtggcatgaaggccgacagtggaggacggctggc

SEQ ID NO: 99480 - DNA, 273 bp, Zea Mays
aaatggatgaatagatcagggtcgataatgattttcgacaacgaagagaggaggcttacagatactctaagatgacaaatggcttcggaggaagatttaatccaagacacgttagaacaatccacaacccaggccaaagtgaagacaagaacagccatactcaagggcagcagagccactcccaatcaacagggacacaccagagttctttcagacccccagccccgagaggcagaggaggaagaagctatggagggagatacaactctcagc

SEQ ID NO: 99481 - DNA, 607 bp, Zea Mays
ctgcaacaagacactgatatgacaattcaatcatcaattttaatatgcagttctgattatgtgttgctgccagggagctgattggttaggggtgattgcagatgttgtaaataaatatggtgcatggatgagggacataatttcacatccgctcttactaaggagcagggtgagacacatgtgcagtggtcaagagatgatgagaataccatgttcctcatcctggcagcacatagttcctgttccaggaacttggcaacagtctcgtccccaccttgtcgaatccttccttaaatagcgtatcacattccttgacccattaacctgggtacatcaccccttaccatataagaccccaatttgacgatcaactaaacctaaagatagaaacatcgtacattggatgtgttctttcatgaactcaactttacaaagtctaaactgaactctaatttccaaatcctatcacaaccttccataaaataaacttatgtccagacatcttaaaccaagcaggtgggggaggggagggggctacgtcgatcaagaaaggtaagagtacaactgcacctattgcacaagacatgtccctgctgctggtttggct

SEQ ID NO: 99482 - DNA, 644 bp, Zea Mays
gggctacggggtaaaactcctaagactcaggaaacagtagagagggacggtgggttggtttctgtaatttgtaggggcttatttgccaatcggccgagccgaaggggtatcgggagtctacaaccgtcggatcaccagtttgcggcccagattagatctaggtttttaaatgaagcagtaagcaacgctgacccttagatcagatatcaacggtcactcttctatctaactgagatcgtcccgcgtccatcggattcacgatctacggctgcggttagatgcggccgaattggtatgaaactctaatccgagccgtccaacgcacatccaacggtgcgcatcaggtcttcctccccctacctagctgagcgacggtgacaaaattttcccacggcggagtaactccggcgagcccccgtgggccgcccactgccccaaaaccctaaccgagacatgctatgcgtagtgtgggtcgatacaaacggcagagacgagtaattaccggcctcgagcgcgagatgtagtcggtccccgacgcgcagcggctttgcgactgtagggaagtccggcgagcaatcgccgaggctctggtcttcgagcgcccctggattcactcccacaccaccacggttacccgcgctctc

SEQ ID NO: 99483 - DNA, 629 bp, Zea Mays
gtcacgctttctatgctttccctctcgatttcacaagtgccgccgtcccaaatagctccgccgttctgtccttctctacaacctttgtctttgccatcatcggcccatatgatgatttgagtggccatggtcttgcctttgtgctttcttccaccaatgatttgtttactgccttgcctagccagtacctaggccttctcaattcatggaatgatggtaactcatcaaatcatcttcttgcaatcgagcttgataccatacagagcacccagttcaatgacatcaacgacaaccacattgggatcgacatcaatagcctgtcctccgttgcctcacacactgcaggctactacacctccaatggagagtttcatccgctgaaacttataagtagaaaaccgatgcaggtgtgggtggactatgacagcaaccatatcatgttgaatgtcacaatagcaccttacttcatgtcgtccaccaaacccagcaggccactgctctcgactatattcaatctttcctctattttgccaaccgcaacagtatacgctgggttttcctccgcgactggcacacttaactgcaagcattacgttcttggctggagcttcaagctcaacggagaagct

SEQ ID NO: 99484 - DNA, 436 bp, Zea Mays
gtggaaaatggatcttgacatacatatgttatgcattcggttttgcctcaagaactggctctgacattaattcaacggacgtgactccctgacttcgatcgaactatcagtcccaatgccgctgagggtaatgttggtcttgacaagtttgtcatcttgtttacctaattttctgtataatgaataaggcattagatttacagccgcccccatccaccaatattttagcaatcagtatcccatcgatgtgaccatgcacgaagagcgactttaaatgatttaccgattcctttggtttagtgaaggcggtctctttaggaccaaagtcaaactgagcaacaacatgttcatcatcgccgataatactacaatcggcggagaatgtaatcacatttatatccatacctaggtgctccggagaagcttcatagtcgac

SEQ ID NO: 99485 - DNA, 562 bp, Zea Mays
cttcaacaccattcttcttcctctccagtgtcattcttccttcttctcaagtggctggcggtggactagtggacacaatagcatgtggccagtcaagcgaaccctagtagcaagcaaacttgagcaacatcctctagttacgagatccagagtgggtgagctttgggctatagccagatggggcaattgtgatggcagacgaggtaatggtgatggtggataaggtgcttggcctcctttggcatggacaatgtgacacggtcaagcctttgtgggtccacctctttgatctagtaaacatataggtgagagggtgggagcaagtagggggacaacaacgttgcacatgtgtaattgagcgttggggtgagcaaccgagaagatatgattaaaaacttgcggttgataggtagacataggtcaatacaagtggaacccataattagataataattaacggtgtcaagaagcaatgtattcgcaccccttcaatccacccaactaaatagaaaactaggatgggtctaaaccctgaaccaaatgctaagctagaacaattcta

SEQ ID NO: 99486 - DNA, 289 bp, Zea Mays
ggatctccagatcgggcagatgggcacccgcacccgtgagcttgaagagcgagtggaggtccaggataacaccattgaagtcctagagaaccaactccacgacctacagattgagctggatgaggtaaatgcccacatggagatgcatcaccaggagatgcagcagggcatggagatagacgaggacatcgaggaggaggaggaccccgaagagctagatccagcatctcgcttggactccatcaacttagctcactctggtggactcccgtcacctaagtctctcgtt

SEQ ID NO: 99487 - DNA, 596 bp, Zea Mays
taagggagtcggccgcacacttaatttatagcgtccgcaagcggtggctctgaattcgggaaaggtaagctggcggccggagaggaggtgagttaccggagcaaaactaccttggcgttcacaggggcaatgtctcaggtgacagatgggctatctactgctgtctactatgacatggtaatgcttccaaatatgtggcatccttgtggcaagcggcgaactccggcgatggtcatcttgaccggtcgcagggcaagtgggtacggtggccagctcacgatctcatccgcgttcgagatcttttcacctgccacggttatccacttcacctaggcacgaatcgtagaggccgacgtgattctatgcgtagggatcatcggaggcgatgttcactgaacctggaatctgattcaggttactgtaccatgggagctccattttaagcgcttgaccgagcaagttgagcagccccgttctctaattttcatgtaacaactccctaatccatctgtagcaaaattgttcttctacaaaccagctttaattttgttatagcaaccttgatcaaacatctaatggatcctattcaaaatcaa

SEQ ID NO: 99488 - DNA, 792 bp, Zea Mays
taaaacacttaaacaatattttttaattatcttcccgatttttttttaattttttgaccgaaccaaacaggccgtagacgagtttgggtcaccccagaatggagttaggaatttgctgtaaaaaattgagctcaaacggagcaccgagcgaaaagttacgcccgttttatggaaggtacctcaaattatggttttcaagggcacaaattggcaggaaccgtagcggcggctatagagcataggggcaataggtaagcgccagatgatgaaacaaggaggggctgcaatgcaatgcggcttgcaacctaatctagggctagcgtggcgagagttcgcacaaggcggctagtgagggcaaattgagtaatgtggtgtctcgacttgtaatctgggaaaggtggatgggatagcggcgaaaataaataacagcgacggagcggttgaactacgatgacgacatgacctaaaccagcaacaagactcgacatggacacaaactcaacaaagcaatctgaaacgaaattgcaaggctaaacagggttgtaggacagcggaattttttttgtatggcaattttctggagttataggaagaaaacataaactaaactagggtaatcctaacggtaatacctgaggctttgaataccaattgataggaacaggggtgcccgatcttccgtcaggtgtagataactatcgatttggtggagatgtcacacagacaatccagcttccaatcaacacgactagaaccccacaattgcagcaccacttctcctctggtcatcaa

SEQ ID NO: 99489 - DNA, 811 bp, Zea Mays
gtggatgtggatactgatatatctgatgaagacgaaggtgacgacgatgaactgaaagaaagcataaatggttcagaggatgaagctttagaccagaatgaagacagcgaagaggaagacaagtcaaaaggcagtggctctaaagcgcagaagaggaagttaaatgattatattggacagctaagttctgctgatgcaagccttcgagttctgaagaggttagcaactgccaagaaggctgaagttccatctgatgaaactggtaaaattctatccgatgaagatttcaaacgcatcaaagaactcaaggtatgtggattttggatggcttatagatctacagtaaattttttttaaagctaattttggcaaaataaatttgctcatattctgatcttagatggatcattgatgtcctaaccgaatatatttgtgtttcaggcaaagaaagaggcgaagctggctttggctcagcatggactaatcaagggtggcgacacaaggtctgtaacctttaagatgccatcatctgaccagctcagcaggaagcgtgtcgatccacttgagcttgaggtgctctccttgtacctttgtcgcgcactcacgcactcacacagtgacacacatgcaatgcacacgcttgacactgaataaatttcgtgaggcaggctcacgtcaggagaaagatgtccaaggaagaaaggttagcgatggtgaaagctggaagagaggatagaggtccttacatggcaagggcggccgtgaaacagaaaaaggtaagcttcctggctgttggcgtgtacgttttgtg

SEQ ID NO: 99490 - DNA, 516 bp, Zea Mays
cctgttttattccaactttaaagtaaatactctctttcaagttacccctgatgtatctgcattagcttaaatattctaagtttggacctgcttttacatatttactacatagcaaagctttaaagatgcaacaagacgacgaagataggaaaaacaaaatcattatcaagggcttagaggataagttcaaagaactcgaagactctttgaaggagaaagacaaaatgctatgttcagccgaagggtccgttgccgaagcacaaactcagaacaagaagttaagcaaagacctgttagacgctcaagctcttttgaaggaaaactttaatcagttcaaacaggaaaacgaagctctaaaagcaaaacttaaggttgaatctgagaaaaattcgaagcttagtgaggcaatgaaggctttgaaagagagatgcttcgagtttgccagccaatgcactgctcgattgaggagtatattcgattcagttggagctgcatccaaagaaaccagcctctcaa

SEQ ID NO: 99491 - DNA, 534 bp, Zea Mays
ggaaccgaagacccgccttcataaagcttatgtagacaacaacctcattttcttcaggtgcaggggtggtgctgtctcccccaactcttacaatagacatgtcacgaaaatatctccccttcatggcaccaatatggctctgtttgatagacgactttctgaagatggtatggcttggccgccagggccgatcttctgaatcttcatccccactttccacatcgtattcatcaccatcgttagaatatgcagacaaatctgccattttctcattcgtgattttctctatgtttgttttttccatcgcttcgtaaaatccagcaagagcagggtccgcaaccttcttctcctcagtcaccttctttttctcagacatcttcttctcctcagacattcagcaggcacttatgtatatcacgaagctcaaaaatcaagcgagagctgatagcaagggttaaaaatttgagaaaataacgcaagcaaccgaaatggcgtaacaaatgctgtcgctgtgggtttctatttatatgccta

SEQ ID NO: 99492 - DNA, 469 bp, Zea Mays
aggggttacaatactcaccatagccacttcaaccactgaccctggcaaaaaggccgctgacaagccttggagaagtactggcaatttgtgataagtgataaccatccacttatgcaaccaatgtaccttcatggggctatgaagtgccaaccaatccataccaacaatcaagtcatacgaggataaccccaagacatgaaaatctgcaataaaggagcactgttggacagactaggaagcccccaacaactgttgtgagcagcgtagacgaccaccatcatccacttgaaccatagaaggatttgtcaattcagacagaccagataattgagcagccaacttagaagagacaaaggaatgcgaactgcccgaatccaccaatactaacacttccttattctgaataaatctagtgaacttcatggtgtgcattgttcaatgccgtgaaccgctgctatagaaacagcca

SEQ ID NO: 99493 - DNA, 330 bp, Zea Mays
caactttggttattacattttcgtgcctcggtctgaggcgagctacccagttcccacatttcggaagaggtggtcgggctcctggatgtaggaatggttttacgtgaagaatgacctaagtcaaagggaggatgtgagagggattatccaatgccctatatggtctcgcttcggcattaggaggccagccattgcccttgggaatgatatacaagcatgtcaggcgactttcaatacggtgtgtacttacataggcacaagagacttagtccaggagcacattgcttatagagtgtggccacttgcaaatgggtgggaaatgtcgaagga

SEQ ID NO: 99494 - DNA, 467 bp, Zea Mays
tgtctccgtggtatccacatgtacggggatgaaacaccatgacatcggtgtactagcactgcgcatgcaatgggaaatggtagcaacatattaagcgcatgcaatcctagagagagagtcggcaacaacaactaatatgatttctcaagcatgctagctccttcattcgtgtatatataccctactaatagactttaaccctaagttcacattaacattatcatagatcatgaatatctcttcgacatatattcaacaatcacccacatgcactagggccaatcatctaagcaactatttcaacctcttaagtgtgtgaattgttaggtttatgtgtagatggccacaatcaataaccattttctagccattagtcaatagacacgcctagcagcacatattaaagtttgtgtacatataaaagatcatataagctgaaccttgatatacatatgtttcgattcttt

SEQ ID NO: 99495 - DNA, 490 bp, Zea Mays
gcgcgacatgccactatctggatggtggttctcccgcccctgttgggatttagcacccttaccattcaccgccccatggtcgcttcgactatggtaccccagactccaggacccggatagatttagatccatagatcgatggagtcggagtctgtaataatgcttaattcagtgtcttagtctagtcagtcttagttagagttagtttgtttatcttatgttggatgcttgtcatgatgaacatgtaatgaagttggatctttgtaatgattgtcaccaaggtgtgggtatcccctgcaacttggtgtagttattaataaagttagttatttagttgggtaatccatttgtttccactttcctctttatctgagaagttgtcagtgaagatgatcaattgttcaatgctatgaagatttctgtaaatcttttcttacgctgaaagactgcagagtcagatctaacatgtgtgtggtttctacagatgtct

SEQ ID NO: 99496 - DNA, 409 bp, Zea Mays
gtttgtgtcatcttcctttcaagtgcactctttgattgtccttttcttgaagatttttgccttctcccctttcaaattccaccactttgttcttactatcttagcttgtttatccctatgggcacacttgaaaacgaaagaccacaaccacaagcttatgttgaatccaagcatacttgtttatcctttcttcttgtggggacaaagtcaatctaactagagtgttcgccactattatagtttactaaatgggagtctcccttcctaaagaaggtgttggctatcaccagatcaaaagctaccgcaaagtctaagacttcctccctctcctgatttatactaccatactcacaacctccatgaaccgcaaagtctaagacttcctccctcttcaagtttaacagaaccc

SEQ ID NO: 99497 - DNA, 432 bp, Zea Mays
attttactatagaaatagagattcaaagatctatctaatgaaaattatgtgttataaaaattaatattttttatataaatatggttaaagttaaaatggttgactcttcgaaaagtaagaatgaccaatatttgtggacggagggagtaagagataagagactagtactgagaattaggtaggatcatccacaggctagatccatcgtgtctcgtgccaaatatactcaggtcgagaagactcaaaatacttttagactctatcatgtgagcttaagagtaaaaacagtagttcaactcgaccctaaggtatgtcgggcttttattgggtcataccggttcaagcctaacccacatatttaaaatgacagtatttaaggaaaagagaaaccaatagagcggtatcaacaatcctcgtcatgtatttcaaatg

SEQ ID NO: 99498 - DNA, 451 bp, Zea Mays
tgtgtgtgctcctgctctggtcacccaaaaaattgtaaattcgagtatccttgtcccctatgggaatgggtcgtagttgaattggttatcatatggcttccataggactgcccccatgggccatgttaactccgagtttgtctcggaatgcctcagatatctcttttctcacaatgtcaatggctacctatggtaacacactgactctttggtccaacggtaagaggcgcttgtgtttctttgtgtcgttcccttgcccatgggtttgagttctatggggcattaatactagctctaggtgccccatattgggcgttagattttttttcaccctcctagcagccgaaaaggactcatacccatgtgttggtagaatcacatcataattttgtggtagatagaagttatgttggggtgggtatgaggtttgttgataatagtttgcatcttg

SEQ ID NO: 99499 - DNA, 789 bp, Zea Mays
gcgcggtcgggtgggtccgcattggctcttagattgcgttgaaggtggtggctaggtagtagtgcgaccagggcaccatcaatttgacgccggcgccgcaagtctggagcgcgtcgttggcaggagtcggcgctgcgtgagcatcgtaagaactccctttaccgaactcgccatcgtgtcaatttcattttgtgatcatcaggactagtagctgtgcaccgtggggtgtgatgggtgttccgattacggcctccccgccgcggcatcactgtaggtcgccggtgttggaccggaggtaggggaagggcccggtgtcgttgatctagtaaccaatggctgagattagatttccaagggaagcgtctcggccgttgatcctcgaacgggtggctacgattagattccagataccccttcgttgttttggatctggcgtgttgatcggggatcatgcggccgagagggtgtcaggatcgcaagctatcctcgaccgtcgatcttggataggacgttggatgtgagtaactgattcgtgaaatgatagttttaatctgggccgctagtttgtaatcagacggctccaattaccagatacccctttggcctgtccgtttcgtaaaagattccctgggcttgttaataataaacccgccgtccaatataacaacgctttgagtcacatgaattttgtagtttggcccctgctgttccctgttttaatgcgcccagtccagagaattatcaaatcagggaaaagtaaatagaaaagaatttttaatgtaaaaataa

SEQ ID NO: 99500 - DNA, 1139 bp, Zea Mays
gtttaacctgcctcaaaaggtacatggaacacaacaacaagaattcaatcgtttaattgaagaggaaacttcttatgatcgtgaaaatcttcacaatgaatcccaaagtctcttctcacaacttaatgctgatcaattaagtgccttcaatacaattgttgaatgtgtcctttctggtcgacctggtttatactttgtatctggatatggtggcactgaaaaaacgttcttatggaatgcaattgtgttatacttacgatctcaaggaaaaattgttttaactgttgcttcttctggagttgcttcccttctacttcctgctggccgcacagcacactcacgtttcaaaattccatgtgatctagattctaacagcacttgcaatatcaagaaaggaacaatgcttgctgacttaattaaacgtacctcattggtcatttgggatgaagcttttatggctcataggatgacatttgaggcgttggatagaagcttccgtgatatattgtcgtctgaatcatctaatagtgaaaatatgccttttggtggtaaagtaattgttttaggaggtgatgcaagacaaattctacctgtgattgaaggcggcactagatcacaggttgttggtgcagctataactaattcatatttatggcactctatcaccgtgttatacttaacacaaaatatgagattatcttcaactgcccttagcattgatgctaaaaaagaggtcgagtcattcagtaaatggattttagcaattggtgaaggaaaagtaccagcaaaagcaagagagaatgaaacagaaaaatgttggataaaattacccccggaaatacttcttatgcccatcaaagacaatctatcatgcattgtccaaactgcatatccaaatatagaaacaatgtataataatgttgaatatctaaaggaacgtgccatattagctccaacaaatgaagttgtcgacgttgtcaataactatatggtttcaaccctacctggtgacacaaaggaatacctaagctgtgatagcattgcaaaaggacccaatatgcatgcatcctatgatatgctatatccaatagagtttttaaactccatcaacggtaacaactttccttcacatagtctga

SEQ ID NO: 99501 - DNA, 629 bp, Zea Mays
tgaagagccggctacaatgccgaaggctgacaaaattgaggaaccaagaatcgaagggacgagaacattagaagttctaagcccttcggcaggagtggcggtgccgaaggcacaaaaaggtctagcagcgacccccatgagaaaaagaatggccagtgtactagatgtgctggagacgataaaaacttcaagctctactccagggaaaattgctaaggcttcgaaagtgcaaattgaaaccgaaacaaaactgaccgaagccgaagctacaatgagtcaggctaacaccgaagctgggccttcagagcccgccaaggagaaatcctcggaaattggagaaaaggcagcggaagaagaagctatagaacagattttgcctgaaaaagctgtcactcctactcccgaagcgccttccgaagtccttgattatattattcgacacgcttcgggaaaaagattatctgaagaagaaaattttgaagctaaacactatgcccgagaactgaagtacccgaaagcggccttagtgtttaatggcacagatgaagatgacttcttgtattgcctcccacacaacaaagaattatccgtctgccgagaaatggccagaagtatggggttcccgaagc

SEQ ID NO: 99502 - DNA, 660 bp, Zea Mays
cttcgattcccattaagcaaattcctggttgaagtgctgaagaccttcaaaattttccttcatcaaattacccctgaagccattattaggatgggggtttttatttgggccgtgagaagccaggggctagagccaagcgcaaaatgcttctgcaacatgcatgagctgctgtacgagacgaaggctactggcaaggagcagtatcacaacaactttggttgttatggctttgtgccccgccccaatgtaagttacccggttccaacattccgaaaaaggtggcccgggcctgtatgaaggaatggttctatgttaagaataatttagttgagagggaagatataaaagaaattattcaacgccccatttggtctcgcttcgacatgaggaggccagccatcgcttttgggaacgatatagaggcatgccagagaagcttcaacactgtgtgtacttttattggcacaagagacctggttcaagaacacatcgcctatagagtatggccgcttgtgaatgaatgggagatgccgaaggaggctgctgtcgggtctagtcaaggcggcctggtctatttaaaatatactttcagatatagaggcgagtttgatgagccaaacgatgaatggttgagcagtattgaggcaaccagtgacgaat

SEQ ID NO: 99503 - DNA, 1444 bp, Zea Mays
aactttgcttaagtgattaagcattgttgttatacaaaaagtggagatgattagccctaaagtttggctatcagacccctctgagactgaacattgactgatagtgagttctaaggaactttgggctcaattcttgtgtaaggaaataagaaaatgggcaagatccctatagcaaaattgtagcaggtatatacagctacaagtttgttacagatgaattagcaagttctcatacgaaaatctgagatctaggcactgtaattcggtctgtcaggcactctgaacaaattctcatggtacagtaactgaaaaagatcctgggttcagatcccctcgccgtaggtgatcccgcgccgtgatcctcgtcgtcgttgcgattcgtgctctatggggtgcagataactcttaagggtaagaaatatcgcgtcgtgggtgaactcaggccactgttctgctccggctaccgtactcgcctgagtcacggccgcttcgaatagactcaccagagttagccacctcgcgaccttgcgccacgtgctttggtgctttaaccacgtcgcagtgagttacattagcccaccctttgatcgctggtgagcttgccacggtgaacgccatgaattgcttgcgccagtaacctcttccctctccggctgccacggcgccaactccaaatcacgagccaccgtccccgagtcctataaattgagcacaccctcgactccgctatgtaattatgcacccaacacactcactcgtgactccaattactcaccagagagcctcaatttgaaactctccccaattcggtctagagcaccgccctgcgtgagctcactgtgcccagcgtgctacaggtccgttcatgccctctgctctcctgttttagtacccttatgttctcctgatgctcctcgacccattcaattaagctagaccacgctagatcatcgggaacacctctgttcatccgtagttcgcgctgtcaccgtggacagtgtgattaagagctcagatcgtgcaattgatcgaggggaaacgattattcggtgttgaattaggaggcaacctagttagagcaccggctgttgcgtattcgggccagaacgagctcgccggagctactgctccgtcgctccgcgtcgtggacctgactttacgaaagaatagaagtggagggaccttgatgtaaatgtcagtgagacaaaacaatagtgttgcggactctttacgggttgtttaaaaagccagggtcttctgtgcaaagtcaacaccgtgggtgcgcgcgcgggcgcattccgctgagattgggctggatcgggttgaattatgcccaatattgttgatactttttctttttccttttctgccagaattagaaaatccatagaaaattttagaaaaaggctaaaaatgtgagaccaattttgttggactcctaaat

SEQ ID NO: 99504 - DNA, 584 bp, Zea Mays
cttcatccttgcagtagtaacaagcacctcttgctttgagatcttcacaagttaacttcatttgactaacaacagatgatggctgattgggtgtctgtatcttaaataaacgagcctggtttgattctccagtttgggtataggaaggagggatgaaaatactaagcaaagatagagtacatagagcagagaaaacccatctatctaagattttacctagctaactgatgccattgtggacaaaagtcacacaatacaccaacaatcatttcaaagaagcaaatcaatcatgaacacaaaggacaatgaattcaaacataccagcacaacataatccaattctactcattcaaccaaaacgaaaggtgagacaaggtttggaataagatattataacatcaaggagttgggtaagaattatcaaggagttagacaaggcatatttgttggtggccaagagtgaaataaggtaaccatgaactattaaagtgaggataaatgatacaaccaaggatatgaagtgagttagggagaaagtgttatcaagtagacaaaatagagaggcattataaagtacgagtaag

SEQ ID NO: 99505 - DNA, 595 bp, Zea Mays
aagttttaattttctttcaacactttctcagtggcttcatttagcagtctgttaatagcttcatcaatagctttattagcaattttaatcatatctagtgtttccttcaaggtcgggtcaccgtcggggttatatggctccggtggggtgaaagttcagctacatcataaaaaatgtttgttaattccgaatctggaaacgaatttcgaagctaaacctcagtaaaggtacctataagccttgcaccagctcatttgacttcttcttgagcgtcgtgagattctttttcattctttctaatagcttcatcagctatctcacggccgcccttcatccacacctcggagtaaaatttatcgcctagcgcagaagcttcggccgaggggtttttagtgtcacccgctgaaaaaacaaattctggctaaactacagccttggcatgttcacaaccagctttctctaagatcgacgtggccccccgtgcaccagcaaaggcgcagaaatatcctcggtcatttaaaattttgtcaaaagcttcggcttccctgctgatccactggacaactccatcagggtcgccgcggatgaatttttt

SEQ ID NO: 99506 - DNA, 909 bp, Zea Mays
ttggatacatctcttgcttctttcgaccgtgttgtatatacacaaacgtgatgaaagcactacaaaccgatctatgttgttggatgttaaaaacaagtgtattttttgctagacataacacaatctagtgtactgcaacaaatatgattagttcatttgttgtaggatactggacctatgtacttgtccaacataaaaaaccattttatctgtctttccttgaaatctagaaagtcagcatgtccttgtttttttgtgaaggaagcttttacgaatttcaaaacaattacatcaattgatacaactaccttgagatcttttaaaatctacgcgtttagatttcacacagctcacacaacattttgcaataaaacatacatacatgcttaattgatgcaagccatatatgtctttcagtgttttgaatgtccttgatgcaagccatgtataccgtgttcaacgaattcttgtgcacatgagttatcgccttgagcaatgacaggaaaggatttcttgcaacatatggccacatcaaatgtagcctcccaatactcatctggatggagaagaacttgtagcagtaattgtataaggagataccgcattgcatgcatccaagtagactccaatccaggaccagtttttacctcctattcacagaagaagaaaccatataaattagatgacaaccaaagaggaaatatatggtacaaacatacaacattagttctaaataagcatcggttcttgttctactttcatctcatttaaataagcaacacaaaagaacccattcaatcatacactccataattcaattgtgggataattaaaaaaataaaactactactacaacttggtgaagctacggattctatatatcacatacataaaaaaccttcatttctc

SEQ ID NO: 99507 - DNA, 616 bp, Zea Mays
ccagtggtagaactgggaagagtagggaaacgggtaccatgggcactcggctgattggtaggagcgggggcagtagtgggacgaataaagacaggctgcttgaatggatatgaaggtgggcgaggtgaagaacgattttgattaaaaggtcggatcaccaacctggttctcttctcaggcccctgattagacctatcacctccaaacccttttgattttccatgtcctgcatttttggcttccactaccagtgttatactaatagccctactgtaggtaaggtccaagcatgttgccattttccgttgaagcctgtcattgagtcccctcataaaacaattctttttctttagatctatattcacttggtaaatggcatactaggagagatgattgaatttgttgagatactgcattacagtatctcccccttgctttaaccggataaactcttcttatttcatatgaagcactccttctggaacataatgctcccggaatgctagcttgaattcctcctaggtaatctgatgcccagcaggttggattgctgaaaattttgcccactaagtgctggcaggccctcttagctgttgtgcggcaaacaatggctttt

SEQ ID NO: 99508 - DNA, 509 bp, Zea Mays
tttagcaatttttgagataccatcctatacatttatgatactctaaccgtggctgaagtgtatgaagctttgactgcgaaagaaaagatgagacagatggttaacttggaagatgctgctggctcgagtggagaagctttgtatgtctgtggccgcactgagcagaaaaagtccaacttaggtggcaaaggaaagggaaagaaccagaggggtcgctccaagtcaaggggcccatccgatgaattattttgcaaatactgcaagaagacgaaccatgtaattgagaactgttacaaactgcagaacaaggagaagaggaacaaggagaagggtaagaccggaggtactgtctctgttgcatccgaaaataattctgataatggtgatgttcttattgcctctgctggttgtgctgctgatgatgcccaatggatcctcgattctgcttgctcgtatcatgtttgcactaaaaatctctgttcagtacctatgaagctgtgcagaacgga

SEQ ID NO: 99509 - DNA, 875 bp, Zea Mays
tataaatccattttctatttcatttattcaaattaaatgagttctggactgggcgcactattacagaggaagacaggggcctcggggcaaaacttcccaagacacaaaactacatccttacggacggcgggttgatattcataaaatataggggctcttgtgaaaaagcgtgcggcgaaggggtatggttatatatgggccgtgcgatcacagatggagggctaagattaaatcgttctcatccccaaccggtatggcaccaggaccgtaggatcagagatccacgctcgagatttaacatatacgtgatctaatcctgagcgtccgacagggaatcgaacggtgagcgttccccaccccggctgaaacgtcaccgcttcaatcatgaccacatagggtagatcggacggccagggtggtttcttcctcacgacattgcccagatggcggcgcgcggggaccatggcagtgatgcaatccggtgaaccggcagcccaaggctatggcaccccaaatagatcatagaccggcgctacccgtatagaggatgagctgagttcacatagtatatcctcaccgatgaagaaggtaggagcagggctagccatggtgcagggcggaccggcggcagagactcttcaacggcaagaaattcccagtgccccatgggcccttccagcaatctatgtcatggaaatactccacgtggccaggtaaccctctattgcctcccattgatggccgaactttagcaggacgcagggagcaccgtagcggatccatggcggtcgcacgcttatatacccacggacgcccagcgatttgcgcgaatccagtggcaccaatcccgtgaatcccgcgcgttaggtggggaa

SEQ ID NO: 99510 - DNA, 767 bp, Zea Mays
ctcttatagtacagatggcctatggctgtaggttgtcctgtgaacatgaactagccgatgtcacatggtatcttaatgattatgttttttcatcaaccctaaagattcttccccttactcattatgacctagttttaggcatggactggttgagttactacaaccctatgttggtacacttggaggataagtggctgattataccctaccacggttcttcaatcaagttgtgtggtatggtggttaatgacctggagtgtatagctatggaggtcttccttggataatctcaccaacaaggatcaagccattgtccatcagttgctagtggaattgcagtggctgctaactcagtatgatgatatatttgaaataccccaaggtctgcctcctccacgcgactgcgaccaccgtattcccttggttctaggtgcacgaccagtacaactcaggccgtatcattatgctccagccctaaaatcagaaattgagaaacaagtcattgacatgcttcaaactaggattattcagaacagcaacagtgaattttcatctccagttattttagtcaagaaaaaagacaacacataccatttctgtgttgattacagtcatctcaatgcactaatagtcaaaaccaagtttcccatacccattgttgatgagtttcaagatgagcttcacggggctgcctggttctccactctggacctttgagcatgctttcatcaaatacgaatggcttctgaggactagcacaagatgac

SEQ ID NO: 99511 - DNA, 312 bp, Zea Mays
ctacacgctccaacactctgtgacgggtgacctagtatttggagctgtgatccagggggtccggacacacggattggcttcccagtctaaatcctgcaggtcctgttgtgtgaatcaaaggataaaagataccagttagtgggccctatgggtgcactactaaagcttcctagccaaggatgtgtgcaggtctaggtcctagtcgagactacctcctaggggccaggtcaccaattctttcttaagtatcctggcatccagcctcgacacgtcgagccgacatcccagggggggcaagtaccagggagaagt

SEQ ID NO: 99512 - DNA, 343 bp, Zea Mays
ccattaccaagtctagcgaaggtgaactagtccgactgaagtatacattcagatatggggataaattcgatgaaccaaacaataactggataaaatgcatcgaagttacaagtgatgagctgcttggagcttattccaaggcagaagataatgcactatctacagtcttcagaggtcggggaaaaaagagaataaatagagtttttgatgccatcggcttcgtttaccccgactaccactacccgctgtggggacaggggaagaagagaaaagctgctgccttggccaccccagctgaacctgtgccgaaggctatgggcaaaaagatgaaggtacttaccca

SEQ ID NO: 99513 - DNA, 594 bp, Zea Mays
gaagttttgatcgggtagatagaaaattaatttggtttgtagagaggtggtgacatgccaatgtagtcatcgcttcctctatgattataagtcgaggtcatgtgtggtgatgttatttatgtggtgaatgcgtattgaaatggtttatgttgtacggtatgagtagaaacgtgaaggatggataatgtgttttggaggagtagcaaatagggttggcaagcatggtagtggttgaatcacttatgttgtagaattgatgctcgacatgttagatctcctaaaatatggtgttttatgtgacttgtgtgttatccaatttaagttgagaaatggttaagaaaagctaattaatctgctcccacccatgttttgagtcgcaatgtctaaaatggtttgctaagttttatgttctgttagccaactcctgttaagtaggagtcaattgcgttaagtgattgttatatatgttgtgtctcggattgcgataataataggcaagccgacgtgtatgttgtatagccggctatatcgttgctctggatagccgacttgttagatggtttggttaagctcgcggtcacgatgattttcttg

SEQ ID NO: 99514 - DNA, 762 bp, Zea Mays
cgtgggttgaaaatataaattatgtgacatgtgattcgtgttttaaaggcgagatgtgcgaatgatcagatagtgtttcacttgtctagtcgataaacgttgtcatataattgtgctaaaattgggcatgagaaagcagtggggacacgtatgtacgtgtgtgctgtggtgtattgtagtagtggtggcgtaagataattgattgaggtatgcgggtatatgccgtaatgtggttatactcgcgacgaggaaagatgtatgtattgtgtaacacgatgtttaggtcgctattatataatcgtgtgaaggatgctcccgatggtcatgtgactaaagggtggtgtagtggtaaagcgagaagtaagtttaatatctttaaaacgattagttgatagcatctgtcggtgtcatcatgctttctgtggtatggcggatcgatgccttgatttgtcaaatattgcattccattcccgatgggtaaagtaaatatcttgttggttgattagaggtcttatatgagcgttatcgcagcccaagaattattagaagcaagtagcattcataagtcggtcctggttaaaattgaagaacaatccgataacatatgcacctaagtgctttaggtccttcagtagcaagtaagtcttatggagttttataccagacgttaatgcctctatgttagacctcctaaaatatggtgttctaagtgacttgtgtgttgtcttgtttaagttgagaaaacgttaagaaacgttaatt

SEQ ID NO: 99515 - DNA, 536 bp, Zea Mays
atccgacgcggatggtgtagaaggaagacacaaagattttatactggttcgagcaagacaatgtccctatgtctagttgggtactctgcgtaccctacaataatgtatgtattgtacaaactcgatcgagggagtgttcgatgctcaagcctctagtatagagagtgaagtgctctgtgaaatcacaagtgtgcgctacttgaaatggctcgtttgctttgtcccgttccataactcacttcctccatttatagcccaaggaggagaggagccctcttacatggagctctagtcagaccggatggaagagagctcgacattgtcctattgcttcttgttagtggttcttgcctttgacgggagtgtttcctgctgatgcgacttctcttcgtgtcgtgtcgtcagactcgttcacctactctctcggactctacgaaacagttgaatgtacaggctctatccggtttgctagccgaggaagggaggtgactttttgaaacactcaatgagatgagaactgacctgcttgaacctca

SEQ ID NO: 99516 - DNA, 657 bp, Zea Mays
gtgaggacagcgagaagcacacccggttttatgacattgcgaacgaggctgcacagatcggatcggcgcacacgagggggttttgggcctgctactcgctgcgacactacacaggttgatggggcttgctgtcgcattttgttgaacatgtctagggtgcgttgcggaggaagagataacgtggtcgttgcagctccacggcctaggcgagggtgcgcaggggagatgctcgggcgtcggctagggatgagctgcaggtatccatggagctagggaagagcagtgtcactggtggtgaagatggtggtcgaagcagagccaccgtggtcggagattaagcacagactggattatgaaaattgagtgtgttctaaatgtgatgttatatttttgtttcggaacacggaaccagtttggtcaacgactaaatcggcttcggttaatttgagttatttcgctcttgataaattgttgcgaccgtgttttcattaaattcgtctgaaccaaaatcatgagactggttgattctctgaattcgctttacgatgaagtcgagcagaactctgactcattatttgctgtgacgaataattctgaacttcacaagattctcgatatcaccgaaatagatggaaatgggtgtgacttagagtttat

SEQ ID NO: 99517 - DNA, 359 bp, Zea Mays
ctcggatgggcagcgcgagctatgcctagcccccgagggtgtccaagcgggttctctttctcatacttccatggatgttcatgttgggtcttctccttcacattctggttgcatggcagtaacacaggctttgggtcaggaggttgccttacaggccggcgcgcctgatgacagggttttgatttctgctggtgacgctaatttggtccccactgatgctctgcagattgctttggttggtaatccttcatcaagtcaccaagtgaattcccatgatttgggggttccttcgttcttctccaatctccaggtaatttggttttttctgacctgactatactctgggtgaaatactgttc

SEQ ID NO: 99518 - DNA, 379 bp, Zea Mays
gcgcttcgtcgaccttggagggcggtctagctcataaggacatgttggcccttgatgctgttggtcagagtcatctggctcctctggatacgaccgagggcgtttcagttttggaggttgccgctaaggacgacccagcccccgagggtggtgctgagggcgacctagcctccgagggtgtcaggccaggctcctcttcggctgcttctatggacgttcacgttggatcgccactggttcaatctgaggaactcgtggtgacaaatttatctgctgctcttatcggtccggtcaccttagaggctagtgacccggatgctaggaatctgctgcctgctgacaaagctgaggtctctccgagtcatgccttcaacattat

SEQ ID NO: 99519 - DNA, 408 bp, Zea Mays
gaagaactgaagtttctactgaaacacagctgatgttgcgccagggaggtaatgttgtgcagcaggagtgactcagataatgctggcgacggaccagcttcgagatcttctaaacgatgtgcttcgtcctcaagtgactgagcaagctcatacacgcgccacattgcgaagttcactaacacctttttggccgtatctggcgaatccataatctcgtctccggccaaatctttcaactccttcccaactacatgcatctttgcaatggcttgggcgaggtcactacgaactgtttcaaatcgggttatctgcgaaaccacaaaaattgctgttggaattgaacgagtagtactgcatagtattgaacttagtacaacccttaccgacactgaacgaggtggcgagcag

SEQ ID NO: 99520 - DNA, 605 bp, Zea Mays
aaagagtcagggtgcagaagaacattgaagaacttctggattccaaggaaaaatgctacgaagtatccatggaatgcgcaaagaaactaaaagatagctttggaaaggtgggagcttatccttcggagcagaaatttattcgtggtgatcccaaaggggttatctagtggataggcaaagaggccgaaacttttgatgagatactcgtggagatttttgtgcttttgtcggtgcacgagaggctgcggcaattttagaaaaagtcgggtgtgaacatgttaaggccgtagcctaggcagaatctattctcttagttgacgacactagggacccttcgattgaggcctctacattgggcagtaaattctactccggtgtgtggatgaagggtagtcgtgagatagctgatgaagcaattaaaaagaatgaaagaatctcacgacgcccgagaggaggctaagcgagctgaagaagctgctgaatgcgccatgattataggtatttttattttaaaccttttgcttctttgttcgtttctagcttcgaaatttaccatcatacactttattacagtcggcctttctccaccaccagagccatacaac

SEQ ID NO: 99521 - DNA, 888 bp, Zea Mays
tgcaggttgtaaaattgatttaagttaaaagagaacatagtggtgtctagttttttagctccgttttagagtctcacctatactcccatgcatcatcttctgtactttttgaagagtagcaaatgcagaagaaattgttttagtgaaggtattctctttgttaggaacttacatcagtcgacaaatgcaagtgaaagccatagctgctttagtcacttgcaggccggtgagcggctaagaatcgagtatgcatttcattgtacctatttgtttcttgcgattaacaatatttatggggtccacaataggattaagggtcagttggaaacatgccactcaaaattttggaaaattggaaagtagttcattttcatgccacttcatggcatcaaaataaactagtcgtccaattttgtaaaagttgggtgacatgtatacatttaatcctaggattaaggagggtagctagtgttacctggaacataaataacaccaatatttacttttctggaatatgtggtcttattataaactttaggacagggtgtaccgggtacaactcaaatgcaataaaactacaaaagaaaaccttaaattgaagggtaaaactcgtcatatccccattactctcttcaagttataataacatgtgccatctaggcatgttttcaatttgtctgattaatcgtgattaatcgtcaagtcggtttagaaaaatcacgattagtcgccaagtcgcccgaccgcgctagtcagcaagtcgtccgacttgaaaacatttatagagtctagacaactggaatcgaaccttgcgttgacagttccttttagtttttattatctatttatcttgtttgctcataacaactaaaagagtttatcagttat

SEQ ID NO: 99522 - DNA, 489 bp, Zea Mays
gttaaccttactagtttggatatttttcttagttgagttgttggatgaagtataatgacattggttaagcaagtattgtgttgttgttatgctatcaatgctctttgtggagtttttggcatttcttcgatgaaatgtgccacgcagaatgttatgggcttcttgttggctttattgctccattagttctgtagactttctcccttttgtggggtgcaaagaatgttagattacatgattatctttttatgatggcaagaacggggtttaggaagattaggagttttgtttcaatagaactacttgttttgtggtgctgtgaggtgaggtgtttgatcttcttatacgttcatctggtgtggatgtttcaccattgaattaaaatgaattgttgaagttagtaagggttgtgcttagtgcatattaccccttcataaaagagtgtcgttttaagacattgatgttgatgtatggttgcattcaaattcg

SEQ ID NO: 99523 - DNA, 657 bp, Zea Mays
actgagctggagaataaacttgagggcctccagaccaagcgtatccatgttgtgtgggagaagtcgtcagccgagctgatgaatcggcacttgggggaaaagactagcaatcttgagaaggagaatgaaggactgagctaccaactagtagaggtgaaagaaacaatttctcaaatgcatttggatgtgtagggtatgtgagatcatgtcgtcgtgctggagctagaactatcaaatgcgaaggtgtaccgtgaaaaacttgaagctgatacgcaggctggggtggatcgggcacattcattgtttccttattgctatatgggcacgtagacaacacccttcgacaggtccacgaagggagtgggcactcgcttcctcggctggctacaggaggagctagcgagtttcccgtcgataatgataaggctaatgttatatgccacccttgtcacctatgaaggtgccaccaacgccctatcgtgcaaagttgtcaccattttgaggtctttgaacggagcaatcaggacttcgaccaggaggttttctaggttgatgatgtgtccttgaagcaatctagtggcgcgctttttaaccggatctagggtactcacggtcgctccgtggtgagggagagggttgcccgggcgatggaccaag

SEQ ID NO: 99524 - DNA, 378 bp, Zea Mays
atgagatgtccctgcctactcaccatagctcggttaaggttttgatcacgaataacctaagttccgtggtcggaagcgtgggattgcatttctacggtgatggctccaccatggttgatcatgcgccgccgaccgtagtgcgtgtgggaaggatgagagtctcggtagccatggcatccgatttgaatagttctgattagaagttggagatcgactggtgttagccattgatctccacgtagacagccaagattaaatgacacaacccccttcgcgcgattgattctggccgttgatctcgggatcgatggctcgagtgagttggttgtttggatctaatcgaagccatccgaaatagatccaacgacccacagttgc

SEQ ID NO: 99525 - DNA, 283 bp, Zea Mays
gggaaaccgacgaacggagagaagattgtgagtgatatatggggctatgagaacatcgttgagaaagaacggtccagggagcaccgaggcacctacagaggtgaccggaaaagtggaactgtttccaacgacgatcgaggtagggtgtgtgaggggaggtgagtgggagcgagatagcatgcctgtggtgggagtggtgtgataggatgctccggagtcgatgacctagtcagatggcggaggggccaacgccatggtgcgatagtatgtggcggcgagggcg

SEQ ID NO: 99526 - DNA, 374 bp, Zea Mays
cttttgtttctccaatatttgcttcttcagctttacccttatcagtcttcgtctcagctagctcagctgaaggtagcttcggctttgtagttggttctttagtcctttgcgcgggggagcaacttttcctgattcagtagctgaagaagcttccccgccaaactcaggcaccacgaccgactcaatatagcgtggccggtgggtaaggaccttcaattttttgcccttcggtgtaggctcgtctagagtggccgaagcagcaggtttcctcttctttccctggccccgcagtggataacggtagtccgggtaaacaaagccaatagcgtcaaaaactctgttcaatctcttctttccctggcctccgaaggctg

SEQ ID NO: 99527 - DNA, 469 bp, Zea Mays
ttatctatactaaactagttatatcaatatattctagatctaatctagtctagtaggttaatctaacctaacccagccaaacttaaagttgagctaatctaaaagtaagttacataacaggttaattatcctagtgaaataaattagaccttactttataagtatgttttaacctaaattggtgccctagactaacttgaccatatacaactacatggccttatgcaactaccttacccatcagatggttgcataaccactctgtatcaacctaacaacaaaacagagattctaactaacctacctcatgaaatctaccctacccacaattatcttaactacatgtccctaactcagatgatcacaccaagaccaaagaaaagaagaaggtcaacctcgacaagaaaggaagtgaatagaatcagaacttcagatgaatcaagatccaccatccaagatgaagtctttc

SEQ ID NO: 99528 - DNA, 369 bp, Zea Mays
ttgaggtggctgtgattgaagacttctatcgaggatccaacgactcggcctttgtccgggcgatacttcaaaaagtacctaccacctccgaacaactgtttagggaggcgggtgtctacatcactgcgtatgagtgggcttaggacctcattggaggcacaaagcccgtaccgcccgcaccacgaagggacacgaaccagtaaccagacaaacgttgggagaagagaccccgctaggaggtgcacatcgccagcccacctgccgctcaaacccgtagctcgtcccgcggaggggtacgaacactatacgagatcctcgattcccagtgcccgtgtcacaaggacatgcggcacaccttgcggaactgta

SEQ ID NO: 99529 - DNA, 401 bp, Zea Mays
ctccatccttcacatttccccctcctcgttcacacacgttcactcacacctgcgacaattcccttcactccatctttgcacatggagatgttgtgtaggtgacgacaaggagccccaacaacaaatgaggagcaccattgtgttcctcgccatcctcattgtagcgtcgacgtcctcgccaccgatggtttccactcagtgagaaatctctaccccttctctgtttcgtaaccgatgttgcaatgctctttcttcatagccggtgaccaaattttgccccttctctcgttgaatcataagaacgacgctcaatcatctttacaggggtaggatttcactgtaccccaaatttcccccaaattcacacttctttatcctttatctctctccctagacatttc

SEQ ID NO: 99530 - DNA, 564 bp, Zea Mays
acggtgaagaaaaatatcaggcagccattaacgacggctggaagatattcataagaagagatattttgaggaagaaaggagatcgacatggagaacaaaaaaaatgtccagcccctagcgtcattacggatagaagtaggagcagttaactggataagaaagataggagagatgatggcaaagacgctcaggttctagaaaaaaaatcatcggccacggcaagaataggaatgaaaaagattttccgtcctcctgaaacaaatgaatacacaaatacccgatgctctggaatttgtgtctgatcgagatacaacataccaaatgaaacaatagcaacttcaataattttggactgcgcttactatggtagatattttcagaatcagataaactcatctatatttgtcccgaatatttgatttatctgtcttggtgaatttgctagagaaataatcccaattaatttctctacgcacgatcttttcctagttctgaaattaggatttgaaatatatacaaaggagccaggctaaaacgagatcgacttcaataatttactctgcg

SEQ ID NO: 99531 - DNA, 554 bp, Zea Mays
ccttgatcaagatgaataatgcttctccctatttgtctttaaaagtgagtacatctatccaattcattcaatttcttgatgcatatctttagggggagcctatttctatatcttgattatattgagactaacactttatcttagtaatctcatatagtctcatgtatgagaacaattttctcatgaagtatgctactacatatcaatccatcttggtaaagtaatgtcaccattatcaaggattgtagctttcattgttaaagtagcataacttcaattaacacttatgtttcttagtgcctaatataatttcaatcaatctctctcttgatatgcactaagttaaaaggagaattcatgatatatttatgcaatttgtgatctacttgatatataataacaatgacttaaaaaggatcactagttgtagaaccctctcttgtgcaaaatatttccatacactgtcttgaatataggtcttaaataactaagactaaggaaaaagcacaatgaagagagcgtctctatgtgaaggtacaaaagggtaaaactac

SEQ ID NO: 99532 - DNA, 703 bp, Zea Mays
agcgacgaactgcttggaccatattcaaaggcagaagataacgcgttatctgcgaccttcggaggctggaagaagaagaggctgaatagagttttcaatgctattgggtttatgtaccctgattaccgctacccgctgaaagggcaaaagagaaaaagtgcaacttctggaaaaggtgatgcttcagttgctctaagtgagcccgcgccgaagagaaaaaaggtgaaggtccttactcaccgaccgcgcttcatcgaaccggccacagtgcccgaacttggtggtgagacctctacggctactgaagccaaaggacctgctcttacacagaagaatgaagagccggctatgatgccgaaggctgataatattaaagaaatagaggccgagaaaacaaagatactagaagttacaagcccttcggcaggaatgacagtgccgaaggcacaaaaagacctcacggtgactccaaagagaaaaaggatggtcaatgtactagatgtgctggagacaataaagtcttcaagtaccactccgaaaaaacctgccgaagcgccaaaaacgcaaattgcgacaaaaccatccgaagacgaagctacaaagagccagaccgaggccaaagctgggccttcagagcccgccaaggagaaatccttggaaaccggagaagaaacgaaaaaagaggctacaaagcaaattctgc

SEQ ID NO: 99533 - DNA, 348 bp, Zea Mays
cttgtgcattaccaaggcatgaagggacgaatggagaatactagacgacaccgcccgttacactctcctacaccgcaacctacaccaaggcttgtgtttcgattgaacgggacaaggaggcagtataaggacgccagaagatcatgcagtatccaagaatagatacgagtttaagaagacctagtgttgtcaacgatatccaattgataccgctccatattgtaaactctcctaggcccacttgtcagggcctgaactccattgtaatgtgcctcccttgtactataaaagggagagcacttgatccatagcaagagaggttggaggtcaacttacactcagaccttc

SEQ ID NO: 99534 - DNA, 657 bp, Zea Mays
gttgaaagctaattttatttacgaccacctccatctcaaaataaatcaatttatagagctgtacaaagtaaagctattttaagtttgaccaaatttataaaaataacacaaatatttatggccctaaactattatcatcatttaggtattaactctatgcataatgtacttagtgtgatcgttgatgatttttaatataaataaaattggtaaaacttaagatagttttggggatgtagggccggggtgctagggtttctcataggcacatcaaatgtcgtccatgagttcaaatatggacgattgaataattcatgttgttcaagcaatagccatacttgcacggccgataaaagccatatatataggtccgtatagtcaaagagacatcagaatcaggttaaagtgagacggtgcattggcatcttaagtttgtcaacaaatgtagctacctagcttgatgttaacataaggagtgcatgctgatttaaacactcaggtgcatgtattagcatcaaagcatgttttgtgcatttttatgtttcaaaagttttttataaaatcatacgtgtacatcatgttgaagcgcacatacctgccataaaacttgtttcctagttcattttgtaatcaaacgtaataccccttttatttttt

SEQ ID NO: 99535 - DNA, 952 bp, Zea Mays
gggtagtgtagggaaattgtgttatgtgtgaggtaacttatggcttctggaattgtttaggaactaacatcgccttctatggtgttgatgatccatttgagaccatacttcatattgcatattatatagatgaacaaagatgaggaaggcaggagcgaagctaggttcatgagagagggtgcatatgcacccacaaaaatttgcaaaatcagtgatttagactggattttcaccatatatatacaccacctataaatcattactatgcaccctcctccaatttactctagcttcgccattggaggaaggtttgattaattagtcatgcatgcaaacaggttcactcaagattctccacgaacaccttccccagctgggatcgggcacaaccaatgcgtgttttgggacataatggcgagatcaatacccttagagggaacaagaactggtaacagcccccctcctcccaccccgctacacaatttgcaaagttttgtaagcaataatctccatatgacaggcattcatggacgcatttcactgcgatgtgctatatttttatgtttaataggatgacagcacgtgaaggtcttctggagtgcaagggactcggtctatcaagggatgaaatgtcaaaacttctgcctatagtggatgttacctcttcagactcaggttccattttctatctacacatgcaagaaaaaggaagtagtaaaaagtgctaggatactagatccatattctatctacacatggcaggttaaattatatttgtcttgtcaaaagcattgattcgatgaaaaatggtccttattcaggtgcatttgataatgtacttgagcttctcatccggtctggaaggagcttgccagaggctgtgatgatgatgatccctgaggcgtggcacaatgacgttaacatggacccagagaaaaaggctttgtatgaa

SEQ ID NO: 99536 - DNA, 460 bp, Zea Mays
gcccatatgacttcgggtaattggtctgcccatttgccctttttgtcgtcgaggagccttttcttgatagcgctgaagatcttgccgttggctcgttcgacgacactgttggattgtgggtggtagacagaggtgaacactgcctaggtaccgatggaactgcagaattcccagaaatcctggttgtcaaactgtttgctattgtcgattgttggctcggacgggacttcgaaccggcagacgatgttttgctagaagaatttttgcgcagtcttcgctgttatcgtggagactgctctgccctcgatcgattcggtaaaatatttgatggcgatgaaggtgaatattaggttcccttgagccgtaggcagtgtcccaacgatatccagcccccatcgctgaagtggcaaggtgtgggcgataagcttggtaaattgtgaaggggtgcctaagagaggag

SEQ ID NO: 99537 - DNA, 272 bp, Zea Mays
gcatcaatttggatttgcgctgatcaggaaaacgctccttgcgcaagtgaatccaaaccaagtcacccggttcaaataacactttcttcctatgtttgttcatgcttgctgccttgcgcacagctttgagctcaattgcttccttggtcttctcatgtatcttttttatgtatgcagcacacttggaagcttccatattagttctttcctgcaatggaaggagcaacaaatctatcggagcaataggtttgaacccatatacaatttcgaag

SEQ ID NO: 99538 - DNA, 381 bp, Zea Mays
gcgaatctaagccatgcctcaattgaaccaatccagccctgggttctcccacccacgacgacagagaacaccacggacaaattgaggtgttctagacaattgagcgcggtctagcttaatgggttgaaccaacgagcatcaccagtgaacaagggtgttgaaacatgaacaaggagaacaagagcgtacctagaaatggtagtccacggcgtgtcgatacacagaggcgtggagaattgatttgggggaaatgcgaaattggggcgcggtggtgcacgattggagctagctgaggatgggttggacgcgtaacaaagaggcagagcagagggtatcctcaatttatagatcccgattgaactgggcacaaattttggattg

SEQ ID NO: 99539 - DNA, 299 bp, Zea Mays
ccgagtcccgagaacaaactatgccaaaatcgtgtcaaacagtttttgtttgagttcaaactttaccagagcatgttcaaggaaatttggcgccacttttatatttggactctatggatttgagttttagaaaacagggaacacatctaaacttcggaaagggttctaaaatttagatttctgatttctgaatttcccctagggccttagttcatgggctgatttggggattttggaaaactcaaatgaccaaacttccttactacattttgtaggttatttagtgcactaaaactttg

SEQ ID NO: 99540 - DNA, 688 bp, Zea Mays
gcattctgtcgtgtttagggcccagaccacttcgggtagttggtcggcccatttgcccttcttgtcatcgagaagtcttttcttgatggcggtgaaaatcttgccgttggtgcgcttgacgacgctgttggattgcgggtggtataccgaggcgaagacaggcttggtgccgatggagaaatagaaatccctgaagtcctggctgtcaaactgtttgccgttgtcgactgtgagttcggacgggactccgaatcgtcagataatgttttgctagaagaacttttgggcggtcttcgatgttatcgtgcatactgctctggcctcgatccacttggtgaagtactcgacgacaacgaaggtgaatttgaggttcccttgagccgtaggcaatggtccgacaatatccaacccccagcgttgaagcggccatgtgtgggcgatcatcttggtgaactgcgaagggttgctcgagcggagagaaaacttctggcatgcttcgcaagacctcgtgactcgattaccggtacagattatcgcgggccagtaaaatccttgatggatcaccttggcagcgagggccctgggtcctgagtgggagccgcaagttccgctgtggacttcgcgaaggatttgaatgccttcggtttcggtcacgcattttagcatgggctgactgatcccctttttg

SEQ ID NO: 99541 - DNA, 381 bp, Zea Mays
cgctagtaactcgcgtgttatggaggcaagatcattgactcattgtgccacgcatggatggccctcatcatgacttctactattcttgttgcaagacggatagactgaggggacatggtggcatcgtccatgtacccctctacagacgccaatgtacctatttacactgcagcctacaccaaagccttcgcccacacactaaaaagacacgacaaaggtgaatctagccagagaaccacacgatgaccaagaaaatatatctacccaccgcaaaaagcatcatcaccaatgtcgtcgttgaaaccaccatatctcggatcacttgtgaatctaatcactagagctccctaagccgctcttaaccgtgagcatgactgatat

SEQ ID NO: 99542 - DNA, 454 bp, Zea Mays
tgtttgtgtgtccccagccatgagggcacttgctaagctctgatctggttgtaataatattgctgagggggacaaacaggcatggagtggcattgacatgctttgttggatcgacgtacgtgcgtgcaataacatgctcgttggatggacgctcaccatgcatgaggacaaagctagcgatccatgtactatacgtctatactgctagtgttcatctcccccggcccggccatctctccatctctcatcgcagcgccgtacatggcttggtgtgcaccgtggaggcatcgaaaatgccgatctttcacgagctgtctgtccgattgatgtgccctatcctacaggctacaaatactacaaatgacggacgcaaacccggccgtcctcctgcctgtacctacgcgccggagaagctcccggcccgtacccacccgtcgtgccctgccactttttt

SEQ ID NO: 99543 - DNA, 411 bp, Zea Mays
tgacgatggaggcaaagatgacgttgtggaccttcctcctactcatgcccccatcatccaaggattggtgctgcacaaagctcaggctcgccattcctcaaatgaagaggttattgattttaatgccagcggaggatctactcttttgcaagatatgcgattttagaatcctaccctccgagtgcgtgatgttagaattgaaggtaatcgattctggattctacttcatgtagacttctacaattctatcattctttcaaagaagcatcagcccatcctccatcagcgctttatcaactggagtgggtgggaagctattggggatcctaagatgacattggcattgagggcctgtgagcaaaagaggatgaagactatcatgacattccaatataattggaatgataagat

SEQ ID NO: 99544 - DNA, 452 bp, Zea Mays
atcattatcaattccaaaggtgtactccctcacttgcctttgaaaatgttgtacgatgcctttggtgcgaggtgtaagcagacctccaccatcctcatcctcactccctgtacctgtcatggttagcttgcagcaaacaaagtcacaagaagtttcgtaccaactaaaggaaataggtggtggcacactatatgtttactcacacttgtccattcaagttcttacatgttcttaccaagcaatgcaggaggtgtcggtagccagcaagaacaacacaaatggttacacaagcacaaccccgtgatgtagtagataatttgtggagctataggtggctgtaaacaaaacaaatcaaggtacatctagaatcacattagtcaaagcaagttgaatagacattcattgatggtcctatgctggtcctagtgccaaatcaagctagagacgtgagc

SEQ ID NO: 99545 - DNA, 377 bp, Zea Mays
gttggcagactgtgaaaactgagttcacaagctccagccttcccacttgggataataactttgaagaacaagctaatctcctttcaattctgtgtacaagagggagaaaatgctgcaatctaggttttgaagcccccagtggtagaccaaggtaagtgaaaggcattgagccaatttggcagttgaaagttcttgagagaatcttcattttttgggaattaacattaattgggtagatgcttgatttgctgtaattcactctgagacctgttgattctgcaaaagtattgaggatgccctttaaaaaatagctgcttgggacatgcttccatgatcaagagagtgtcatctgcgtattggacaatagggaaatcttg

SEQ ID NO: 99546 - DNA, 550 bp, Zea Mays
tgatagtctaattactgaatatataactaggttcgaggccctatataattgggggcccggggcggcggcccctccgccccaccctcagggccgccactggctatgcatccacttaagaacgactttggagctttttcatctttacctggtgataaatcttttagctcgggtacataccttagagataaagtcgttgtgccaacgtagtcatgtatggggaatagagcacctttattagcttatcaggcactcgtgtgagatgttacatcttcggtcacgttaaaaaaacttactcccatttataaggaaaaggatgtcgaagcttgttaactagacataataccttcacagctcgtatgcatttcatgatattggaatgtcatttcctttcatgtctttgagcctatatggccctagtctgttcgaagctattacaagaaaaggtccttcccactttacttgcaattttcatgctatgtctgggttgtctagtcttcggaggacaatatggcctggtgatatgttattgagttttacttttctgtctcac

SEQ ID NO: 99547 - DNA, 376 bp, Zea Mays
ttctggtctattccaagagtgaagacgagcatactgagcatctacacatcgtgcttcagcaactgcgcgatcatcgtctatatgctaagttgtctaaatgtgatttttgactgagggaaattaaatttttgggtcacacagtttctcaggatgggatatcagttgatcctgaaaaggtacaagaagtaatggattggaaacctcctaccacagtgcggcagattcggagttttctgggattggcagggtattatcgacaatttattctggatttctctagaatttccaagccaatgactgaactgttgaagaagggagtcaagtatgaatggagccagaagtgtgaggatgccttccatacactgaggcggcactt

SEQ ID NO: 99548 - DNA, 608 bp, Zea Mays
cctttttgaaactgttttggtactttcagttcggattcaagccaccagtcttggaaatgctgcctcactcccaggagcaaaccgttgtagcccaacccgagacaacattttgaaccaaatgtctctagaaagacacgtgccaacaaaatgtgctgaattgtctcatcttgttgatcacaaagaacacatttatcagggtgttcgagcccacggtgcgccagtctatccgctgtccagcagcgatcaagtgcagcaagccaaaggaaatatttgcagcgaggtggagcccaacttttccaaattcttttggccggttcaaattccaacgccccaacaaagaaacgttcacaagctgatttagaagaatacatcccggaggaggacggcctccaaatatgttgatcctggacacccggagtgatctgaaatccttgaatcaagttccaaactgaaaaatactccatgagagcctgggcagaaatactcccagtaatatcagcaacccatttattttctaacagagcctcttgtacagttcttatcttttgccatttcttggggactttgaccattaaactaggtgccaactccaaatgcgactgcccatg

SEQ ID NO: 99549 - DNA, 475 bp, Zea Mays
cggcttgccctgcgccgccgccgttcctggctagaggtggggggaggcacgtcgaccgctgttctgaaattcgacggcgtagattagaagatgtggataccggttcgtgagttggtctcgaccgtttatccgcgatcggacgggttgaatcaaatcccatctatgttaagctaggacccctggatcatgatccagcggccattaacgtgtaccaattctgcgcgggccagatctaatctgggccacccacttaggatcagatggctgtcatgagaagataccccttcacgacacaactttttaaaagagtccctgtagttttataaactcaacccgccatcctttccaggccctggaaatattacacaaagccccctagactttgttaaaatggtgtccgcggtctagaatccttgagaaattcagaatttattttgaaaaaggatttctggtacaaaaataaatgctagaaact

SEQ ID NO: 99550 - DNA, 936 bp, Zea Mays
ttcggaagacgcttcgggagtaggtgcgacagctttttcaagcaaaatctggtttatagcttcttctctcgctgccttttctccagtttccgaggatttctccttgacgggctctgaaggcccagcttcggcaccggcctggctcattgtagcttcggcttcgattacttttgcctcggtttcaatctgcgccttcgaagctttggcaattttccttggagtagagcttgaagcttttattgtctccagtacatctagtacactagccatcctttttctcttgggggtcgctgctagacctttttgtgcctttggcacctccactcctgccgaagggcttagaacttctaatgttttcgtctctttgatttttggttcttcaattttgtcagtcttcggcattgcagccggctcttcaatcctctgcgtaagaccaggacctttggcttcagtagctaaagaagtctcactgccaaattcaggcactatggccggttcaatgtagcgtggtcggtgagtaaggaccttcaactttttcctctttggtgcgggctcgtttgaggtagccaaagcagcagccttcccagaagttgcaccctttcttttctgcccccacggcgggtagcgatagtcagggtacacaaatctgatagcatcaaaaactctatttagcgttttcttttttcagctcccgaaggccgcagatagtgcattatctccagacttggagtatgttccaagtagttcatcactagtattttcaacacacttcagccagtcatcgtctggttcgataaattggtctccaaacctgaaagtatatttcaatcgaaccaaaccacctttgctagggttagtgatggtttcctttggcatttcccagccgtctatcagtggccatatcctgtaggctatgtgttcttgaaccaaatctct

SEQ ID NO: 99551 - DNA, 575 bp, Zea Mays
ctccgttgacagggcatagtggtcaccctgagttaagtaagcgtgagcatgttgcaccgtcttaagtcatcgccgacttaagccgattgctccgttaacagggcatagtgatcaccccgagttaagtaggcgtgagcatgttgcaccgtcttaagtcatcgccgacttaagccgattgctccgttgacagggcatagtggtcaccccgagttaagtaagaatgcaggtcgacaatgaataatttgagcgctcttgaagcctttctattgatgatatatttcccagtttacagagtacattgtcgccccaatagcttttggaatacagctaggggtaaaacttcctgaggtgttctatgttccatgagttcccaatttccatgccatccatctgagtgagacgatatgatcccggcccagtgacttctgctactatgaatggtccttcccatagaggtgacaacttgtgctgtccctcccccgttagaattcggcggaggacgagatctcctactgcgaaggatcgatgtcacatggtcttatcgtgatagcgcctcagagtttgttggcaccgtg

SEQ ID NO: 99552 - DNA, 425 bp, Zea Mays
ggtgactccattgcactttgcacatctttatcaccttattccttgtaacttgagtcaatgtgtccagaatcttggtaggatactcagcataagtcagatcatcttgaacactaaggttctccattggtagctgatcttcaggtaccctgagacatttcttcagttgtgacacgtgaaatacattgtgcacatccgatagacctgcaggtagctcgagttggtacgccatctctccaacttgcctaaaaactcagaatggtccaatatagcgaggggacaatttgcccttaactttgaatctcctcattccatgaaggggtgacaccttgagatacacataatctccttcctcaaattccagtggtcttcttctattatcagcatagctcttttgcctggtctgagctacccacaaattctcccga

SEQ ID NO: 99553 - DNA, 377 bp, Zea Mays
acaatagactaatccttgaattggcagtttggtgtgaacgagtttcgcttgacgtctggactgataataggctaccaattgcctgccctacgagtggagcgtataagtcatactcttgtctctcttcatcagcttcttaaggaattcccaaattctatgaactgcgaccaacagttgagctcacataggtgtgttcttacaagaatactttgtaggacagtatcttgctataaagcctcagaacacattaagatcaagtcaacctaccttacaaaaatgagaaaacttcatctccaatagagtgggttagaagtgaggtgtactctcttgttaaccaacaacttgttcttcccatatcctaattcatggggtctccg

SEQ ID NO: 99554 - DNA, 685 bp, Zea Mays
ccgccgatagcccttcgcgtctggggttcgcgggaggccattggatatctgcgctaggacccctccaaccttgcttggtgtgtttagcgcccgagcgaagtcagggtataggttccaggtgaggagcgggttctctcgctggagcctagcgtcttgttttgcttgctcccgctcgcgttcttgagcttggcgacaatcacggcagcgggagttgcgctgttctcggtgtgttctttcgtcaggggtctcccccatttccgaagcttcgtcccaggatatgggctgagccgtgtctcgctctctgccctcgtagtgtcatcgcatgtttttgcgtttgtttcgtcgacgtcgtgcatcgcgctggtgaggctcttcccccagcacgatgggtttgtcgtcagagatgggcgacgattctagtcttccctgaatgaagaggatgtctaggaagaaaggcatgggtacagtggtgcgctctttcccgttctcccttgagagtggagtaatcgggacggcagcccacaacgctttcctgcctcgtttcggagtgctcgcctccttctaccgggtgatccatgtccactccttagtggctgaggtgcacaacggagtgcgtcgagttgtggacgccatggttggccggccttctaccctatgggggatcctgagcctagcttcgtgcagg

SEQ ID NO: 99555 - DNA, 333 bp, Zea Mays
tgatctcaaatcttcagacacccaaaatagagaaagttagaagaaaaaagaaagtagttgcaacgaacaatgctcctcctagcaccttttttctttggttctgaaaaattcagaaacaaagcttttcatcaaaactgtaaaacagtaatgtgaagtccaagctctaaacatgctgaaatatagttactctcaacaacctagagattatggagggtcaatcattgatggcaaaaacaatatgaagtcctatgaaatgaaagcttcaagattttgcatccacattttataaagctaccattatcaagggtttctacaggggaacaaagagggcag

SEQ ID NO: 99556 - DNA, 502 bp, Zea Mays
gctgatcacggcgattcgtgctagactcaggcaggatagtaccgggcgggtgaaaagattggagggggagcggatttggtcgcggggtgaagcttatcaacctgtagtcgtgcgacgtggccggaccaccggtgtcgtcgtggaaactccggtgacctcaattatgccacgccatggctatttactgcgcaattgtaactgtggcacacctagacttaccatctcagaaccgctgcaccggtgaacgccacgactgagccaccagtgaccttcttcctctccggccgccagcacgccatgcccaaattaggagacaccgcccttggatactataaattggtgccccagccggctccgctaagtagttgtgcacccagtgaaccaaccctcaccttcaatcgtcccccacagctccccaatttgagatttcctccaaatcaatcaagaattccaccatgtgtgagctcgtcgtggccagctctccacaggtccgatcacgccc

SEQ ID NO: 99557 - DNA, 542 bp, Zea Mays
tttgaatccaatatcttccagggacctttttacaacattacctggccgaagcggtataggcggatcacaactgttggattacgccctgagggccaggattagatctaggttcctccgaagcggtatgacacatggaccagtggatcggtgatcgacggccgtgatttaaataaacgaaacttgatccccaccgtccaacacagaaacagacgacgtggatggattgttcgactggtaggataggatcttatcatgaccttccgttgctagatccacggttgtggtctcgtcttccacacgggagaagcgacacgagccacccggcgaaggcacgcccggtctccctgcacccaaacaccgaacaatagggtaaatcataatgctctaagtgccacgaattcgtaggggtaaaactcactgtgaatcgcgtcgtggagggttcctgcccacgcggcgcagcggaaatgaattcaagcgcggcttcgacgagtaattgccgccgaccatgattagtacgcgcccacacctaccgccggccacca

SEQ ID NO: 99558 - DNA, 486 bp, Zea Mays
gtgggatttcctcttcctaaagaaagtgtttgctataaacatgtcataggctagggcaaagttcaggatttcctctccttcttgattcctagtcccaaagccgaagcctccatgcacaccctcgaaactggtgctagatgtacccacatggccattgagatctcctcctatgaagagcttctcgccaactggcacactactaaccatgtcctccaggccttcccagaactccctctttgagttctcattaaggcctacttgaggagcatatgcgctgataacattgagaaccaagtccccagtgaccagtttgactaggatgattctatctcctagcctcttaacatctactaccccatctttaaggctcttgtcgatcaagacgcctactccattcttgtttgctgcagtcctcgtgtaccacaacttgaagcctataccttccacttccttcgccttctgtcattttcacttggtctcttgtac

SEQ ID NO: 99559 - DNA, 1327 bp, Zea Mays
ctgataggctatggttacagtagggttacaatgtacatgggccaatgggccaggcgccccacatgggctgtcatagatacattccaacaccctccctcagtctaatcgggagtgttacgaacgcaaagactggacctaaaatcagtaaatagttacaggtaaccctttggtcataatatcagcaaactgaagtgacgatggaacacggagcacccggacctgtcccaaagcaaccttctctcgtacgaagtggatgtcaatttcaatatgctttgtgcgacgatgatggacggggttggcagtcatatagacagcactgacgttgtcacagaagacgattgtcgccgaagagatgggtgcatgaagctcctagagtagctgacgaagccaacaagtctcagccacagcgtgcgcaacagcacgatactcagcctccgcgctcgaacgagaaactgtagtctgtcgtttggaggaccatgagactaagttgtcgccgaggaagacacagtaccctgaagtggagcgccgagagtctggacagcccgcccaatcagcgtcggagtaggcagacaaacccgtaatgctgctggtgccgatgtgaagtccagtggagagggtacccttgacataccacaggacccgcttgagcagggccaaatgaggctcgcgtggatcgtgcatgaataggcgcacctgctgaacggcataggcgagatccggccgagtcagcgtgagataccgtagagctccagcgagactgcggtatagggtggcatcagccaccggggcgccatccgtagcggacagcttggcttgagtgtcaacaggagtcgccgttggagcaggtccgcagcatactgacgctgggagaggaagaggtcgtccttggaacgcgtgacagagatcccaaggaagtggtgaaggtccccgagatctgtcatggcgaactcggagtgaagaagctcggtgaggcgacgaagaagctgggtcgtcgaggctgtcaagatgatgttgtcgacgtagagtagcaggtaggcgatgtcagcgccctttttgtagacaaaaagggacgtgtccgaagctgacgcagtgaagccggatcgctgtacgaagctggagaagcgctggtgccaagcctgaggcgcctgcttgagtccgtacaaggacttttgcaggaggcacacgtgatcgggggcggccgagtcgacgaagccgggcgactgctcacagtagacggtctcattcaggtggtcgtggagaaaggcgttcttcacgtccagctgatggatcggccaggagcgagaagcggcgatgctgaggatgactc

SEQ ID NO: 99560 - DNA, 812 bp, Zea Mays
ccgggcaacagtagcacgctgaaggtcgagcagacatggatcaacagccagcagtctcacctcagtctcgtcacgctccctgaagctatgtggtagaatgggtggagaggaaatgggagcgggagcagtggaagctggagtggtggaggtggtgggtacaacaaaagtagtggatggctctggagcaacaggagctggtgaagtgggaggtggagtagaggcagtggcagaaggtgtggagggagcagtggagcaaggccgagatgcgaggcaacgaactcaatagactatctgatctgaggaaatctagagctggcctccccactcagcctgctctgctgctgctgccactgcaagtgctgcatgagcggctctgtccatacgtcacttctttctgccctcctgctgctcaaggtaaactgtcttccctttgacctgcctgaaggggcaaggaggatcctcgtcgtctcctcccccttacgatgagacattcttcgtccgcaccatcctgacctaactactgcatgatagagttaaaggataggtaggagtagagagcagccgataggatctcaaataaagtgatagctacctagaaacctcatgagagagagaagatccaagaaggacaggagacaggcacgcgggcaggcgagatcactaaaatgagagaagaggtgagcatgtattagtcacatagtcataagtatatgaaatgtgaataaatacatacacagagagttagggcacaaaaactgggggatttggagaaacaggggtcaaacgacgcgagaacgacgttggaacaatga

SEQ ID NO: 99561 - DNA, 445 bp, Zea Mays
ctggtggaaggggatgaagaaagaaatagctcagtatgtggcccgatgtgacatctgccaacgaacaaaagccgaacaccaaaaacccgctggcctattacaacccctcccgataactgaatggaagtgggaagaaataggcatggatttcgtaaccggactaccccggacgcaaaaagggaatgattccatctgggtaataatagaccgcctcaccaaggtagcccatttcattccagtgaaaactacctttggaggagccacccttgcccggatctacctcaaagagatagtcagactccacggcatcccaaggaagatagtgttagacagaggaacccagttcacatccaaattctggacaggcctgcagaaagctatgggcaccaagctagatttcagcaccgcgtaccaccctcaaacagatgggcagacagaaagggtc

SEQ ID NO: 99562 - DNA, 1096 bp, Zea Mays
tggagttgtgcttaaggaactgtgcgtgcaatgtttacgcttacgcattgccgagagacaacgactatgtcatatggtcaggttgatactgttcagtttactctagggatcaatgatctgtaactcgaatttctcataatgatggccaacagcacacaggtatgatcgatcctaccaatgtaactatgtaatagtttatttagtactttattactataaatatggatcactattgtttttacagcttgacaaactgctctcgtcgcatgtctttgttgtcagagggtttgacagactcaaacaaaactccaccaaattaagtaccttgtagatggtcttagactcagtagaaatgatattgttcagtttactctagggatcaatgatctgtaactcggatttctcataatgatgacccgccgcacacaggtatcactattgtttttattagcagccatatggatcaattctttttacagcttgacaaactactctcatcgatgtctctgttgtcagagggtttttgcttatctcttcactgctaggattttgatatcatcgtagccaatggaagcatttcatgctagcacttggtatgcacgattattacttaccattcatgatttttatgtatgatcatgacttttatatcatttcattcatgggaacaaaggttgttcaatcagaattgttttgaacagaacatgagcatgcaccaggcctaataagattacagcccaccttgagcagagtttttatctggatgctatcagagacgccaccaatgagtttactgaatgaaatattattatttctacccagtctaataccatctacaaggtacttaattgggtggagttttggttgtgagtctatcaaaccagtatatttatatatattgaagaatttatctccaacaagcggttccggttagtttctatcagtcagttcctatagcataagggacagtagccaacggaagcatttaatgctagcacttggtatgcacgattattacttaccattcatgatttttatgtatgatcatgacttttatatcatttcattcatgggaaaaaaggttgttcaattagaa

SEQ ID NO: 99563 - DNA, 405 bp, Zea Mays
ggggtctattcccccggtcagggcaatagccgaagaccaccacaggcaaacggtggtgtcgaagaagagtgttgttgggatgtcacaaagtgggagacgtcactggatgggtatggagtgatcccgtcttcgactagatcgggatacccaacgcgatctactgtcttcgatggctaggacgtgtattggggagggggacttgtggaatctatttgagggcgaagagttgaagatgatgttgtttaatttcctagaggcgggtcttattccgaaggtggagccgatgtagcatttttgctggcctcgctctcgtgttgcgatagtgagtgaaaacgttgccctcccccgcttcgcagtagagagggagggcggcaaaatatgatttgtattacttgtatgatgtgg

SEQ ID NO: 99564 - DNA, 547 bp, Zea Mays
caactggattgtctgttcatcagactccaacaaaagaaatatgtgcacatcacgcaggacattaagtctcatcagtgtatgtatgttctgttctgtctgtcccccctgattatgtcccagcgcaatagaatccctagcaagcgatgagcaacaccatgcaatgatcagatgtgatgcccaagcagcgaagctcaagacatcgaagccacttgcacactaaaagtgatggcactcactctgtcatcaaagaaagagaccactgaaagcgatgctagtatgtggacaaatatgctccatgcctcctatattcctccaagaatcgaaacctaaccatcattaccatgtgagcgaaaattgctaccaagaacacgaccactattttgaccgctttgtcgttttcagttagcatgacaaacttgaacatcagtcatcatgtgagagaaagagaagggcgtgcaccgtgtgaccgaacgatgtcctcgatgtagaagtggttgtacttgttgtccatactttcgtggagcagcggaggtggtagtcgacggcg

SEQ ID NO: 99565 - DNA, 515 bp, Zea Mays
cggcagctgaaatccggcgagctataccagccagagggggcaaaggctgacgctaatcttcagtttacaccagattctacccctaaggagtatttcccctcacttaattgcatctaagatcaactaaagagctctggccacggcgaccgagaacatggcggctagatcgtcgtgttcccgacgattgggggcatcctagttcaaattgatggctcggcgagcatcacagagtaaccagagttcttaaacaagggagagggagcaatgaattaacctggaaagggctggccgtggtgagcttgattctacggtggcggaaacccgatttggggagaattggaaattctcgagctctggtgaacgattgtggctaattagtggtggctggttagctgacgaccttgcggagctagtcacgggctcaatttatagggaggacgggcggtggtgatcaattcgaccgagtcgtgctggcggccggagctgaagaggaacgtggctgcggtgaattcgtg

SEQ ID NO: 99566 - DNA, 461 bp, Zea Mays
tgaggaggtcgtccctaaggatatgctatcgaagccgactgctgatgacatgatggccatttgttcagaaattccagccgcgggattggaggtatcccgagcagtgtctcatgcgccgtcgactttggaaggcagtcttcaatgccgaggcgttggtccggattgcccgactcacatggaggtgacagaggatcgttcagccttagaggtggctgctgtagaagacccagtccccgagggtggtgctggtagttacccagcccccgagggtgtcgccggtagtgatccggctctggtgggtagcgcgagctgcaacccagcccccaagggtgttgccggtagtgatctggctttggtgggtggtgcaagctgcaacccagcccccgagggtgttcaggtgagctctccttcccatacctccatggacgtccatgtcgggtcatctccaccacgatccgatg

SEQ ID NO: 99567 - DNA, 1353 bp, Zea Mays
actaaatagcgggctatagcagctctatagcggtaaggtagcagctgagcgaatttctctgctaaatgatacccgggatttaaaacactgtacttgggcacttaatgcatatttttccccttttgacgtcgtgatctacaattattgtgtaacacctgattgtattctggatgcttggatatgggcggtgaagtataggcgatgacaaagatatttgtaacaatggaatagagcagaacagattttagtaggtcttgttaggagaagaattataagtacatgggaggtccaccagagataggtatatgttactagattttttttcttccctgaaacagatgtattgacattgccttttctgtagttaggattaagtcacagcctatgtaatcctaataaattgtgtaccaggtcataacttggtcaggatttctgataaaactagatccaccagtggaactgaacttcttgataaatcaatgtctcatgatgactgatgactgaacttgtgtcacttgccccagtccttttgtttgacattgctactaccttgcgaaacgtgactagagacgtgcaacactgataaacttaatatagatgttttttggatagggtttagtagatttcttacagatatgacccagctgcatttttattggtactcattcatgtttctttttagttttagagaaagcgaactactagtgtttagggggtactagagatgctgtagcgtgaagtgtcgttactcagtatatggaaggaactacctaacaagttagtttcagcttccttttcttggcagaaattactggtaattaggtatcatactgaagttagatattctcttcatcttcttttcttcaaaaagaaaaatatgtatacttgaaagagagggaggtaacatctatttagtctcaggctctcagctatatagtttctactttgatggaaattagagcgatttgaactggacagtttttttgtgtgtggatgaaatcatattttcacacttatattatctcttttagtagtgactagtggatttttctcgaacgcgcaggagaaccacacatcatttaatcattatattaagaagaaaatatagaggtctaaagaggaccgttacaatagggcaaaaggccttttatgatgtccgaaaacaacaatacaagaatagattcggatttaatgtaagaggactacatgctaacccccagaatcggggcagtaaggaggccctacaagacacaacctagcgaagatggtctatggtttcaggctcttggtctcaaaggaggcatcattcaggttgactgagccctcctttttgcagcctatctgctgtccaac

SEQ ID NO: 99568 - DNA, 445 bp, Zea Mays
gtggatggcgtaggtgcatgttgctttgcagtttttgtagcccgagcaagatcatcttttataatttggtcaggggtcatgggatggataattattttctgacccttaaacatgaaagaataatgattcaaacgaccatgatgtaaactatcagtatcatattgccagggtctaccaagtaacaaagagcatgcttccataggaataacatcgcaatcagcataatcagaataagagcccaaggaaaagggaacacgtaccgaacgtgtaactttgattttgccaccatcattaaaccattgaatgtgatatgggtttgggtgcttacgagtgggcaaggataacttctctaccaaagttgtactcgccaaattgttgcagctgccactgtcgatgatgatgcgaatcgaccgttcttgtataactcctttagtatggaatagag

SEQ ID NO: 99569 - DNA, 779 bp, Zea Mays
aaaagcaaaccctactccaaccatttcccccttcccccaaatattgagccgccggcgcgcgtcgtagccacacaaacgtgcctcccaaaatccaccagagcgcgcccctgccaaatccccgactgcgtgccctctacccagatccacgagcacttcccagctccctctcaccaccacgccacgcacaggccctgctcggagctcgatcggttatttggcctgctggttccaccgcttggagctcggtaattatcactgcaaaatatttttcttgtttcttattctcacaacaagttccttctcacgttttgttagatcccattctagaatatttgattttctaatttctacctctcaaaagcatgtccttgctgttctgatatgtgagccaggaaggtgtacgagcttgcaaaattaggaatgaggtacattgaaccaatgaggagaagctactagtacgagctagctatcattttggtgaacgctcaaagttctggtatgttcttggctgcccgtcctttgtctttttttgtttttagatgtgctcacaataaaagaatatttttattagccagcaagtagtatttccagtagtattcttggatccatcctgtaatgtctcgattggtcttcatcactcaattttgaaagccaaatctgctacccaactatatcaaaactggtgttgcatcctggtgttgccagcagcacggagaagtgccggcgcgggcactgctcttcatgcaagcgggcctggtgcacactgccttctgggcctg

SEQ ID NO: 99570 - DNA, 758 bp, Zea Mays
taactatttggaacagaggacatgtagtaaaagaaacaagaacttgtcgtggtcaaagaaacaagataagaacttgttgtaagtcaatgaaacaaaggcgcatttaacaatttctgaaacagaggacataagaaacaagataagttatgcacaaaagaacttaccatggaagtggttttggcacgcttcttgtgtaggttgtactgaacaggtgcagttctcttgtcacgcacaggttccggggaacaagaatcagtgaatgaatgtgccagattgggcaaacttatgcacgaactgcgccgaaaaagaagagtgatttaatacattaaaatggaggcacgagggtagatagcaacagtaaaatggaggaactaagaagttcacctagatctggtgtctggcgcgcggtgtgcagagtcgacggccgagcccaccgcctacttcactttggctaggacgacggagggagggcggatccggcaacgacaacgaaggagagggatgtcgacggttggagcggctgggatatactaggacgtctatcaaatttcctgacaaaacatataaaatctcagatctgaacccaatactgatatgtgaggaaagccacactttcagaatcggcaaagacaatgaagtgttaaagggaaagacagacgaagaagttgagcattgcataaatactatgaagaatgattttgaagcaagatacgccacctacatagcaaatgcaatgcttaaatttcaagacagggaag

SEQ ID NO: 99571 - DNA, 486 bp, Zea Mays
gtgctcaaccaggttggattatggataggcggtaattttttttttaccaacatcgatcaatctggaaacaacaaagaggctcgaccgacgtacacagcctgagtatgccgcccttattgcccaaacagatcacagctagccagcacattgcaccagaagattcattcattcgggtgatgtccctttttttattaaataggtcaaactgaatggcgtaagtggaccacaacagagacatgaatctctatggctctgctccccaaacctgaattttaaattccattcaaagtgcttgtgtcaaacctgaacctgagacttccaatcagattttctatcattttcaaatgctagtttgatacagttctttactaggagttgttctcctatgatcactctcccgctttgctttaaaagatttcagctaaaactcaacaaacctcaggttagagagctccaaagtttgggcaataccactgaactgcaccc

SEQ ID NO: 99572 - DNA, 633 bp, Zea Mays
gaaatatgtatgtcttgttaacacaacgtttaggttgttgtcgtataaccgtgtgaagaatgctcctgatggtcatgtgactaaagtgtgatgtagtggcaagcgagaagtaagttcaatatttttaaacgattagttgatagcacctatcgacatcgtcatgatttttgttgtatggcggatcaatgccttgtcgtcatagtctcggggaattttcggaaatgtgctagtgttttacggatggggtgaatgtacttgtgatgtcttagaataactgcgtgtcatacgagtatccaaaaatggtgaaagttggtgtatgttggtgattagaaaatggtcacttcgttagccaatagcaagcttatgccgagatttaaaatatgggcaagttaaattgaaatcatgcttatctagacgtgtggttaaataataataattttggcttgtgtagtgaggtggtgacaggccgaagtagtcatcacttcctctacgtttttaagtcgagtcaaaatgcggggtactagtagtacgctaggcaggcggtgttccaaatagataaatcgggtgatgtggtagttgtcaagcgtgatagaggttgagtcacttaggttataaattgatgctcgacatgtg

SEQ ID NO: 99573 - DNA, 445 bp, Zea Mays
gaacgagaccttagggacctctctgcaaggtagtggacaatttgtgttggtcatcagaccgttcatgatgtgcgcataaagccgaggaaagaacccaacccctgcaacctaggagggatcccattagaggggaaagatcttggtgttgtcttgggatcggcaagtaacccaggacatctctagacgatttagagtcaaagagaggttaagattgagattgagaaactacaactagagttgcactatatctactccaaaggcatgctaatatagatagattggttcgattgtattttgttttctcaatcaattgtagcccttcatatatatagggggaggcctggacccgttcctaggcgagatccaatggttttctgcaagtttgttaggataaccacgcatgggataaggactctcgactgagttattctaatcatggaccgtc

SEQ ID NO: 99574 - DNA, 627 bp, Zea Mays
gaactcctaacatccttaaatgtggtttaaggatcaatagagtagaactcctaacatggaggatatatgagatcatgatgattagtagtttttttgagcttgtaatgatcttttgcacttttgtgttcatcaactgacaagtgataagagaactcatggtattatgttgtggcctgaacctctctaaattgtccgtgtgctggtttttggtggtgtggtgtctaggttcaacctatcacttacctgctacacctccgatccactctctctaatgagtttatattttatttttgtgtacttgtttacatactccggtgtctaaggataattagcgggaatgtaggtttccaagagcaccgagaaagaaacagcggagtttgaaaggcgggcgggcagtgggcagggagtacgagagatttgtctttggggacagaggccactgggctgggtataccccgtatgcatgtgcatagccataggggggcaaaggcaaggaatgatggcctggaaatgggcatcagtttgaggcatggcgtcgacgcttggttggctgcagcaaccgccttttgaggcggcggcacagtcagaccagagtgacgacccccatgcagcaatcatgcatgcctc

SEQ ID NO: 99575 - DNA, 347 bp, Zea Mays
tgcacggaaacactcccttctttatggtctatggttcggaggcagtgctacctgctgatctcaagtttggggcaccaagattgatcttcgaaaacatagccgaagctgaggctactagactggaagatgttgatatactagaagaagaacgattgaatacaatgattcagtcagccaggtaccagcaaactctgaggcgctatcatgataaggccatacgacatcgatccttcacagtgggagatcttgtcctccatcgaattctaacgggggagggacgacacaaattgtcaccactatgagaaggaccattcatagtagcagaagtcactcggcctggatcatat

SEQ ID NO: 99576 - DNA, 284 bp, Zea Mays
aatgcctgttggcactgcggagaccccagtcacttcaagaataactgcccccagttgaaggcacccagacctacctactccaactcggtgaatggccccaagattcccttggcacctacctccaaggcacgtccttccaacagtcagcagagcaggactcagtaccagggcagagcacgagtcaaccacgtcgacgctcaagaagcccagcaagctccgggagtagtgcttggtgagttccttgttgaatttactctcgctactgtgctttttgattcaggagc

SEQ ID NO: 99577 - DNA, 965 bp, Zea Mays
atcaccaaaatacttatagaaatggcccaagggcacatttcgctttcatattcacctttctcttctcttaccaatcgttttccctcaacgtcttcttaggaataaccctcgaccagtcctaattaaaccacctatcacgctcctcctctttcatcttttgtgtgatttccatagtcctgaatcactagacacgccacttctgcagacggcttaacccagttggacaccatcttggtgctggttttgtactgggcgtagctgaaccatgatttctcttgcccccatgtctagtacgctaccagttgaagctcgaccaacaggacctatgttctgggcgacaccaaccaacacattttttgcctgcataaacctactctctaaccgacactcttgctagtactactctttgcttaacactacaacccgattgtttggccaacgtgtgatgctctcctctatagtggccatccatcataacaccaggactgactttgcgttgatttgcaatcattttagccctgcgttccccctcccagctagcagaattactcatttctcgtgcatccactacatcaagcctaatatgcttggtgctcatctcttgatcaccaccactttgcagcatgctaccctgtaatttgtttgtcccaacagcaactacgtgtccatgccctatgtttggcttagctaccacttctttcaccctgctttgtgtgatttttagtgacaaccacctgaccgatttgacacctctgtctgggaacctaccaccaacgtggcatcttctttagcatttattatgtcgcactccattgttcccactatgatttctgagtagcttttgctcagcggctcatcttgcccatcaacaataacgcccccttctcctgattttttgcctatatacagccctctggcatccgctgggctgcgaggagcccatttcttttgaatcttcaaacgca

SEQ ID NO: 99578 - DNA, 305 bp, Zea Mays
cagaaatcatttcccagatctcactcttctgcgaacgatgtgcacattcatggtgtacttcatggtcttcagtggctcaaagaggcagatatctcccagctgcaaattgttgtcacgagcaaactctgcccacccaatgcgaagccttttggattcaccttgatctttccgaacctcaagaatcacttcccagctcttgccatgacactgaagaatcaccgctccgctcttgaatgggagacatacatcaggatattttctggagaagacctggttagagagggaaacatgtttttcaatttcag

SEQ ID NO: 99579 - DNA, 308 bp, Zea Mays
ctccaaggcaccttcctccaacagccaattaagcaagaagtagttccacaatcgagcccgggtgaaccacatcgacgcccaggaagctcagtaggcacctggagtagtactcgatgagttcctagtcaaatttacccctgtcgcagtactttttgattctagagcatctcatactttcatcgccactagttttgtggaaaggcatggcattcccactgcaccgttagaagtccccttggttaccgcagaccttctgtgccacctcaagtgctctcaagtcagaattcttttaagtggggtagtattcc

SEQ ID NO: 99580 - DNA, 614 bp, Zea Mays
cactgagacggcaagtcttgtggagagaactcgccaagaacaactcccggacctcaggacagatgaagaaggaatcatttggttcagaaatcgtctgtgtgtaccaaaaggagaggcacaaggagttccgctcgatgaagctcacaactcagcctactctatccacccagggaccaccaacatgtacctagacgtcaagactagatactggtggagaggaatgaaaaaggagatagcacagtatgtggcccggtgcgacatttgccagcgaactaaggcagagcatcagaagcctgcaggtctactgcaacccctcccagtacccaaatggaagtgggaagaaataggcatggatttcgtaaccggactgcctcggacccaaaaagggaacgattctatctgggttataatcgaccgtcttaccaaggtagctcatttatcccagtaaaaattaccttcgaaggagccacccttgcccggatatatcttaaagaaatagtcagactccatggtattccacgaaagatagtgtcagacaggggaacacagttcacctcaaaattctggatgagccttcagcaagctatgggcaccaagctagacttcagcaccgc

SEQ ID NO: 99581 - DNA, 972 bp, Zea Mays
ctgacccggaacgcggcggtccgcctgcccggccacctcactatcgatagcctggagcactatgttggtggcggccagactctcccgaaggtctgaaggggtctctgacgacaggatcggaattacacactattaaaaagacatcccaaagtctttcctttgtcccatcgagattacctggctgcacaaaaaagttaatgagataagcacaatctcaagaattagggagtaaagaggaaagagtctgtgcatcgagtcgatcatcttttgctggagaggatgcaacaccagtgggcgctcctctatcggacgcttgtccaagtccaaaaggggctgtggagaaatcacccctcgatgaagaagtcaaaataaggcaaggcgcgatgaagacgccctagggaggggtcatttatagaaaaggacgttgcacaactaagcaacgcgaataccaatcgtcatgtacggaagagggcaacgtttcggtgccgcttaaaaaaagctatataagtgtgcggcggaagagcagaacatcgcccgacccttcatcagcccctgaaggaagatactctcccctcgggggctactgtcggagaaatgatccccgatccttgggacccgccggtaagtgagtgcactaaggaaagagccctggccgctagggcccgttggtcagctgaaagaggtggatacgtcaaccttgaaagaaccctcccccggtcgaaccccgtggcaccgagactggggtcggacgtggtggaacctaacggggggcgggcatgtcgaaggggaaccactcgagtggatcccgcttctggccccagactgacccaccgtaaataactggtcgcattaaccacacctaacattgagccatggtgcgagcgtcgatccgcgtcccacttataacctacaaaaccctcgggccacataacactcatgacctatgagcccccggcctacgacgcatttatg

SEQ ID NO: 99582 - DNA, 377 bp, Zea Mays
ctcaagtcttgtacaagatttgtagagtatacatcaaggaagatattttgtgcagcaaccgagatccgaatccaagcagaagatgccaaaacgggcagccaaagtcgctctaccacctgctgcagctgactgacgcgactagagctctgcagctgtcgcccgtgttcgccaatggatgaatctcactgcctccttttatacccgagtgccctgctccctcccttccctagcactcttcttcatttgcgcagaaatggtggcgagccgccttgtccctcctcctctgcgctctgtccgagtcactgctcctaggccgagtcttctccaacgcggagcaccatccatggctgccgaccacctttgctcccttgctctcc

SEQ ID NO: 99583 - DNA, 718 bp, Zea Mays
taaggtgggagattggaggttttagataacgaacatagcgtaatcaccaaggtaagattgagagatgagaagggtaaaggtaataagaagcaaaagcacaacaaaggatgaggttacaaactcgcgagccaaagaagaggatatgaccaagagaaagaaggtatgagacggaagaggggcgattttaaagggcaggtatgagacaaacatcaatgtaggatatagaggtgtcaagggtgcatatgataataattaaaaagcataacaaaggatatagttgagacaagactcgcgaaacgacaaagtggagaaaacaatcaagggtaagataggtaaggttccaacataagagttgaagtaaagattcattaccaagtgaagttacaaggagacaacgagatcaccaaggatatgcaaagtagaatgaccgctcatggatcattaagaaacaagggtggtcaagggcatgttaactgaaatgtctcaaacagatattgggatataaaggtaagcatatataaaaataagagtatgcaagattccaatggtacgagcataccaagaccaagaaagtacaaattgccaaaaagatagcgacttatcaatagaataggaaagggtctcaaaagacagtaagatcatggacatataaactgaaatgtttaaataggtagtagaggtacaagggtaagtgctttagattaagggataagggtat

SEQ ID NO: 99584 - DNA, 342 bp, Zea Mays
agggggatagagttccccgctgatatgatagtaatgggtacccatgatgtaaccatagatgtcatcctagggatgaattggctaaccaaatatcaagcaagtcttagctgcaacaagaggactgtgaagttagtgtccttatcaggagaggaagtgttagtgaagttggtcttgtctagaccaaggaaaggaagctatcaccagatcactgcccatattgaggaaatcgaaccaccggaagctatcaaagtagtatcagaattcctaaatgtttttcccggatatttaccgggcatgccacctaagagaaaagttgaatttgccatagagcttaaccctggc

SEQ ID NO: 99585 - DNA, 493 bp, Zea Mays
gaaaataggtaaaatacaactctaaaattgagatggaagagagaaggttttagaggactaaatgatataagctttagggtaagatatagatgtaacaagggtaaggatggaaatcgtgaaaaacacaaccaaggatagagttaaggcaagactcatgaagtggtgaagtggataagacaatcatgggtgacataggtaaggttccaacagaatggttgaagtaatagaaattatgaccgagggaagttataaggaaatgatgagatcatcaaggatgtgcgaaagagaatgatcgctcatggatcatcaagaaacaagggtggtcaagggcatgtaagtcgaaatgttttaaatagacattgggatataaagacaaggatatatataaaagataagattatgcaaggttccgaggatacgagcataccaaaatcaagagagtacaaattgccgaaagatggcaacttaacaacagaataggaaagggtctcaa

SEQ ID NO: 99586 - DNA, 375 bp, Zea Mays
caactatacagggttgttaccatcttcacttgtcaccggttgcaaggactaccatcactagtgaatgcaatgctagctagttagtttatatacagcgaccacagctactaacgatcgaaaagctagctagtttatatacggtgaattgcattgcagaccatcatctcgtgaatgcaatgcacgtgatcgatgaaaactgttaattctccaagctagtttgattatacagcaatgccatgagacatgctgttgaaggttgaagagagcacttctcccaagtattgatgccgatgcatgggctgttttcttttgggtgtacagataggttggtgaaactcttatcggtatttagttcgctaatttggttgttccggc

SEQ ID NO: 99587 - DNA, 374 bp, Zea Mays
ccgccctccggtgagggtgtgctcagtttaatgcgcaccgttggatggggaatcgatggctgcatataccattaagggtgggagtacatctacgccattagatggggatcgagcgcataggaagtcgggcggggttatgttgtatctaattcgtcgatcctgatccggacgggtaagatcgagccctttcatttaagtcgtgaaatcagttgtaggccgttggatctagatccaaggatccacatagcgtacctgttcgtggggtgcaggtttaatcctggcactcgattttgatcggacggctaagtttccgttcaccttaccactttgcaagagaacccctagaatatacaagaatcaacccgcagtccatc

SEQ ID NO: 99588 - DNA, 310 bp, Zea Mays
tttgaattcaaacaatgagaatgagattcacattcactattggatgttgctgcttaaattgtactttagtgtgtctaggtgaagagcctgataataaggtgatacattaacattaaaactttgctggcaacgcaagcaaaatgcagaacaagcgaagtctctatttcaacaaactgatgtgtctaacaccattgctatatttggagtaaacagcaatccatactccaggcgagttagcatctgcttataaaaactgatgtgatgttcagcaccagtacctttgggtcagaaaaaatatatctgaacgtga

SEQ ID NO: 99589 - DNA, 673 bp, Zea Mays
ggaatacgaggcccaccctgattgttttgatgatgagcaatctcatgcaaaaccctagcattatcagcagtggcattcactagggcagcaatggcatctggcagtgtaggtggaactggtggtgttgatggagggttgatatcagcttctgcatcaccacgcgatgtgccggccccatccgacccacgagtacgcataggcatctggagtaaaacaaactcatgaataaacctctataaccatgaaatatattacacgaggcaggtacatggattttattcattacaataccaaaattgacataacttattatcctatgcctacaatagaggtcacgacaccatacacatgtcatattaaccctttgtatcattagctatctcagaaacatcactgcctcctgggactcaccacctggtacaagcataggagctgcttctttctctaagtctgcattaggctcacccccatcagctagcaccacaccaccctctgcttctgcggctcctggcgcatcattagggtgcatctgatagtaaagttggtgaacttcttcatgcagatcattagagtaatcctccagatcattgtaggctagtaccagatcatgaaaatggcccctcaagtggtcctcacgggcaaaagctgcctctcgtgatcgcatggttgccgc

SEQ ID NO: 99590 - DNA, 702 bp, Zea Mays
gatggttgtgatgaagactattgataagaccccgccctcggtctcggcagaaataagtgttgcccctgctaatgccaaagctgatgctgatgccgaagctgatgaagcggcccctaaagctaaaaatagtgaaggccctattggaaccacaatgttagagattgataggattatagctgatgtggttctcgagagggaaatggctgaagtgaccactgatagggcttcgcccttaaaaatgaaagaattggaaggagtttcttcggaggatagatagttggacctacgacacttgggcggccaggaactctccaaagaagatatctctgagttaaaagaattcgctattgccggcggctacaagtctagatccgtgctctttggtggtgtcgacgaggagattctagggtacatccttgaccgtgcaggagcaaaaattatcaatactttatcaaggagcatcagattcccgaactcgaacgagatctcagcaattataggagacaacatattactgggagcttgttctatttgaattttaaggtataaactttgatgtttgcctctttcacttattaatttttaaatttcgagagttttggctaacgtgacttcgacttttttaacagagcctactattgagtaaagctttaaagctgcaacaggaaaacgaagataggaacaatgagcttgttattaaaa

SEQ ID NO: 99591 - DNA, 518 bp, Zea Mays
tatagaagaggtgcaagaggagtcctcatgaagtgtgttcatttggctacaggaaggtagctgctggatgaaatccatgctgggcaatgtggcatacatgcagcatcaaggacattggtagggaaagcttttaggtccgggttctactggccaacaacaaaggatgatgcggtagagttggttcagaaatgcgaagcatgccaattcctatcaaagcagcaacacttgcccgcccaacatttgtaaactattcctataatctggcccttcgtgtgctgggggctagacatgattgggccattcaaaaaagctcaagggggatatactcacatactcgtcgctattgacaagttcacaaaatggatagagtacaaacccatcgcctctttgacctcagcaaaagtagtggaattcattcaagaaataatgtttaggttcgggatacctaacagcattatcacagacctgggatctaacttcactagctcaccaaaattcagcaacatatacaaatttcc

SEQ ID NO: 99592 - DNA, 433 bp, Zea Mays
ctagaagagagtagcatagacttaatccttggtatgaactggttaaaacagtggaaggcagtcatacattgtgctagaggaactgtaaaactttttagtcctgatggcgataggttcgaggtcagagttgccccaaccccatccacccaacctgctatctacctgattaatggtaaatttgtgggcaaccatatccgagtagttagagagttcctagattttgtcttagaggagataccctaaatgccaccaaatagagatgtggagttcgttattgaactactacgtggaactacacctatttcaaaaagacactacagaatgttcgtagatgaattaaaggaacttaagaaacagttgaaagagttgcaggaatcagggtatattcatcctagttcctcaccttggggagcacctgtcctgtttgttcaga

SEQ ID NO: 99593 - DNA, 645 bp, Zea Mays
ttctgggtttcaggctaaccagtagtgttttaatggagttaaaacggattttataaagacatgtttagcaaaacaacttttcatatagattttcattaaaacaagttgtcatagaattccacataggtaccaccaatgttagataaggctatgaaatgctaatgtcaggaaaagatccctagacccctagggcctaccggttagagaggacgcacgagataaggacctttcgactgcaagggaccactggtcagcgtgggagtaagggaactatctcccataaaagcatccgcccgctccaggataaacaccgcgacaccgaacctagggtcgggcgtgacggagctagaaagggggacagacaaaccaaagggaagccactcgagtggattccacgtctggcccgagactgacttgccataagtggtcggtcgcattaactacgcttggcaccgagctgaagtagagggtcggtccacctccgatggccgacccccaccatggcctataaaaggaggagatcggtcatgagggagggaacccacaggatttgactctcagaaccggagacgctcgacggaaggcaacgacacacaagacctaaagacctggaagccgaagccaaggcttagcgtagaacttgag

SEQ ID NO: 99594 - DNA, 598 bp, Zea Mays
gctccgcttaagattaaagtcttattgtggtacattaggagagaagtaatcctaactaaggataatctggccaagcgcaattggcatggagacatatcttgttgcttctgtcataaaccaaagacaattatgcatctgttttttcgaatgtcgtttcactcgtatggtttggtgtataatttatttagccttcgggatacgtgcaccttctagtgtctctaatatgtttggtagcttgttagaggggcttaatcataatattagaaacattgtcttgttaggagcggcaagtatctattaggctctttggttaaccagaaatgattttgtttttgagagaaaaacaacattttccccgttgcaggttatgtatgccacttcccactgctccgtacatgggcggtgctgcggagggcggatcagtaagctacgattgtgcaggctacgtgtttcttggagcaggtggccaaggactttttccgaggatcatgggtgttaatctagtggtcggattggttgtcactagagtgtgtgtgctacttttgtttaggttgtgtgctccttgatgagaagagaccggaagatatttcaattcttt

SEQ ID NO: 99595 - DNA, 641 bp, Zea Mays
cgcgcccattgatccgtcgtgggaagtctagcgccaattcgacctccgcgttcggtgagctctcgattctttaccctcgccgtattcccttacctagctaatgtcgcgccatagttaattgtgggcgaattgggcacgaatttggcctttgtgcggggaatgtcgttcgggcgccgcccatatcgtggtcgggggtgttcggctgcgtggcggtcggcgaaatcattcccctgtgttctccttgagttccgtttatggcaagactagtttgatttgggtttggggccgcgaacctcgtcggccatatggcgcggccgtgggcattccctgccagagggtgctcggctcaccgggagagcgaaagaaaggagaaagcaccagagccgttgatctcaggatgaacggcccagggtcagataggatttggaccgtgggatggttgttgtgcggcttagatcaaacggtagtatacctccttcgtgcattagatcgtgaccatcgatttcgtgatcaacgatcctcggcgcgtaccggttcattaaagactagattcaatccaggccagtgaatcctgatcgtgcggcccacagtgcacgataccccttcggtcgtccaaatttacaaaataaaccccgggcttg

SEQ ID NO: 99596 - DNA, 723 bp, Zea Mays
cgatcagaaacaatggacttaggtaccccatgaagcctgattacttccttcatatacaaggggaccaaatctgaagctgaatttgtggtcttcatgggaataaaatgcacagacttagtcaagcgatccactaccacccaaatagcatctctgtcccgaggagaacgaggtaaacccaccacaaaatccatggtgatatgctcccatttccactccggaatttccaatagcttcagtaaacctgcaggccgcttatgctcggccttcacgcactgacatacttcacatgcggccacatacttagaaacatcaaccttcatccgcttccaccagaagttttgcttcagatctcagtacatcttggtttcgccagggtgaatggtgtaaggcgttttatgagcttctctcaatatatccatcttcacctctgatttctgaggcacacaaaggcgacccctgaaacgaaccaaatcattctcatcgatggagaactctcagggtttaccatcgccaaccctctttcgagcttcctgcaataaatgatcctactgctgagccgcacgcactttctccatgagggaagattgaataagcatacaagtctcctcactagcggtgccaacatagcacaagacgatccccaaacagtccagatcagcaatcaactacaaggccacttttggaaccccggacctgctaaggccatcagccaccacatttgcc

SEQ ID NO: 99597 - DNA, 573 bp, Zea Mays
ggcgtagtcgtatcatcctcctccccttgaaaaggagtcgtcctcgactctgaaatgtcttcactcgtatatagtaagaggtcagcaacattgaacatgttgctcacgccatagcttggtggaagatctatcttgtatgcattatcattgatcttggcaagaatatgaaatggaccatcccctcgtggcatcaatttggatttgcgctgatgaggaaaatgctccttgcgcaagtgaatccaaaccaagtccctcggttcaaataacactttcttcctatgcttgttcatgcttgcagccttgcgcactgctttgagctcaattgcttccttggtcttctcatgtatcttttttatgtatgcagcacacttggaagcttccatattggttctttcctgcaatggaaggggcaacaaatctatcggagcaataggtttgaacccatatacaatttcgaaggggcataaattagttgtagaatgtactgccctgttataagcaaactccacgtgtggcaaacattcctcccaatctttcaagttcttttttaccattgttcgcaacaacattgac

SEQ ID NO: 99598 - DNA, 512 bp, Zea Mays
gatttaaggctataaatctcagttatacattgctcaaccagatgttgacacattgctctctttgtcgttgaacgacatgaagcgaactttgagataaatagctagtaccctagcaacacgaagttgcgagtacattgaaaggttactctgagaagattttcactatgttggtgtgaaaaaaaacattgtgtgttcccgtcgaaccactttacttgtcctgtctaggacctctatgcttgtgttgcatacatctctcagaattgtaaatacttatagtcgctgcattgactcgggatagtcctttgataagtctggtatacactgtaagctaaatggtaaaggtcggtcctaaatggataaatatcttgggtttatgtagccgaactacatttgaattccacccttggacatgcttatcgttatctacctccgatctaccagaagtgagaagagtagacaaataactatgaaatctcactcaccacagagcttgaagctaaattagacattaa

SEQ ID NO: 99599 - DNA, 574 bp, Zea Mays
ctactaacagagcaatcgacttaagtcggcagtaacttaaggtggtgtaacatgctcacgcttacttgattcggggtgaccactataccccactaacggagcaatcgacttaagtcagcagtgacttaaggtggtgtaacatgcaaacgcttacttgactcgaggtgaccactataccctactaacggagcaatcggcttaagtcggcaatgacttaaggcggtgtaacatgctcacgcttccttgactcggggtgaccactataccctactaacggagcaatcggcttaagtcggcagtaacttaaggcggtgtaacatgctcacacttacttaactcggggtgaccactataccctacttacggagcggtcggtttaagttggtaataacttaaaatggcacggcacattcgcgtttacctaatccaacacaagcacgtttgcaattactcatcttagggcgacctctatgccccgcaaaaaaaatgttatactgcatttacttctgcgattgtagataccgttgtattctgaaaaacgggaaaacaatagcggcattcagtactaaaaaag

SEQ ID NO: 99600 - DNA, 652 bp, Zea Mays
gaggattgtacgtttctcgaccatgaccacttgctcaatgggtcaataattacaaaattatggtgcccctagcccaaataagcaaatgaatgatacatgtatatgggttcatcgccgcactacccatgtttgaacatgaaaatatatcggtgatgaatagattggtgaaagtaccatgacatcactggatgaacatgcgacacttgtcgcgtcgccttttaggtcgttttattaggccgtggttcctttgcgggtgactagagttgctttgttggtcgaccacaagggacaaccttttcaaaagcagggacaactttaactagtcgaccaaatgttttagatgaattttgctttgacgtacctgtttatggttgtcgacgcttgatggtgcgtggacgttgtggtctctgccggactgtccgcacgcaggcatcggactgttcgtgatacgctggacatggaactttaatcggttgaccaatcacgcttgcccccggcgcctccggtcttgttagtccttttgtttggagccttctgagtaattactcctttttacatttttgacgtgtgaggtcgggcaataataatattttttcctttgcctttatcggtcgtattcggccaaaccaagactttgttatccgtcagctcc

SEQ ID NO: 99601 - DNA, 637 bp, Zea Mays
ggctattctactgagtggcgcctccttttcataggggcccctcttccgccttattcccggcggaagaggagttacacgcacgaccggtacacgatctccgtccacgcgcctctgctagagtcgtgccgactttcccggtggtcagcgaatcttcataaaatttgcacgtcctctgcatgcgcggagcgtggcccaggagtcttcacgcccacacaaccgtcttccttgctcgctcccagttgcgcctaatgggtgtgcttgtctttttcagtaaacagttccatgagttcaaatggcgtcatgatgcgaataactgacctttgatgtcgtgtttgctagaaatgtgccgtttcttggatatcaaagcgacgccttgattacttgtgatgatacgacgtacgtccggagacgaaggggcaaaccctccttttaataaatatatgggagtccctggtgttgccttcatcactcgtttcgttctcatttccttgaagcttcccccctttcgccaaagagagaaaaccccctcacccaccgccgtggccaacccaagtaagtgcaagagagcacccacgtcgtccttcgagtcctttgggtctcgaattactttgatgaggagcactccgggtccgacaat

SEQ ID NO: 99602 - DNA, 319 bp, Zea Mays
gccggactttggttccctctgaacaaaatgttggttgaagttctgaaaacttttgaaatctatcttcaccaacttacccccgaagctattgttaaagtagaggtttttatatggaccatgaggagccaaggattagagccagatgccaggtgtttctgcaatatgcacgagctattatatcagacgaaggcaactgggaaagagcaatatcacaacaattttggctgctacagcttcgtatatcgcgccgaggccagctatcctgtgctgacattttggaaaaagtggtcaggctcctggatgcaagaatggttttatg

SEQ ID NO: 99603 - DNA, 759 bp, Zea Mays
atttagagtaccatcaaaacattgatattcttctaatacctgttggacaaccagctgagaatcaccaaatgccttcacatgttttactcccatataatttaaaagctccaagccgaacaaaagggcctcattttcggcttgattgttagtgcaataagttttcaatcggctagagaagtcgaaggagacaatacttggtgaaacaagcacgatgccaattccttgcccttcattgcaaaccgatccatcaaaatataaagtacagggagtaacagtgaggtatgatatgtctagtttatgagtatcattgatccgttgttctacaataaaatctgctacgacctggcctttcatagatttcaatggtttataggccaagtcatactctataagtgcataagcccatttaccaatcctaccgctcataatcgggttttgcaacatgtatttaatcacatcgttttgactggcaacattgtaatgactagacagtaaataacatctacacttggtgcatgcataaaataggcataagcataacttttcaataaaagtgtaccttgtttcagcatccaccagcctccgacttaggtaggtcaccacatgctcctttcctctagtcacttgcgtcagaacagccccaataaccttatcttcagttgcaatgtacaatctgaatgatactcctacttgtggtgcttttaatatgggagctgaagacaaatactttctgatgagatcaaacgcttcctgttattc

SEQ ID NO: 99604 - DNA, 338 bp, Zea Mays
attgaaccctacttctgtaagcatgctttaacctaaactagtgccctagattaactcgaccacatacaactacctaaccatatgcgactaccttaaccatcagatagttgcataacccctctgtgttaacttgacagagattctgacctatccacactatataattcatcctatctcaagggattctaacacatattaatattacatattctaccctggtagatttatctaacttaaactaagtttaatctagttgtatccaatctaaccttgaccctacctaattttacatgatctaatctaaaggaagctcgattatgccatagtacactcattcc

SEQ ID NO: 99605 - DNA, 595 bp, Zea Mays
tggcaggcagacttacactggtaaattctaccctatcagccctgccgacttacaccatgtgcattgtgaaactacctgtctcagtcatcaacaccattgatcgtgcaagaagagattgtctgtggaaaggaaatgatgtcaacacaaatcgcaggccgatgatttcctgggataagatcatcactcccaagaacaaaggtggcttgggatcaccaatctcagattgcagaatcaggccctcctcatgaaacatctacacaagttttatgcgaggatggatattccatgggttcacttaatttggaacactcattattgctctgaacagattcctcatctctcctcagaaaggtgatccttttggtggaaggacatcgtaaggtttgcagatcactacagggggattgcttctctgatggctggtgatggtaaatcttttgctctttggcaagatgtttggaataatacgttgttcaaaatggctttccctagtctgtattcattcgctaagaggaagaactgttcactggccaagtttctacagaacggtcacctccttaataattttcatactccgttgtcagatgaagctaat

SEQ ID NO: 99606 - DNA, 372 bp, Zea Mays
gattagtcagagaccctcttaacaagatgctattgggcagaggccttgaatattgctacccaactgctcaaccgccttccctctaaggcggtgagtcaccccacctcctatttcgccttgtatggcacaaacccctcctatgctcaccttcgagtctttggttgtacctgctatcccaacacctccaccactactccccacaagctctcccaccactccactcaatgtcttttccttggttactcccttgaccacaaggggtactgatgccttgacatcttcacccacagcatcatcatctctcgtcatgttgtctttgatgaggacgttttccctcttggtgactcctcctccccaccccctgaccttgat

SEQ ID NO: 99607 - DNA, 882 bp, Zea Mays
gttgtagtaactgtggatctatcagatgtttcatgtttgcataaggaaataggatagttcccccctcatgtgtttaggcattataaaatggattggattggtcaaaggactattaacacatgaacatcggctgtcgtatgtgtcccattcaattcgattcgcggtgtggcattatcccttcaagttctgatggcgagtttgagtttgcacttgcaattagtggttttagatcttcgtttgttccaatcaacgaactaaatcacttcgtttctgcattcgggtggttgtaatcatggaggtctttttagattacttcagttcagttactgcatgcttattagtatggacgcgacaatagtttcatgttctacaagtacacgtttgttttcaatttctggaaatcacttggttggttcaattagattttttgcttgcaatggattttgggttccatttctttggcgaatgaaacactgctgtcaattttcgaatgactgtgcggggttggaggtagaggtgaggtcattggtatgtgctcatttctgctctataatttctctccctatcactctaggactctgtttctgtttctactttgatcatggccaccaactgtcatgattgaatggttcactttgtatgtgttttgaaacgagtgtaacatttggctcctgtttccattgtttcttaccggtcatacggttcttgttttcgaaattatagttctgagatatatgacacgagaagtcactctatcacatttatctggccactgaggatagtgttaagtgataagtcaaaccctaaactcagaggtaaaccttaccatggaacacgtcatttgttttttcagtttctaattactattggaatgctcttcag

SEQ ID NO: 99608 - DNA, 289 bp, Zea Mays
gtaattcatcaccaatcttgctgtgaacttgtaatccaaaaattcgaagttataatatatgcgaacccatatttccagcacatgaactaatattttacaatttgtatgtgcgaaaagccccaatctattgctgtttacgtcatttagcttaatcaatgactactgtaatttgcttactgtttgatacacctgcctggaaaagctggtgtcattaccattccaagcatgacttggtcaactgatgaatatcttaaccgaaatgtgatgaatagtcaaatactcaaatccc

SEQ ID NO: 99609 - DNA, 438 bp, Zea Mays
tcttttttccttggccccagtattggccaaaggatcttcatagtctgggtattcaaaccctaaggcatccataaccctattgagtcgaagtttccctcagcctacgaaagcagttcacatgtcttcatgctccctaggaagatagttaccacacatctcgttgcatttctcttcaacaaacttcaaccatccagctgaaggagttttatatgtggactggtctttgaaatcaaaagctaaggtaataagtccttcgtcattgcgcttcacttcctttggcaacttccacccagtctgtgttggatatatgttgtatgcaagagcttcttgaatcagatcttgggactcaatcttcttgataaccacgctgaaagccttgaagcactcgttagcggcttcactcattttgcacttcgacctcttcagagcaaagcttac

SEQ ID NO: 99610 - DNA, 275 bp, Zea Mays
caaactaggaattatgaagtatttaaaatagccaaaacctagtctcttggaattttaggaattatttgaagattccaaaaatcaccaaactttttggataagcctaatatggtatttagaacccatgagtgaagttagacatgatttggacaatgtttgatacctaaaccccaaaaccctaatcttctaagtagtatctgccctatgaaataaaatactaacttcaaaaacctaagtctcctagagtaccatgaaggaaaattgtattcaagata

SEQ ID NO: 99611 - DNA, 513 bp, Zea Mays
attaagtcaatagtgtagaccacggcactaccatgacttcaccctcctcagacccccaccggtagatatgtggcccgtcgcggcctctattggtcattccggcctcgaggcccaagcatggcggccttgcatcggaggcccaagcccaacacaactagcttcagttcggtacacctggtagcacgacagctcgacaacgattagtaacaaaggcatgcacgtaaaagcggcagttgagtttaagcgcagaaacaaccccagccccaaccagtgtgtggttggcatcaagtctcccgggcagcgcaatggcttttttattgcctctcacttacaagtacaattgtagtatctgttcatgtacgcacacactcacaccaaaactcacatcaacacacccctatcgtacacaagcagaccatgactccaccctccccaggcccgcgcacgctcgccaacacccgcgtcacctcccgtgccctccgcacgacacgccccagccagcctcccgcttct

SEQ ID NO: 99612 - DNA, 465 bp, Zea Mays
cctatcctagctttgcctaagagcggtaagcgtttcacagtttatacggatgcttcgcgtattggtcttggttgtgtgctgatgcaggaaggcagagtgattgcttatggctcaaggcagttgaggaagcatgaggggaattatccaactcatgatctagaattggccgcagttgtttttgctcttaagtcgtggaggcattacctttatggcgagacttgtgacattttcaccgatcacaaaagtctcaagtatatttttactcagaaggagctgaatttgaggcagcgtaggtggctggaattgattaaagattatgatttgtccattcattatcacctagggaaggctaatgtggtggctgatgcccttagcaggtctggggttccgaaggtggccttgccgttgatcgctgatctggaccgtgtggggatcgctttgagttatgtcggcaccgctagcaag

SEQ ID NO: 99613 - DNA, 524 bp, Zea Mays
cgagagcgtaagagtgttagagtgtacgacgagaatagcgggagagagaagacttctgtcatgtatggggcagcgctgtggcttctagcaggcgaccgtaacccctatgttgatgagggggaagacgaagaggcgtctgctacggacagtctaaggacttctccaacgatgcagcgtatcgatcccccaaccccaaataccgtgtatgatgtccacccccacatggtttaatggctctttccatccgctccccctacacggtccaatggctctcccctgtcctctcccccaccgctcgtgagtcctttacttacccatatgtggagtcctccacgactccccgtttcaaatcattcctcgacgttggtcgttgttcgtggttgctggtaagtcaccgagtagggaggcagaggtggttcggagtatgcctgcaacgtggcggtgaggaaaggggtgggtccatcagagtagaggcgggttggcatcgtcaaattagggagagtattgtatgcggtggtcaagcg

SEQ ID NO: 99614 - DNA, 610 bp, Zea Mays
cggacggtccgcatataaacacggacggtccgggccaatgtccggacagtccgcgcatgacctttttgaggaggattgttacctgaatcctcacccgtcctagcaacacttcccatcgcactatgcaatgcatcaacccattaattcgagatctagagcccaggaaaactttccggccccacctagaaggccggaaaggaacgatcaaacatatgaaccatatagggcaagtggcaatgcaccacgtagctcaaaccaatggggggaaagacaacatgctaatatccagccaaccccatctatgtttgaccagagagccggtggtctcgcaccggctgccattgatatagtgagggaagaaatagccggggcgtttcgagataagctcggagtaagcatggtccctggggggcaatcatatcggataccttatgacagccgatttgatcatcacccatacccacagggaaccaggatacccgaattcacgaaattttcaggtggtcaaggaaagaacacacgcgaacacatgggccagtttttagcacaattaggagagttggccgacacagaggcatttcacgtacgtttattttcattatctctaacg

SEQ ID NO: 99615 - DNA, 341 bp, Zea Mays
tggtggtggaaaggcgcatcgatggtgatttgatagtttcttaatttttgttagtatttttaactaaaatttacatgttttagattttgaggctactctatgtttatcgggtggccggcttgagagatgaccggtcatagagaggatcttcctctcaaatttcaggtggtactagtagccgacgacagtgtcgcacagagcaagaccttgtcattgaaaatctattggagcaactgagggtgcaacaagttgtacatgagttagtaaaaggagtactttgctatatataatttctagcagcaagagtacaacgctaactacgacgcccaataacattggat

SEQ ID NO: 99616 - DNA, 442 bp, Zea Mays
gtgatagataacgtcgggtcaaggtgaaaatatccggggaggggtgaaccttgtcactggccggaccggccatcgtgtcccgtcgcggtcagtcgcgttggcatcaccggagctcaccatttgtccgacggtgacacgcaacgatctttactccgcatcataagggtcttggcaagcgaccgattatcatccctggactaattccctcccgcacgccatggtgagtcagccaccataaaatatcctggctgcggtaaccttgatctcaatccaaaattcgtgataagcttggctagagtctataaattggaagcaccccctatttctcctaatcgttacgaactcagtgaacaactccttgcccccaatcgtccaccgtagcagcctaatttggaattccccccaaatctattctccgtgccgccgtgagcacccccttcgt

SEQ ID NO: 99617 - DNA, 797 bp, Zea Mays
ccgcgatcctcatccgtcgccggccagtcgcctataaattgagtgcgggcactgcgtcgtcaccgcattccgcaaaatccgcagctaagcacttgactcgagctcaccagaaatacccgcgcagccccaattccctctcttcttcgttcttgctccgccgtgaagaacttcctcgtagccagcgttcctctggtcagtaactctcaaattgctccctgttttagttaatccttgatctcctattgcccttagatgtggcaatttagagtttggccgaagctccttaccggaacgcacctatgcgctgtcaaacaccgccgtaaccccccccccccaccgtcgacccgttcttcggggcttgttctacccaaatcaaagaatgttcgtagactctagtgcacccatgaacctttccccagccttaattcgatcgtcctcgccgtcgtttgctcggaatgcgttcaacctcttacccatccgctcggtcaccgtggaccgattgattcgtagtcccaacaataaaattgatttgggggaaatgatccgtaggagttcaattgtgtttctgtcgctcgggagctccagccgtcgcgtcgtccggccggtctagctcgccggagctcagctcccagcacggttcgtcgctgtggactcagactgagaaaggttagaagcacggggatgtttctgcaaactgtcagtgaaacgttaaacagtcgcctggggttcttaacggataaccgaaactgcaagggccctgttgcaaaaactccacggcgggcgcgggcgcgcgcggg

SEQ ID NO: 99618 - DNA, 484 bp, Zea Mays
ggttttttgaattgtttctcaaatttaaagcgataggggagtcgtacaagctcatgttttttcccttctttcttcttctttggcatcccccaaccgctggaagttggaaatgttttgtttgccagatattcttgtactaagttcctagtactaatctcgacgaccaccactctaaattcaacttcggctacatggcatggggagccaagttgcatatggcacaagggtctggtcattctgaagcttaatttcatgggcctcatgaccatggtcaccaatttttcccttctcttctcatccgctttcacataaaaccattcatttgtccacccagttggccatttagtacgatagccaattacaggagcctttgtatcttttctatatgcaaagttgtagcatccaaagttcttatgaagaccatctgctctggcattcgtctgatagtgcagttcatgcacctgacaaaaagcttcggcatttg

SEQ ID NO: 99619 - DNA, 502 bp, Zea Mays
cccttttgcgaggaaaacactttcatattgatctacaggaaactataaaaatcagttgtttcatgccgagttgtgagttggtgtcagataaggaaccacactaggcagggtgacaccttcgattggcacaacacgagttaatataggtgtgcttactgaccaatccacacaggggttgctgccatggtctggctgcggtatgtggttggctaattagccaccaagaccatatacagactcaaatcgagtcaaggcgcggacccagtaaaagacatgtacacccaataaaatttgcaaaacaaaatcgatgttggtaggcataatacatgtacatgctggtaattagattcgaaccgaatacaaatagctgaagttagggtttgagtgattggtttcagcatagcatgaagggaaggggtggatgtactcgtcgccggcgaagggtcccgaagaattcctgacggagtgtcctacgaagactcttagggcggaggcggcggcg

SEQ ID NO: 99620 - DNA, 378 bp, Zea Mays
cagattgccagtggaatcaatataggattgaggttcttcttgtgtaggagcagctttcatcaaacccttaacatttaagccctggcgtttgagaagagcttcacaaagaacacaattgatcaaattgtgaagggtgtaaagcatttcataaattttaaaggcggaaaactgaacctagaaaatttgtaaatagcaacctgcaactttgcctcttccatcctccgatgacaacttcaactcaggtgtctgtggccactccttaaattttgacttgaacgtaacagtctcaaacccttcaatcactttgattatatgtgttcttgttcggtttgaatcagagagcaatttctacataggcaattaaagtattaaacaaat

SEQ ID NO: 99621 - DNA, 2837 bp, Zea Mays
acggcatggtgctgtcgccgtccacgtattgcgggatggtggtgttgctgtgcgcccacggggaggtggattgcgcgctcagggtgttcgacataatgaccaatagggggtgtcaggtagacgatcgcatttgcagctcgatcgtttctgggttctccagaaccggaaaggccggagcagggctgcatttctacgacaaggtgaagcgtcagttcagtggatttgatccaggccttgtgacattgacatcagtcgtccatgctcttgggttggaggggagaactggtgagatggcagagcttatgcgggagatggagtgtaaaggcatgaatgctgatgctgtgttttacggcagcatggttcatggatacatgagtcgtgggttcttgatggaaggtcttcgggagcatcgatccatgctagggaaggggatcacagctgatgtaattaactatactactgttattgatggactctgcagagaaggtagtgtggagaaagtaacaggtttcttggatgagatggtgcgagtggatgctaagccgaatttgattacttatacatcactggttggtggcttttgtaagagagacaggtgggaagatgctttctctatcgtgaggaaactggaacaaacaggcatggtggtggacgagtatgtatattcgattttgattgacagtttgtgcaaaatggacgatttagacagggctttctctttactcacagagatggagaataagggaataaaagctagcatcataacatacaacgcgataataaacggtttgtgtaaagctggtcactgtgaaaaggctgttgaaatttctgaaggtgttgctgctgataatttcacatatagcacactgttacatggttacattaacagaggtgacataactggtgttatggcaatgaaggataggctcgaaggtagtggtatttctatggatgttgtcacatgcaatgttcttatcaaagcattgtttatgattaacaaagtgaatgatgcctggagcttgtttcataaaatgcctgagattggcttaaggcctaatactatcacctaccatacaatcatagacaaattgtgtaaagctgagcaagttgacaaggcactggaattgtttgatgaatacaaaaaagatgcaggattctccagtgcagttgttcatgagtgcctgattagagcactgtgtaatggaggaaaagttaacatggccgaccaaatattttatgatcttgttcagaaaaaaataaggcctaatttctttaactgcaggaagttgattcatgcacacttcaaaggacacggtgaacatagtgtgctggatttcatttgtaaggttggtgaactagatattgacttattttcatctgtttgcaattatgcttctgcattcttaagcaagagaaattgttgtcaagcagcaatggatgcttacaagttactcagaatacaagccattgctgtaagtagtaaaacatgctgcaagctgctcaagagtttacaccgaaatggaaatgaagaggtcatacaaccattgctatgtgatttcattaaaatccatggcctgcttgatctgacaatgataaatatgctgtcctgttatctcagcgaaaaagatattagcaaaactatttggttttctaattacatggacaaaggtagtgttcctgtcagtgttctgagaggagctgtctttgctctaaagaagcaaggtgaagttctggacgcatgtaactttttgaaggtagctgaacaaagtgggttttcagtagatctaactatgtattccatagtggtggatggcctttgtaagggtgggtatcttgaaaaagcgctagacctttgtgaaggcatgaaaaaagagggatttcaacctaacattgtcattcataactcagttctcagtggtttgtgtcatcaaggatgccttactgaagctttcaggctctttgactacttagaaaacagcaagatgcttccaacaataatcacctatactattcttataggtgctttgtgtagagaaggtttattagatgatgcagatcagttattccaaaaaatgtccaccaaaggtatcaaacccactacccgtgtttacaacttgctgataagtggtcattgtaactttggattaactggaaaggcccttgagcttatgtctcatatggaggaactctttatacttccagattgttttacacttggtgcaattatcaatggactttgtctgaaaggtgagactgaagctgcattaagattctttaatgaataccgccataggaatatagatcctgattttgttggtttcatgagccttatcaaaggactctatgcaaaaggaaggatggaagaatccaggggcatcttgagggagatgtttcagtgcaaagaagtcacggagttaataaacagtgttggagataagattcaggcagagtcccttgttgatctcctatcttctgcatgtgatcaggggaggattgatgagattgtaacaatcctaaatgaagtgggactcatgcttttatcctcttcaaattctatcagctataatgcgcttgcgcatataaaaaaggtacagaaaactgaggatgcttatggttccatgtcaaattcaggacaagcaagtccagtcgcttatgatatttcaagcaatagtctttgtaggagttctgatggaaaagttcaatccatgatagatggagatgatagtttatcaaaatcgagtggtgacactgatattgactaccgaaatttgcttgggaagtctttcaatgatgattttgagtcatattatgctggtattgcttcactttgctcgaaa

SEQ ID NO: 99622 - DNA, 461 bp, Zea Mays
tgagcttctagttggcacgagagaccagggatgtttggacgtatggttgaagcttgacaaacaccaaatcccccacttggaatgtgcgatcggaacgacgcttgtccgcttgatgcttcatatgttgtttggacggtgtagatgttgctgcaataacagatggatacgctgtttgtcttggatgaatgcagccaaatcagacgaagaattctccaatgtcggaataccgaaatgccgtgggacatagtcgtagagagcttcaaatggcgatctgtcaatagaggaatggtggctagtattataccaaaactctgctgaagctatccaattagcccacttggaaggacaagagtgtacaaagcatcttaggtacgtctcgaggcattgattcacgcgctcggtctgcccgtccgattgaggatggtatgcactgctcatgtggagactgaccccggctagct

SEQ ID NO: 99623 - DNA, 352 bp, Zea Mays
tggcgggatgcacccgcctaatcatgtgaactaggggagcctagggattaacctgattagttggatgaacgcgataacacaagggttagagtggttcggaccggcaaaacgtaatcccctacatccattgtgagttttattgcatgggggacgaaagtctatgtgtttccaagtgtcttgccccttgaaacgttatgtgccctcccttttatagccaaggggcacatacaagaaagttgagccccgacaggcaagcccaggaatacagtaataaaaacatactatatgaaataattaatgtcctcgacgtacatagatcttctcttggtcgtcgtgcgaatttcttcaccag

SEQ ID NO: 99624 - DNA, 558 bp, Zea Mays
tacaaaaaggtcttgcggtcactcccaaaagaaggatggcaagtgtactagatgtgctagaaacggtgaaggcttcaagctctactccagggaaaattgccaaggcttcgaaaatgcaaatcgaagctaaaacaaaactgaccgaagtcgaagctgcaatgagccaggctagtgccgaagctgggccttcagagcctgctaagaaaaaaccctcggaaattgcagagaaggcagcggaggaagaggctatagaacagactttgcctggaaaagttgccgctcctgctcccgaagcaccttccgaagaccttgattatgtcattcgacatgcttcgggaaaaagattatctgaggaagaaatttttgaagctaaacactatgcccgagaactgaagtacccaaaaggggccttagtgtttaatggtacggatgaagatgatttcttgtattgtctcccggacaacaaagaattatccgtctaccgggagatggccagaagtatgggttttccgaagctcgaagctggcctctgtgccatgacgaaggacgatcttgcag

SEQ ID NO: 99625 - DNA, 454 bp, Zea Mays
gtcggttcatgtggttgttgtggaaccatgcaaaccgactggcaataagtgtcggctcctcattcccaaagcactaaacctactcctctaaaataagtaactaggaggacaaagcaaatagagcatgtgaagagatagaggaagaaccacctctagagagtagggttgtggtgggtgcaccagggttcttaatcttcgtctgagtctggtggtcaatcttgttgaacttgagcttgctaaaagctcaaccacagtgagggtcttatagttgtgtgattctatgatcgccaagacattcaccttccaaaccctccaatctggagcatgtattaacttgtgtgctctctcatggttgtgataaggcaactatgccttttttgcgcgcatcttgttgacaatcaactagaagcaagaaaatatagaatcaatggtctccctaatgaattgcataaag

SEQ ID NO: 99626 - DNA, 695 bp, Zea Mays
tctagagttcaggtgttgaaaaggaaggtcgagaaggcaaatcaaagatcatgtaatcaaactcatataagattccattatcagaaagaatcctattcagtacctcatcagttgtgttggagatatgatatgaccaaacgtttctgaacatgcagccagagaaaggtaagacacttgctgggtcaggaaggacaggtttaactttgtatatgcatgcagacaatcgtttttttagcggaatactgcatcaagttttatgaacctgtaattcatgaaatggagggaagacagtacatacatgtttttggagatagaacagaatggcattttcaatgtgcaatacaatcagagtttaggttctggtgacaaacgtccagagagaccgtgagtacagtaaaaaaaatctactactgtctttagatagagcagtaacatatgtttgcataaatcatgaaagtacatatcaacaaacaactataagcactgcccaatctggtgaagtattgtatggataatgacataatgtgtagtgagtgttcgtcaggcaatgaaagatgcttgatcgcatcagagaccatatcttgttcaaaggtaagtatattattagacatggagtataatgagctcattaagaatattgtcaatctcgtccatctataaaatcatcgctcgctcaccacaagtgttacggatca

SEQ ID NO: 99627 - DNA, 380 bp, Zea Mays
gtccatgagctaggacttgtcgagctacctctacttgattgtctctatgcctggactaacaaacgtcgcactcaaactcttgcaagacttgatcgtgccttcacaaatgaggacatcaactcttcatatccatctgcctcacttaactcttcgttcagaaccatgtttggccataaatccatttttgcaaccatggcaccacaatcccaaagtctatagtcatcctatttgaaaatgcttggctcaaaaaccaagactcccttatggccatactcccatcatggcaaactataaccaattttgttgatgtcgttgctcgcctagcaagctgcctcaaagaacaccagagctgcagcaaaggttggcgcctccactttttg

SEQ ID NO: 99628 - DNA, 332 bp, Zea Mays
gcagcatcgtgagtgcttcgatttccccacgtctctctctccctccttacttcaaccgcaggcaaaaccttagccgattagatcccgtgttgctcctccgccgcctgccgcctcactatggaaaaccactctgaaaccgagctccacctctgcgttcctccaccgcagaagctccacttcattcgcaccggtggagatcttcttcatgtttgttggggacgtagcagctagagatgggcaagggcgacgactgatgcggcggccgccgtgtcctcttcattgttcaccgcgacgacctcgtcaatgtcatcgtggaagaggctcaccgccta

SEQ ID NO: 99629 - DNA, 526 bp, Zea Mays
gtcgagtggaataccgcctcggcaggagaggatcaggagtagtgggccaggccttgccctattcctctttatcgacgttaattatcatccgcttgaacgttaagaacaatgttatcttttatcaaaactctgatttatgtaataactcaagggctttaatttgtggtctcatgtctattgcattttctttgagtctcaccatcgcgtgagctaatggaactcgatccttggtaagtggctttatcggactagacccgaagaattgacaggttattccaaattgaagtgtgtcgctgccttcaaggcgtgactcaggcacttaaactggaatattctggatggttctgccacagctagtaagcgaataccattacggggaagtcaataagtcatgaataccaacttttcaaaaagtgaaacttgcttagaaaccagtattggttagatcatcgggactataccgctagacctaggacgaaaggccttaaggatagtggggtagctaggtggctatgtaagtaggtca

SEQ ID NO: 99630 - DNA, 825 bp, Zea Mays
ggagagaggatctccctgcttgagtcctcttctatgcgtaatcagtttacccgggacaccattgagcaacacctgagtagtggaagaggctaataagccacatacaatgtctcgccagatatgtccaaaacccatttgctgcattacttcaattaggaagggccaagagacagagtcgaaagcattggttatgtccaacttgaaaaacagtcttggcatgttatgttgatggaacaaccttgaggtttgttgcactaacatgaagttgtcctggatgaaccttccttttataaaagtgctttgacttggggaaaccatcgcattcaatctttttgccaaccgattagccagaattttagtaatcagctttgcaaaactgtgcacaaggctgattggtcgaaagtccttaacctgatcagccccatctgtttttggaatcaatgtaatgtatgccgtgttgagtttactgaaatgatcaaacttcctgctccaaatagcagccaaggcagccataatatcatcttttatagtgctccagcagaccttatagaaccgtctagtgaacccatctggaccaggggccttatctgaagggagctcactgatggtttcccaaacctcatgctcagagaaaggagagtcaaggtctgaaagcgcatgtcttggcagaccaagggcttcaagatcgattgtcctttctctgatcccattctgaccaatgagagtggagtagaagtcatccaccgccgaagctttgtcagtatggtttacaaggatgcgatctccatccaccaatttagtgaccagattcttccttttgcgatg

SEQ ID NO: 99631 - DNA, 458 bp, Zea Mays
tggcatcataggagaataggcgatgcttgttgcgtcgcctatcgggccattttattcgggcgttttttagcgggtgaccgaggtttctttgttggccgatcacatagaatgaccttcttgctagcatatttggagagcaactgatcaaaagtaggtctggctttgaccagccgaccatgtgtgctttgcccttgcatctctttccttgctttgtgtggaggctgacgcctctggccattggcggagtgtctggctaagtcagcctgaccgttcacatgagcaccgcgcgtaggtgctggacagtccttgatgctcgagctagggagttttgctcggctgctcgattgagcatgtcccctggtgcctccggacttgttagtctttctgtctggagctttccgagaaatctcttcttgtgatttattcgacgtgcgaagatcaccagtgatgatgttttg

SEQ ID NO: 99632 - DNA, 484 bp, Zea Mays
gtcggatgggggtccgcatctacggcccgcaacacttcccggtaaacaacattccgagtctgcgacccgcaggaaccatcaagattttcaatcaaaattctaagaccacttctagatgtaacccttgaaacagcgacgtaaagctagccatgcgtaaacacaggtttgtcaaggtacaggccaaccgttgagagggtctgaccctggctcttattaatcgtcatggcatagcatattcgtactggaaattgttttctttgcagcgtgaagggccatttgacgtcagtagtgttaagcgcaatacttggtaggaaaacctcttcaccgactccggagggcgttaacacgatgcatttaagaacacgatggccgatctcagttacaagcatccttgttccattacaaagtcctgcagtctggttcaagttacgtagcagcatgactgttacgcctctttttagcacgagtttgtggcaggggaaat

SEQ ID NO: 99633 - DNA, 326 bp, Zea Mays
gttcaaatagggggatagagttcctcgctgatctaatagctatgggtaaccaggatgtgactatagatgtcatcctagggatgaattggctaaccaagtatcaagccagtcttagctataacaagagaacagtgaagttagtgtccttattaggagaggaagtgttagtggagttggtcttgtctagactaaggaaaggaagatgtcaccaagtcaccgcccatattgaggaaattgaaccatcagaaactatcaacgtagtatcagaatttctagacgtgtttctcgaggagttaccaggcatgccccctgcgaggaaagttgaa

SEQ ID NO: 99634 - DNA, 359 bp, Zea Mays
ctacaactctcccccagctaggaaggacccttcaaggtaacgggaatacaccgacccgagggtgaccgtctagctacgactaaaggagtgcctccccttggtgctggagcatctctgtaagttctatccataggagcaagtctgaggggtcgagtttgtttcccttttgtaactaggtaacgcacacgtgtgcgccaacccggtgtggtccgcccctataaacccggcctgttggtctgcacccatgcatgataagttataaaggaaagaattaccccctcagatgtgcccctatgatagtttcatcttactgctccatggtcttaccttgcagtttttcagatattattttatctaac

SEQ ID NO: 99635 - DNA, 643 bp, Zea Mays
gaccctctcctgaagacattgaggctctggttgctcctctttgtgatcttcccaatgatgagaggcaagttcatttagagatgctggcgagtccagatgatgcagaaatagatgttgtactcaatatgttagctggagaatcttctgactcggcccctgctgaaccaatggctgttacggttatacaagaacttgacaaaacagtggacacccgaaagtctgagggtattctcccaaagcgtcctcgccaagtcagccgcccaactgcgcctgttgaggagaagaagaataaaaagagacggcttcagcgactgtcatgcttggaccaggatgctagcccttctgctcctgtttgtgaagaagtaccagcagaggtctttactgaggttgatcccattggtggtgtacctattgaagctggccccaatgggtgtgaccgtgcaccagctgatcccaatgagtgtgaccttgttgaagctgaccccaatgggtgtaaccgtgcagaagctgatcccaatgggtgtaaccatgcagaagctaaccccaatgggtgtgaccgtgcaaaagctgatcccaatgggtgtgaccgtgccaaagctaaccctaatgggtgtgaccgtgcaccggctattgtccgtatttt

SEQ ID NO: 99636 - DNA, 1097 bp, Zea Mays
gggacccaatgctcggaaccgtctttcactggagtctgttgcgaggagttcatcgcgacaaaatcctttccccccaatttgcgctcatctcagaaaccgtccggccaagcttgccctcacccgtgctataaaagaattaaacccatggccgtcacctcgatctcgtagggcaccgatgcctcatagaagggaacacgcgctaccatgggagaggaatccgctgccaccgttgtttgctctgcgcaatcgctcggactttcacaggagtcctgagatcaccaccggatcaccaggaggatgctcgtgacctcaaccagcggaatcaatgtgttagctgctggctgggaagtaggaacttggaacacggcaagaagaattggacgaacagcacaaggaataggtaggagatagagttcaacttggaggacaagtatggagttcagttattacatttcctactcatccacacacatctgtgatatatttatataaggaaaacacaccactctaattcacccaattgggcccaaacaccttcatactcttcttcctgggcctcttggtctcctgatgcagcccaacatttcccccttctttgaaagctggttgtccccaaacagcagctcgaggaaactgttgacgcaattcagccacatcctcccaagtagctaattctgccggcatgtgagtccatttcaccaaaatttgagcacaagcagtagtacccctcgctactgtacgatgctgcaaaatcatttcaggaacattgaaagcaaaatcaccagtgggaagagtaggtgaagctttcagaccgacacccaacgccttcttcagttgcgaaacatgaaataccggatggaccttggacgtatctggcaacaacaacttgtaggccactgctcccacacgctgcaccacacgaaacggcccaaaaaacttgaaagctagcttctgatgcgcacgtggagccaccgaagactgcacatacggctgcagtttcaggaaaacccaatctcccacagcaaactccctttcagaacgtcgtttatctgcctgccttttcattcgtaatttggcacgttccaaatgttgacgca

SEQ ID NO: 99637 - DNA, 507 bp, Zea Mays
aaaggttctttaagagtttagatagtgtaatagtatgagactcatctagatgtattttgttgaaaagtggaatagtttttttagtgaagggaatcagggatagtaatttgaagcatatttggaaaccaaagcaacttttgcctcttgaatcttgaacaatataattggacaattcacctgttcaaccgacaagaagaaacatgctaacctgtatgttaccagatctagttaggactatgtgcctcatggcaatattgttacagtaaaaatagttttagaactgaaagtctggaaacatcatttgagttcagatactgtaatagtacaagcctgttctagatgtatagaggaatagtttttagagaaggaatagtaatgtgaagcatatatgggaacagaggcaccttgtgtctcttgaatattgatcaaaatgcaattcaacagctcgtcagttcaatgaacatgaagaaacatgcagacacatggtttttgttagtgtagaaaccc

SEQ ID NO: 99638 - DNA, 516 bp, Zea Mays
cacgctgattttttcatcagagacgctactatcgatgatgaaatgcagtgttttccgtcccacgcgctgatttcctgtctgctagccactgagccacaggcacaggccggccctcgggggagcctcggccccgggcgctggccacagaaggtccgaggttgccaaacacgcgtctcggaagttctgcagttacgtgtggctgacatctgggtccagactcaagttgagcccacgctgcccactacctaaacataagtgacccatctacggttagcacttgtttagacaaagaatactacagataattagagaggttaaaattcgcttgctatacaattttaaatagcaagggtattttaatcactccaatcctctccaatatgcttacttccgaaggattaaaggattcgctcaccacaagtatcatgcaccgggcgagaggtgagcttcctcaatcgcgtgtttcgacgccaaattgtttcgtcaaaattctgacactaacaacacagcaactaa

SEQ ID NO: 99639 - DNA, 503 bp, Zea Mays
aaaaaaccacgttacaaaatcaagcaagacggtaaaaactatagttacataaaattcaagttccatatctatcaatataacatacaagttcaaagaagcgaagcaaacatacaactaagttcgtcctgaccgaatcaagtcgtgcgtacgttgtcaaatatcgatctcctcgaagggtgggacaccgagaagaggcgggtcagatgatgtctccagctgagagccagggctcgctggttcgtcaagctcgccagttgtggtgtcaaggtcaggcaactttaggcgtcaggaaggaggcgacggtgttaagaatggagcacctggggggattggccccggcaggccgggatgtaagaagaaatgggacccgatggatagatgcgaggactagaccaaagaggatggaagttgagagaactgctcagggcaattttagcctatccaaaccttatttttatatactttacagtaggttaatattaggtataagaggttataaaaaa

SEQ ID NO: 99640 - DNA, 500 bp, Zea Mays
gaaagagcgaaagagctggatgcactaaatctaggcttgaaacagttcctggcttggaactgttcctatgctgccgtacgggccgagctgtttccaaatatatattatctattgctacttccttcacatatcattactttatgtgttcttgctggttacatttggcaccattgttggtaagacggtaccacccacagttttattgagaaaggcttttaaagatggttgttgttgtacaaattggaaaataaaactacactgacttaattttccttttcttcttgtgatttaggaagcttgattacgttgatggagtttgtcccaccaatgtcactgtaccgcataatctatgagctctctccaccttcatcatcgagacttttctcaaacttctccggtgtacacttgggagacttgagtgatcctaaaactgtaagagctcatatttgtgtatgttctataaaggatagatattataaatattgtgaatatagaaacgt

SEQ ID NO: 99641 - DNA, 1031 bp, Zea Mays
tcgctggttctctcgacctctctagtgctccctgccgtgtcgacccccactagcttcttcgagctttgccttgtcctccctctatgtcaccgttgcgcactctatcttagtcgtggctctcgacgtcaccaaggccgtcgctcaggatcgcgaacaagtggcgacccttgtctaggagcacgaacaccacgacggatggtcttgcctcctaggtagccaaggtcgagcgccacttttaggactcctcatttgtcgacccctctagtgcccccgtctccctacaggttcgacgtcgctgtcattgccccccttcacgctcaggcggacagtgtccaaaacatccggttgcttgtctccatcgtccttgattcgacgtccatacagtaagcccgctagagcgactaggcgctcctcatgctccatcactatgccctcaatgaccacatcctcgttaatgtcgcctccctactgcctccgtcttggcacttgatggacagcgtggtcctatcgtggatccttaacatgctcaccgttgagctttaggacatcatccatgagaggggcagaggggcaccgctctccattcctaggttgccctcgacgcctagttccttagcaacggggaagctcaggctctccacctcgacactgctttcctcctattcttctaagggacctatctgtcagcgagtactgccgtcagataaagggcattgcaggctcccttcatgaccttggcgagcccatccccggcaacaccactagggggctacattctgtccaaccacccccctagagctccttgtgaggctcctagctctaacggcagtcgccggcctcgcaagggtgaccgttggggcgatggatcctcccatggtggccccataggcaatgacaacggtccgatgtggtcatctttctacaacccctggattgggaccatctccatgtggccagccctggccatgggttcttcttcgtcatgcccccacattcagcagtcctaatgacaccctcctacggtgtcccac

SEQ ID NO: 99642 - DNA, 479 bp, Zea Mays
aaaagcttgccgagaagaatgaggattttgaaatggctaaagcaaaacaagaaataagtgaatggactagtgcaaggttgcaaaagaatgtagatgagcttcgggaattgaaggagaggtattacgagaatccttggattgtgctaaggagttgaaagatagttttgcaaaggtgggtgcatactcatctgagcaaaaatttaatagaggcgatcccgaaggaatcattgaatggatcggcgaagaagctgaagcttttgacgaaatacttagcgaccgtggggatttctgcgcctttgccggtgcgagaggggttgcggcaattttagagaaaactggttttgaacatgttaaagctgcaaccgagatggaaactgtcttctccgtagacaatacgaaggatccttcggctgaggctataatgatgggcaggaagttttattccaatgtatggatgaaaggcggccgcgaaatagccg

SEQ ID NO: 99643 - DNA, 496 bp, Zea Mays
cttttccaaaatctggaggtaaactgtgatcctctatccaaaatgatcttcttcggtacaccgtgttgagacacaatccaagccatatataactcagccaattgagatcacttataagtagtcttgacaggaatgaagtgagctactttagtcaatctatccacagtcacccatatagaatcataacctttctgggtgcaaggcaatccagtaacgaaatccataccaatctcttccaacttccactcgggtatctttagtggatgcggtagtccagctggcctttggtgttcagctttaactctttgacacgcatcgcacatagccacatgtgcagctacatctgtcttcaatccataccactagtatttctgcttcaaatcctgatatatcttggtactcccaggatgaatagaataatctgagtcatcagcttcctttagtatagtctcacgaaggctttcaatctctggaacacatatccgatccttgatcc

SEQ ID NO: 99644 - DNA, 710 bp, Zea Mays
tgttcgcgacaagaaaatcagagggtggcggggagagacgaagtgaggcaagcgttacaggggagagacgaagtgaggcaagcgttacagggaagatgctagggctaggaatactcgtcgtgtatagaccaaaaggagcagaaagttgcatgtggctatccttatcacagtggaaggagcgctatagagccagcaccggtcgagtttggatacgtggccgcgatggaatggcacaagcaaaactggcttcagttaagcggcaaaaaaatttggatttagcgatgtccacataggaggctgtgatgggccgtggccgccggcgagtgggtcgccgggacatgagcgtgctcccacagccaggaacagatatgcaagtctcaggtagtattttcttctctattattgtcttaacccctttctcaagtctgaaacaaaatatatataaccccttacatgggccggcccacacacaaacccaatgtagcccagagtggcacacacgatcccctgttcaccacacgacactcacggcttcagacttcagcttcctctgattccactcccttgctctctgcattctccatcatggcacccatcgtcgtgacatctgcccccctgcaactcttgcttggccccaagcaagggcatccagatagcgctgacacagaacatagtaatcttcccaagttgtggcgtccgctggaatgtga

SEQ ID NO: 99645 - DNA, 392 bp, Zea Mays
ttcacagggggcttatgggggatagatatctctgggttctcatggacactaaaacatatcatgggttgtctgatgggcttcctgtcgagttgccctatgggatggacaagcaggatgaagccaactcaagtgagcccgatccaagctaatgaaggccgacgtccgagttaagcgccgctgaaggccggatgtgtcggatgatgcaattacaaaaacccaaagggtttggcattcggtgataactcggacagttaggcgatgaagactctggatatgcagggacacgatctgcgacaaagaaggagataaacaagtagataataatcgcaacttgtaacgggataactctacctggtcacatatatatggccaagggagacccctaacatttc

SEQ ID NO: 99646 - DNA, 370 bp, Zea Mays
ccaaaccctaaacaggaatctaacagcttcaaaaattccagaatgccagccagcaacatgttccctttgatatcttgcacccaggcgagagaaggaagggcctgctgaacaattctgcacttttttatactttttgcctccccagcagcaatcaaaggtgcaatctcaacaatagagctgccatgaatccacctatcctcccaaaacaaagttgtagctccattaccaatattggtagtcacttcagcctgaaagagagctcttgcttgagaggaaatgttgaggtttataccagcccaaggtttagaaggctatttcttctagagccacagccatcttaactgtagagcccaactcatggtgagaagat

SEQ ID NO: 99647 - DNA, 925 bp, Zea Mays
catgcaaggagagtgtggattcaatgaaccgcaaggaccatgtatcatgtgctctgcaactaagcaataagctagaggatcaaccagcgggtctggtatttcagcgttgatgaatgagtctatcagagcaggtgttggttgcgtagtgtcagtggagacccaaaatataatatgtgaatgaggaagacctcatttttgaaattcagttgtgtataaaactgtaaaaaaatattggaacatgtgttaggataacttaaaatacatgaatgtgaatgatgtacataaaaagtatgcaatgtgagatagcaatgttagtgtacctgcgatacatggaccaaaaattgatccatttcttatatgatgtaataactcattgagtttcatatggtaaacacgaacaatgatgtcagatctttccgaaggggtttgaccaggctgagatagactttcaagtctcttgccaatttggattgcatgtgaacgtgaggaaaaaatctggtggtccatgaactcgacaaatagcaatgctgtcatgataattttggatcatgtagcgtctgcctcctgtgtgtgatgctggtaatattatagtttttcccatctcttcaccgctgatgcatccacggctaactgcatctgtgataccttgaatgctttccatccgtagattcttttgattattgattatatagttgagtctattttcatcaatacatgctctagcatctactttggcttgacttgataacattgcataacacaaataaggatttggttgattttttctataatggaactggtagcaataatattcttgcatagttaaatgttttcgtgcattttgtccgctggatgtggcaccattgtacaaaactccaacctggaaacctctctcgccaaagggaaaaagcagtgggtattgtag

SEQ ID NO: 99648 - DNA, 474 bp, Zea Mays
ggttgctaaggcgcagcgtctttggaaggctgtagtcgggccgtgaacatcgtctcctcccccaatcgagttattccacaccctctcatcgaaagatcgggcaatcacccaatgggtgcacatcagctcccatatccgtctcgcccgagcccgtctcaggcaacaaagacaaggcgtgaccgaggggccaacgagggacacctgcattcaatgcacgtacctaccctgcaacaagattacaggtgcacaacggcaacaagattgtggtcttgtccaagaccaacaacatgattacgcatgcaccactatgcgcgcacgccgcctgccatccccaaacgggacatctaatacgacagaagggcagactggaagtcgctgatgactagaagtagggacggtgtgcccgaacgagtataaatcttgcacccactaagcacaccgcccggtacccagaatgtgcacaataaatttact

SEQ ID NO: 99649 - DNA, 580 bp, Zea Mays
agacgaaatcgatcctagacatccggtcagtatatatagctgggcccatgaccatgagtgtactgtacaaccggccgggcaggaggcagtcgaagcgagtagcaatggacgggggagggcgtgtggcggccgcgtgtcacaagacctgttgggagcccagaactgagaaggaccaaacggccatacaagcccaacaaagcggtgtatgggccggactggactcattaggagagtatatttaatccttttgccagcttcgttagagttaggcgaggcagacaattggctgggcgaatcagataggccggctgcgtccggatctggagtgtgttgagaggttttcttttctagttgctactctggatttctgtaaacaaagaacttcgtgagagggagagtaccgggagcggtgctcatcgtcgctaaatccctgtgagtgattacaattggtatcagattctcgtcgtgatcctggcggatccgccggagtacctccttcgcccgcagtacaagactcgtcttcaaagtgagctccaagccatggagaaaagcgttggtgatctcacaacgctgctgcaag

SEQ ID NO: 99650 - DNA, 509 bp, Zea Mays
gttttatcttttttacccgctaccggacgcaagcccttgattgatgatcgaggggctgaaaataattcaattgacatggaaggctaggaatgcacgtttcttaccggctttcatatatagtaagtatagtatatatgcaggtgaggaggcacgtacagggagcaccgcagcaggtatatggctcggttgccgtccaataacacatggtgaagctacacagttcatgcgggttgcaaatgatgatgggcacatatggacgtggaagtgattaaaacttaaaacaggagtacgaaagtaggtatttttattttaatttaatctagaaatatggcagtatagttgtgatgatcgatgtgtgtctgttgtatgaaatattactgctcacaaatttagcaaagaaatatatgaaaaatgcattgatcacataatcacgctaaatttaagaaatttagagataaacttatacattgtggaggatccatgctcaaggtattggtacatccattcac

SEQ ID NO: 99651 - DNA, 658 bp, Zea Mays
aagcgaccccactgatccaaatgtagacaaatagacaactgactcctgtggcgactgttggattgctaccatatcgctctatcaggatccgaccgccctgagacatgccagcatgtaccatcaaaaggtgaacatgccagtaggctagctgctccatgcatgcactgatgcaccaggctctagtggcaagttgttgaatccatgcttgctgtattattcgctgtgctatcgggtactgttggcacttggcagcgccgaatttgagactccaactgtcatcatataaagtaggtggaaacgggggcgggggttgggggggcgatagatcccccatttgaccttttgccctagagatacctcgtgccttggattctttcacctattatgccattagcagaccacatacaccagtgcgatcagtcgaccaggcattattatcaaccaaatagctaggtccagtaatgaaaccattagcagggcaacttcaggcgcaatcgatgcacaattgcagacaccatagattcaggtcatcgcccaccatgcattccgtcctgtagcaagcatctcttacaagatactgctgtctcactctcatttgtccttttctgaaatcttggtttctgacaaagtgagcagtgcaagttgcgagctgcatatc

SEQ ID NO: 99652 - DNA, 358 bp, Zea Mays
catcaacccaataggaatgtggtagtttttgaattgagttctgaattccgccctagtaatagtgttagcagcgtcatgggcagcaacatatgaatcccaccagtcaacagcagaaccagtcagacgaccagaagcatagagaaccttctcccggtcggagcattggacaatgtttagcagcttctttcctgacttcaaccaatcatcagcatgtagtggatctggtgagctagcgaaggtaggcggcttgtggctcaaaaatttctggtgcttgtcccggggtggaagtggtggtggtggtggcagtggtgcttgctgctgctgcaccctcctctcctggcgcatctcctctctctct

SEQ ID NO: 99653 - DNA, 571 bp, Zea Mays
aagacatgaattatagttctgtgatgaaagagttctgctgaagttcaatatgtaaaataaatagtcatccttaggcttgaatccgtactctattgaagtaactagctgcctaaaggactatgcaacaactaactctgaaatctgaaactgacacatttgttgaatctaataccatgctaccctcctatttggtcatcgtaagttcgtaacaaaacctctattgttttccacttcattccttacagttttttaatattttcttccccaacaactgctttccattgttgttttagcatggttgaactaacgcatgttaagtcaaattcagtgagctggatgcactactgctcagctcagtccctcgtaagccaaacatgtttcccctaacccctcattctttttcttgtttgttcaatgcccccctctccctcattgctttcttatttgtccttttctaggtcagaccatgttcttcagacccctattcgaggttgggtgatggcaattgtgagtgaagcagaaaaataatcaatcctgtcttctggacatagtagaggaagtatttaacaac

SEQ ID NO: 99654 - DNA, 1738 bp, Zea Mays
atgacaaaaaagttgggtcgcaccaaaaaaggccccatcaggaaagtagatgctacagatgtagtgtaccttgaactgtagtactgcctcacagagagcacaagattgaacatagcagcttcgccaaccatcatgtaaataaccacaaatcggatgtaccatctgaactcattgatgtaaattcttgtttcaagcagaatcattacaagcatacagcaccaagcaacagactcaatgatcaatgagacaatctgtagaaatacaagtttttaaatggcccaaaagggcaaaaggtacaagaatatgtaagaagtaaaggtcagatcaaattttacataatttcatatcaactaaagaattggtcacttgagttatggatatatactctatcagcattttctgtatataagttaactctagttctactggcaaaatcaaggagaaaattagctccctgccatcataatatttgcactgaaaacatacttgtacgggggcaatagcatatcagcatatggattccgcagaacttgataacaaagccatgtagatcattctcacctcaaatggagcaaggccaggctgcccatccaagttcatgatggaggtaccagtgatgatccgataaagcggctctgctatgcagtacaccacgagcagtccaagcaggtagttgtagtatggtgaacgtaacttgtaccgctgcactgtgtagtccctcgtcgtcctccatatacgatagaagcaaactccaaagagtgcgaggtatgagatgcagactacaagggtgtcagtgccacatggagtgtaggcgccgaacgcattctcaaccacatgcgaccacacaccatccttgaccggctggcagtaccactccagtgggtcgaaccccatctcgctccctccacttaccaaccctgttcttcaatcagttctgatgttctcctgaattcaagaattaaaccaacgaaacaagagaaaatccagataatgagcaatgtcactcaacaccaacctaacaggaaacttatctactagcccaaaaaacaactagagcaaacacttctgtttctaagtactctgatgcagataatttcaccaaatgaagatatacatagaaacagactttccgagggacgccagcatggagattcagttgacgcccacgaacaaaataaactggacccagcttaataagtgggtgcaagtgcggctcaacaaaaaacgaccggcatactgaagaagtgaggatccatcacctcatcaagcaaggatggggatggatagtggaccacagcaacagcacgaagcatacgaatccaaatctaacaaaatggaccgagataacacatccaaccaaggccggaataacttgccagttgcaacccgcaggagaagccaatccacgagcgggtggatctccacgcaactgcaccctatactattctgacgaacgagtagtgctgcagcggcggcggcggaagcggcgccacatgcccactccactagtccactaagacacgccaggcacgaccgcacaaaaaaggcaaaagaggatataaacaacggggctttatcatctcgacagaatcgagaatccgcacccgtgaatggtcatccgcagatcctccgcggaggctaccacaaaaatatctgggaagggaaactcgctcgcaactatcccggtaataaaacttaggtttatctcttgcgcgcgcgaggcgccaaacgacagcca

SEQ ID NO: 99655 - DNA, 623 bp, Zea Mays
agaagcaccagcccattctccatcaacgctttatcaactggagtgggtgtgaaggtattggggatccagagatgacattggcactgagggcctgtgaacaaaagaaaatgaagaatatcatgactttccaatttgattggaatgatgagaatgttgctcaattctactctacattgtggatcaagcctgcagatgaggaaagtccctacaactttccttatatgaacttttttattgaaggaagctggtacaaagttagctacaggagattttctcacatattgagattcaccgatgatgatattgctggagataagatcaaaatccatgatttttgccctcccaccagggctgaggccaaagatcttcacatttctgagaatgatgagtactggaaatccacaaatttgcataagtactacaggtacctcaactctcttttcaggatgactctcattcccaaagggggaaatcaaatgaacatcctgggtgaaagcaaagttcttctctccttcatgaatcccaatagcagtgagaacttgaatgtctttgatatgatttggcaagaaattattcatgccttgtgctttcctctcaagggatgtctgcatgccccttcatca

SEQ ID NO: 99656 - DNA, 859 bp, Zea Mays
cgatagtgaagtgtgtgtcatatgtgctctaacttgcattcgatttcaccaaacttgttgtggaagctttccttggctgcttcaagaaacatagcatcatctgctccacttggtcgtgccatgtacaagcaattatagataccattgaagagagtaaccttgtggtttcttgtcgaccacttatccttttagctgcttggacttgtggttataaatgcattggctattcgaccctagaaggtagatcccttcttgccattaccctcattagggtccaaagagtacaatagccacacatgaacctacaaatttataaactcaaaaaaatgttgttaacctaaaaactgtgtcgaatttatagaaatatatatgtacctatcgatctttcgttctccatcttcatcaatcccttcaccattggaattgagtagcaccagagtaagcatgctggttcgaagatgcattactatggctacttggagacactattgtgtctatagtaggacaaaatagaggacgagcaccatatgggtgaggaacaccaaatgagggaggagcaccatatgaagcagcatatggagaaggagcaccatacgaccgtaaggaggagcatcatatggatacccatatacgaatatgaaggacggtatgaacaagcaaaaggtggaggaacgttggtggtagaagctttagtggtagaaggaggagaatcagtggtaggatttttattgacaggtggagtatccatagataatatggatatagaggaggagggtatgaatatagaaatagagattgccaagacttagggaacgagggcgagtaggaatatccttctaatgacggacgaaagaaatct

SEQ ID NO: 99657 - DNA, 442 bp, Zea Mays
gaatcagctgttgctgttgttgcagctggtgcacagaactgaagactccttttcgtgtatgaggacagcaacagcacgagacagaaagtgaagccccaatgatgccgactcccatcttccacgagatcccatcacaggacgctcacgcctcatgttacagtgcccatcctgttcgcccgtggcgactacctggaaaacgagggacacagaaagtcgtgcggttttcgtgcaacgtcgagaccccggtgtacaacggccatgagattaatgtaagcgaaacggacaacggtggagcaatcaagcagtgacgctggcaccttgcatactttatataagcctttatatggctgaaaccagctggacggcacgggtcctgctcacgccgatttgtttgatcgattttggcaactacactgcgttgtcacattggacaacagattat

SEQ ID NO: 99658 - DNA, 280 bp, Zea Mays
ggttgtcgactgaagatttcgcggccatccgaggaaggaacgaccccggtggcggcctgaatttgccgtcggagcttcgtttccgccgcaaatgtgctgtgcatcgtgggtgacatcaccgcctcgtcaaatcttggtatggcgccccctatccaaatcacgagtaggtgaatttcattttgcgcgattcctcggggtggtttgctcgtcgggctcgcggttagcgagacgccagtgagggaccgccgtactctgggcacaccaccgtactccgccgtcg

SEQ ID NO: 99659 - DNA, 437 bp, Zea Mays
cgcatgaacggttgaagtgcatgctcaatatcatacgcgtctctactcaaacgtgtttgttaagatccttgctcatcataggttctatcttctctttttaaggatggtgcgtcggaggaatccatctgttgttgaatctgactcctctgacgaacaagagattcatggagatactcccccacgttctagatccaaacatgggcgaggatctggcaacgtcatgcaaggtggtgaggcctcttggtctcatggagctcgcagtcggacggcccggaatccctccggtcggtcccgacccgcgacaaatccccaagcttgggaagcaacaagtgatggtgatggtgggaaagatgatgagattgatcttccccctgcccacgcccctgttattcgagggttcgtcctccaccgggcagaggcccgtcgtgctggcaatg

SEQ ID NO: 99660 - DNA, 341 bp, Zea Mays
ccacaacatttactgctattgcatcgttgtgctgccaaaaaatttgaccatagccgaagcttgctcactgcattctgaaccgaaggatcattttgctctagcttcgtgacaagagggggcttcggcaaagataaaaaatttcaacttcgtcaaaacgcaagaaattcaacatcagatggctagggtacgctcaatagctagggttactcgcgacgaagaggaagccaaagctgctgaaactgctccaatttctgaagttatgaggcgatcgggattggttgtgaccgagggcgctgctgacgaagaatcaccaacggctgagaccgagcagtcagatattg

SEQ ID NO: 99661 - DNA, 412 bp, Zea Mays
cgaagagatttcttttttctataagaggctcatcagttccaatcctagaggacttagcggtgtaacggaaaggactcgatcattaccttcaatatttctaagacctccgcagcaaaagacaaagggcttacagttagtttcagcacatcttgtgtcttcgtcttctcagaggattttttggcaagcttccgtttttaggagacgataccttcggctccggcactgtttttatcttcttcaaagtcccttggtcttccttgacagaccggacagcttgcctactcagaatactgacaaccctttttcttttgactcatccggccccttcatcaagcctttcatagtcaagatactcaaagttaagagcatccattacacggttcaaccttcgttttggtcgggtgccgaaggc

SEQ ID NO: 99662 - DNA, 709 bp, Zea Mays
aggaaatgatgcgccttgctagattagatctttgccagcttatcctacgcctatcttttcttttctgtgcttttttattttgccgatgttttactattccatcctgacttgtaacttttggtcaccacctatccatgccctggtcatctacagtaaggaaaatcagactgatatctaacatctaagaaagaaaatgctaatgtacatatattcaaggactgaagtgggccaagaaataaaaacatttcatgtggtgttagacagcaagcacatgacaagataactctaatttccttattatagatatttatattttttccagatacctggaattgtactattgttagcagaatcgacagataaaaatgaagtagatcaacaaacaaaccacagagcacgacacagatttacgtgaaaaacccttcaatgtgaaagaaaaaaaccacaagcaccggccaggtgaaaccttcagtataatatgtggagtgtttacagaacactatttttagacgctggcttacaagaggactaataatgatgacaccgtagaaacactaattaggatgaacaatatataccctagcctccagcgacgagcctccgcttcgcttgccagcacggcctcttatccagaattttgatcaccaattcaacaatctccaccttgagacaaattccatcttgtaaccataatttgtaagcaactttc

SEQ ID NO: 99663 - DNA, 303 bp, Zea Mays
gaggaccagtggtcgccaccagtatctgacggtcgttgagcttttgttgcctcttgctttcttgcgacccatgtccgccgaagatgacgttgacttctccgtcgatgcgtgggaatgctctgcctcctccccccctcccgttgttggggttgtcgaggttctccaggtcctccttgtggtgggggaggttgcattggttggaaaggtcggtcattccccatggagtgcttgaagtctctgcagttccggagggtgtggcgcatgtccttgtggtacgggcactgggcgtcgaggatgttgtcc

SEQ ID NO: 99664 - DNA, 474 bp, Zea Mays
tgttaagggccttagagtctagggaagggggccctcggctacgtaggtcgtaccctcggtccgtcttctccggtgaggttttacccctcttccgaaggcttgagagtggtagggatgcaggatgagataattgtgttattgcttatttctcacaagagccggctacaaggctttatagcctgagttgcaacagaaaggggaaactaatctcctctgatttaggatctccactaaagggaaactaatctctataatttaggatttctactaatctctttcctcttcgagtcggccttccttctctagaggtggcggatgcatgccctgtgattccttccttcttctagccactaatttcctggctttccttttctgctgctggcgtggccctgactgctgctcgctctgcagcgcgcctcacgtctctcgcgtgcctccgacggttataggggagaccccacatgacaccttggg

SEQ ID NO: 99665 - DNA, 1182 bp, Zea Mays
ctgtcaaaaggtgtacttttagctctaaaaacagacaagtgttacttcagaattcagaacacatataagccctgatgggtgctcttaatagataactcttagatcgtatttcctcaaaaatctagtcagcttgctccctcagttctgcttttgcagatgcagcaagcaagcttttgtaggattgcaactttggtgttagacctcgtttgcccatttcattcaataatgtaaaaccttcttccggcctaaagcttctacagtacatgactatcaatgtattgtatgtatcttcatctggctctaagccagcttctagaatactttgatatacttgtgttgttctatcaaagttcccagcggcagtgtacataataagaagagcattaagtatggcaacatctagcttgaaccctgctccctccatctctgcaatcatcaattccacatccctaaatcggttgtgatggcagagcaaggaaatcaaacttctgtagaggtgcatatttggcaagtatcctgcagccttcattccattatagattttcattacctcgaatacatccccagcttttgcaaaagcatcaagcaaaaggagcattgtacttttgctgatcttaaagttcatatcttgaagctcttctacaacgacatacaactcatccaatctgccatcaacaatcaatgccctcatcattccattaaccgaatcaacagttggtagaggacctattttaatcatattatcaaagactgcccttgctttttcataaagtccactctctgcatatgcatgtatcaaagcattccaaatccttctattaatacctgatgcttgcctcagccctttcaccaagatttctacttgctaccaaagctttatcttcccatatgcttcaattataattaccctacaagagagaatgtttaacggaataccagattgcaaagcatcatccattaacctgtgtgctgtttctaggaatcccagtttacagtaggtagaaattatgctctcgtaaatacttttagaagcttctatgccaataaactgcatgtcacagaacacttgacaagcttcagaaaaaaactcagcttcgatgaggcatgtaatcaagtactcatacaagttacagttttgaccagggtattttaacattaacctttgactgtactgttcatagg

SEQ ID NO: 99666 - DNA, 345 bp, Zea Mays
atattatgctatatgcaacaaaaaatacctgctcctgctctagtgtcattgttcaccttcgtcctgcactctttggcagctcgcttctcagcgatagcgtcgtcgataagcttctgaatgccaatgtagcactcgtggtgagcttttgccataaggtcgcgggatattgttgaatacttcgcagccttctgtgcgtacgactgggcttcactagtgctttcatcaaaagccttcaagatgttcagtgcatctgacttcctactccttccaactaaattgataatgctctgaccaaaagaagatctgaagctagggtactagtaaaagactaggggttggatattg

SEQ ID NO: 99667 - DNA, 404 bp, Zea Mays
agaaacttagatatattgtcaatgtaaactatatgtacaattgggccaggatacataggacacacaaccgccgtcaccatgtgggactaacaaccaaatctacatggggtagaacaatcaaccacttggtaagactctaagcctaaacaccatgtctaagcataggtttctatactattctggctacaagtcggaataacacgcaagcacttacacaacttaattataagcatgcacttaggttcccataatcaactaagccaaataactaagaatgaaagcaagactagtatattatgcaagtagtagaacaacaaggatctttactcaagcatagagttcaatatcaatccttagagaatacaagcttcagagatataataccaagagaattccaattcctt

SEQ ID NO: 99668 - DNA, 293 bp, Zea Mays
gcaaacctccctggtcgttgacgtcgctagggttttgcccgcgccgccgccagttcgtctgcaaggttggactcctcccgtatcacaactcgtcgtattcgcaggtacattcgtaacttccatgtttacactgtctcctccccgatgtgctgttacggatccggtattccccatgtactgattagggtttaggttgcatcgacgtctgtggttaatacttccccctataatgaagacaatttgtcaactgcttagtaacgaatatcctctgatatttgatgttcagatctcgg

SEQ ID NO: 99669 - DNA, 331 bp, Zea Mays
gccttcgccggtgcccgaggtgttgcagtagttttggagaaaactagctatgaacatgttaaagctgcagcccgggcagaagttgtgttctccatagaagatacaaaggaaccttcagccgaagctactctgatgggcgggaaattttattccgacgtttggatgaagggtggtcgtgagatagccgacgaagcaataaagaaaagtgaaaaagaatcccatgatgcccgagtagaagcaaaggaagctgccgaacgcgcattgattataggtacctctatttagtgccattttgctttattatttgtttctagcttccaaccctaattat

SEQ ID NO: 99670 - DNA, 665 bp, Zea Mays
agctgcgactgttgtgggctccttggctgccttggttatctccggaatggagtttgcgatgaagtcatcgatgaagatggtgtcgctagcaggtttttttctattctgacaacgtttgcattgtgctggtgggacgttgggactttgggcctaaaccctaaacccaggggactttgggcctattcgggccgaaggctagctcatgggagagcgtgcactcctccatcgtggcgcagagggaggtggatgcctctgcgatcactagagtggcctttaaagggcttgctgctcacctttactcggtgaggattttaagtttagtttgctgccttcatcgcaccttgggctgacaatgcgctttgtcagcttgctgttgttgccaacgctctagcccccttggcgagggtctgggaggaggcgactgccgccatggtagagtgcactattagaatagatatgcaatgtattctatatccatgtatatcctgtactcgggtaacaacctcccgctactttattggctagatatgtttgcttaggaatagataaaggttgttactcaagtatatctgttgtatagccttgcgcaccgggcgcccatataaacacgcacgcggcccctaacagggtaagacgcttcacctgccctctgaatatttacatgg

SEQ ID NO: 99671 - DNA, 920 bp, Zea Mays
gaaaggtggagttttgggaaggctcactaaatatatatttgtggtacacaactcagtaacagatagcaatgttgaataagtgtcgaaaatactcgtcctagctgatggcctggagagtgtattagaacagttgaaggaagacacaaagaaggtaacaaggatctaggtacaacaaggaaacaagatggaaataagataaatcacagaggtgcacagaacagtgacgtttcttttatgtgctactttttttctcttttcctccttttctctttttccctgattcttgcactagtcgttgtttttcgtgatttttctttttttcaaatattttttatatttttctcttttacagcagcacataagaagtaaacacaccaaattttagatttttttgcacaaagacgcgtcctctggaatttttgcaaattttcctaaaatcggattaaacatttggaaaatgagaactcctatttccaagatgaatttggggaattttaaaaacggcgaatccggcaaggctagagagaatcaaatgcaaaatttaattatgtgcgatttgaaaaaaatgggcccaattcgagtttgaggcgaaagttatggtcgttttaagtttggacttcgaatcaaggtttccgacgaggcgctagaagggtgggggtgcttttgtgggcatggtcggtttgggtgattgggtcggtttatcaagattgagtttgtggaatgatagtggatggtgatgaccaaactaacccccaaaaaatctaacccagcaacctaattatggttgttggcgaggcaaatgaacggtgaatagggttggttttgtggataggtcggttttgtggatagattggtttgtcgagattgagtttgttgggtggcagtgaattatcaatgatattgatcgaactgacataaaa

SEQ ID NO: 99672 - DNA, 588 bp, Zea Mays
ttggaaacgacgtgcaagcgtgttaggcagcttttaatacagtgtgtacttacatcggtacaagagacttggtccaagagcatattgcttacagagtgtggccacttgcaaatggatgggaaatgccgaaggagactgcctatggatccagtcagaatggcttagtctatctgaagtatacctttcgatacagaagccagtttgatgaaccaaatgatgattggttggatgccatagaagcaacaagtgatgagatacttggagcgtattcgaaagcagaagacgaagctatgacaactgcctttggcgctcgcggcaaaaagaggttgaatagagtgtttgatgttatcgggttcgtgtacccaggttattgctatcccacgtgaaagcaagggaagaagaggaaagctgctacctcagcaacttctagtgtgtcgaggtcaaaaaaagttaaagttttgacgcgccgacccaagcgcattgagacagccgaagtgtcgaagctgcatgagaaggtggaaacaccccccggcaatagaggctactcctgttgcacctactagaattactgcaagcctggtcgaagag

SEQ ID NO: 99673 - DNA, 665 bp, Zea Mays
aaggtgaagccttgaggtgtattttcaacatgagtagaggcctcactaacgcataatgattggcgacatatttgtaatcctctatggttggcttacatatgatctttgaggagcccaacttcttgacatcctttcaattttaggagatatctattttctctttgaatatagagacatctaaatctttatattcatggatgatgtcttcttgtaggtcatggccatttttagcacaatttgctcttccccttttcatgaggacatcctccactattacccgttggcaaagacgcaattggcctagttgacccaattgtagtcggacggtgaccgtgtgagcctcagaattatcccacctcgcttaacttgggaggaggaagccactttaaaagggagagccacccttcccccattggactagtcttttggggtgaatgggcctttccctgagttgggtgtgcttaatgaattgttgggctccgggcaaccctaatttgttgggcctcgaccaaccccacctgggttgggtgtatcacctttggctttagggcctttaggttattaacatctttgttcatgcttgaggagcgtggattcttggttggtgatggttggcaatggtgttggattaggtataggctctttagttttgttgcatggttgag

SEQ ID NO: 99674 - DNA, 275 bp, Zea Mays
gaaggatgttgcttcacatgttgcagtatgtgatgtttgctagagggtgaaagcagaacaacaaagacctgctggtttactgcacccgcttaagatacctgagtggaaatgggaagagattggcatggacttcattgtgggattaccccgcacatctgctgggtatgactctatatgggtgattgtggataggctaactaaagtagcccactttattccagtgaagaccacgtattcaggagtcaagctagcagagttatacatggcacgaattg

SEQ ID NO: 99675 - DNA, 1926 bp, Zea Mays
ctcaactggaggaactagagaaaggtaaatgggtatgttttcctagctgacaggcatgacaaagatcatgcccgcttttattacacgagatagttgaagcaatagacaaactagacagcacatcagagccaaggtggccaagacactgatgctaggtagacacaacaacaatagacatggcacaggaggcaggagaccctaggaggcagtgtgtagagggggatgttatcagtgttgatggtggtgtggttggaggcaccgaagttggccacctagtttttttctcgaaccacgcaggagaggtgcacatcatttcattaaaaagcaaatagggaggccatgggagaaaagagtcccccaaggccaaaaaaatacaacacccactctcacaaaatacaatacacggccatgacctcctagggtcatccgtgcatcacattctaaaaagcccttcatcaattacagtccaaaccaccatctgtgcatcacattctaaaaaatgcaagcattttgatgcttccatagctcccaagtaactagaatcactagggagttaaattatttctgcatcaccttaggtagggagctaacaactctacaccaccaagaatttaggcgattgttaggatccggcggcctcacaatattattcaacctttgcagtactaaggtccaaacccagctgataaccgcagcatgtgaattcagagccatagtgctaaacgagctagcaagagtctactgatcccagctgccgggccatggaatccagcttagtagactgggggcctatgctaggataggaatgctagagcctacaagggttcgaagctgaggatgctatgttgctcaaacaatccagacatcaccatcatggcctagcctagcgctattgttgctgctgtccatgaggagcagggctaggccacatggtgatgttgcccatccatgggttgtagaagattgcattgcccgaccatgccctttcttcttgccagatgctgaggtgagagtgggttgcctttaattttcggaggagcgtgccaaagtagaggaagaagttggggcaaatggcatgagggtgatcggtgaaggagtggcgatgaaggtcgtcggagcaacaacagggcagtggcaatcatgttgagctcctctagaacaagatcatctgggtcgaccttgaggaaggacgggaagggagagtagcgtcggatgatagccctgatgtgctcaaacttcttatttaggccttgaggacaaggatctagtcgttgacagagtgcccaggtcaaccaaggagtcagtcgtccccttcaacttgcaacagtagtcatcgacgggtaggtcaccctggacgaggtgcagaaggtagcgtcgaactagagggtgcgagtctcatgattctcgactgattctcaaaaacgagtcagaggtggcgtgtcatgccattgcagctccctagcaattcagcggagatggtgccgaagatccagcagatgacgatgttgtccattcgatcccagaatgaaccgttgtctgagggacaaataagatgtggtcgacaaggcgtacagcttgagcacaagcaacacttgatcacaccaacaggagtaattgtcagaggacgcgagaacgaccatcaccaacgatacgaagtcgggaccaacagctgcctagacatggttggcgacgatggcaacctcataagatgcagtagggtcgtcctgtggggaatgccctagggtgggggccgacggctgtggagtgctatagcccaaaccctaccaggcagcgacggccttctcctgttcgagaagggtggctgtctggagatgaggatgtgtgttggtagcctccttgttcgtagcttgagccatggtgagcatgtcgtcaatcttcttgcgaaaggccacaacctcctcgatg

SEQ ID NO: 99676 - DNA, 524 bp, Zea Mays
tttgattcaagagcatatagccttcagggtatggccacttgtggaaagctgggaaatgtcgaaggagaccaccactgattctagtgatagtggtctggtccgactgaaatatacctttagatttagggagaagtttgatgagccaaacgacgattggctgaagtgtattgaagctaccagcgatgagctgcttggagcttactccaaggccgaagataacgctttgtccgcagccttcggaggtcggggaagaaaagactgaacagagtttttgatgcgatcgacttcatataccccgattatcgctacccgctgcgagggcaagagaaaaagaggaagattgctgcttcggtcatcccagctgagcctgtgtcgaagagcaaaagggtgaaggttctgacccaccgaccgcattatattgaatcggccgttgtgcctaaattcggcgcaaggtcctcctcaacagccgaagcaatagaaactgctccgattgcacagagcactgaagaggcgaccgtaatgcc

SEQ ID NO: 99677 - DNA, 816 bp, Zea Mays
ttttggtgtagttccccaaaatctcattacacatagtttcaatcatttccagccattcttggcaaggttgcttgaattgcttttcaaatttgaagcgataaggcaattgaacaagttcatttttttctttgttcctttcatcttcggcatcacccaatcactggacgtcgggtacgtccggttggctaagtattcctgcaccaagtccctggtgctgatctgttcagccactactctgaattctaccttggccaactagcatgctgaccctatctgcatgttgcacaagggtctggtcattccgaagcttaaagccagcgggctcatgaccatcatcatcagtttcccctcttcttctcatcggccttgatataaaaccattcactcttccaaccggttggccatttggtgcggtagctaagtatcggagccttcgtatccttacgatacgcaaaattgtagcagccaaaattttcatgcagaccgtctgccctggccttggtctggtagtgcaactcgtgcactcagcaaaatgcttcggcatccgggctcatcccttggtttcggagggcctagatgaagacactaagcctaacaatggcgttaggggtaagctgatggagatatattttgaaaattttcaagacttcccctatcatctcattcagaggaagtcgaagtcatgctctgaaaaaactcttgaagactaccacttcatcatccttcggcactggggtggtttcttctccggcaaatcgaagaagcttcctttcagcttcgccaaagtagccaagcttcatcatcatcggcatgtca

SEQ ID NO: 99678 - DNA, 296 bp, Zea Mays
cttaaaaagattttatctcatcttaatagatctaactaatcacaaaagattctatttcctcttatcctaataagcatacttatccaccctagtttaacaaccatgatctagcctaaaataaatagatcttatctagttataccggtgatctagatcccaccaaatctaacatgatcaatccaaattgtgatacttaaataagttagataatgttggcgatataaattaggccctaattctataaacatatcttaccctaaattaataccttagactaactcgaccgtaaacaacaa

SEQ ID NO: 99679 - DNA, 343 bp, Zea Mays
cacatccaggaaaacatccacatactcacagaccactgggatcttcttcaggggtaactctgtcatagcaaaagcacatgaccaagtagagtcttggctgggtagaagtaaggtgaaactcccacagactggggaattgatttcgacgatgcggctggctacatcaagcactacttggtgtctggtcatccaattggctcccagaataatatccacattctccaatcccaaaacaaggagggtggttttgataatgtggcttcccagttgaataggcacactttggtttaattggttggttgcaattttacccccaggtgtggctatcatgaatgaccctttt

SEQ ID NO: 99680 - DNA, 754 bp, Zea Mays
gtggggagaagctggtggttagaatctgggtgtttggttcagctgctgtggagacaagctggtgggtagaatctggatgtttggatacgcagattatgagattgtagattctgattgaaaaaagaaaacagataaatacagacaaccaactagtgcattacgggattaaccggattattaaatatcagtgtctgaagtctatatgcttaaatgtccaaattatcgtattgataacatctgaacatgaggatttaaggtacacttaacaactgtaatggcagcaacgcatggatatattgttccaaatatgagttaaaccttcattagaaacatgtgttgaatttacgttccatgcacaatatagatagaacagtaaaactaaggaatacaatttatttaacaacaccataaaactgtctcgatcacaattatacttatttaacaacgaataaaactacatttgccatagcataaaatagtactttatttgtaacatgaacgttttttaaaacagagcggagtactgcatttaaaacagcaacagagcaccacaggtctcgtttcatggtgcggagaacgccagaagtcgtccagcttcccgaggcagcggctgcgtgggcgcttctcgcgaaccgttggccacccacttcctggagaagcgcttgaagaagaagctgggtaagaagttgaccgtttggttcggtttctggcttctgacggccacaatctccaaagaagctgatccaaacacagc

SEQ ID NO: 99681 - DNA, 327 bp, Zea Mays
gtagttttaggtttggatctaggttcatgagatggatctacttgttgcatggtttgattagatcaattggttataagggtttgaagtagattgcctcggatatgaccgaagatatcagttcatccttctctgttatgtgtgtgacttgcccctaccggctggaatcaccatcggggctaactgcatgcacaaccagtagattgacgtaacagatcaacatcatgagtgtaatcttctttgggtcaaaagtctcggattcgggttgatttgatcaatcacatgagattttcagtggaatttccatacatacgacgcatggggccgtcg

SEQ ID NO: 99682 - DNA, 988 bp, Zea Mays
gtacacagtagttttgtgtacgttaacataaaaaatacagaatattctgttgtacatagtagtcaatcaatttaactgttgtagatcattccattgtgttcatccaaaaattgttggataatagtttgccatcagtcctatatacaagcatattagtgcaagatataggtctctagcagttgcatgtcaagaagtcgagataactcactgtagattgtttatcttctttattagtaccaccaattttggatgttaaggagttagacattgcatagacttacacttccaaaaggttttgcacgtacactgaaaaggataagtacatctggcaagaaaatattaggctatgctataaggcgataaaacataaattaataccatctccaaatataaattaattttggtcaaatgaaaaaaagtagatggatcagatgtggcagctgatgctacctcttgatctgcatggcagaagtcatgtagtccattacattcattcattaatattaggtttgtctgtcctgaaaaatcccaaacatgaacttggataaagaaacattaagtaaacaatagtaattgaagtgcattttcaaagttggaaatgtgagcagcaacatactggttgagaatccacattaaaaatcttgttaacctggctgtaattctcaactggattgtcctaaagcagacaatgttgtagttctgttttctacttatcttgttagcagaatacaaggatacacattatggaaaaaggaagttaaaagagttttactggtcaaataaaatggccttctagaaataagtgtgatgtcatagtaattattgcagaaatacatttaagaggagttgtgcatataggagctaaccgtcatttcctgatacagtaacaagataccgttgagctgccaaatccatgcagtgaccatagcgaggaccaggccctgccccttgaacaacaaccctgcaacaaatgccagagaaagaaaat

SEQ ID NO: 99683 - DNA, 571 bp, Zea Mays
cgatcagcaggtcgtttacgatgcaacaccggcgagagcgaccgggggacgcggcacgagagtctgggctctaaaaaatcatcatatatactactagcacgggccgatcgatacggtgtttatatatagtgctaatgatggtatgaaccgtagtagtagtatctttctctggaccgagagttgaatacgaccgtctgatcgacatggcacggcacgattagttcgtgtgttagcagggacgacggacaattcgtttggccatctacccaagagaagagtagtctcttcagcgaacagggcaggcagcgacccgaagttgggtgcgcgtccacggagatgagtagtaccagtaccatatgatatgattgcagcaataagcaggttcgttcagttgccgcgcaggaatccaagcgtgcaacaacagatggaccgtgtgcatgcacgaccgcgtccagcagtgtcacggcgagaggccgccgcccccgtccaaatccaaacgcgcgtgtcgtcgccgtcgatcggcagcagcacgcgcgaaacagatctctggccgggtatatatgcatcccgg

SEQ ID NO: 99684 - DNA, 330 bp, Zea Mays
attttgatggagcccaagttttctagaccctcttatagtggccaaatgtgcaggatcccaggaagagacccttgtaagctgctttcgccaaatactttccatctcgagctacactaaagatatgtctgtcttcaatgagagggtgcagctcaattttggagagatagtcccagagctttaagtaatctgccaaaactccaatagtaagaccacctctaatgtcagatatccatcttctgtttaacaaggcctcatgaattgttctactttttgttatcttctttgggattatagagtatagtctaggggcaatggtcgagatgcttttac

SEQ ID NO: 99685 - DNA, 305 bp, Zea Mays
cgaccacccaatcaccaagtcccctaacacctttgctttacttagtcaacacaatctacttatccatcttgtcttgcacttatcagtacccctaggtgtcacctacctcaactagtcctatggcttctctagtcccttataccaagtctcaatgtctattctttaaagctcttagtccatcaacacgagcccaatcgaccttcaacatcattgtaggtcactatctctattctccacacttgcacaacacaagccaagagacattttgcatagcaccacactcacatcatgattagtctccgaac

SEQ ID NO: 99686 - DNA, 714 bp, Zea Mays
taggccagcttcctcgaccagcgagtcttttccgtgtgtcccaaggagtagggttttgcaggatggcctttctttaatcgtgtcgctcaccctgtcgtgtccaccttgctttcggttccatggacccttgtcttcttcgcttggcctatcctccctttgcttgggtgttccgtcactccacccatggcggactggcgctgatctttgacaagtcaggagaaccttcaggccctcatcaggcgtggtttactggatgaaggcgggtggttgatttcgggtgccaaggaggccctgacatcgcctctcggttacgtggcttcgtttgttcgtttccatgagcggggtctcgctctcccccttcatccttttgttgtgactctcttcaagtacttgcaggtgcaactccattttttgaactcggacaagatccaacatatggctaccttcatcgccctatgtgaggggtatctaggtgtcgagcccaacctcaccttatggtggtacttcttctgcgtcaaactgttgtggaagagggaggagcaaagggtaacataagcgtggccagtcggatgcactagcattcgcctccgcagcagaaggtcacaccacaaccttttaggccttctttgacatccctattcccctttccctttgctaacaagggctggcacacgcgatggttttatttgcgggatgccggctgggggccttttt

SEQ ID NO: 99687 - DNA, 315 bp, Zea Mays
agagcttcacctctgaggtgcgggtctttctgactgctgaatcaagaatcttcactggcttctcacggtactgaagatctttctgaatctgcactgcctcttcatcgatgtgactttctagtgcttgcaggcatttgtggagctgggatacgtgaaacacattgtggatgtcagacatggactctagtagttcaagacggtatgctgcgggtcctactctgccaatgatgggataggggccgacaaatcgtggtgctagctttccttttgcttggaacctcctgacaccacgcatcagagagaccttgaggtaga

SEQ ID NO: 99688 - DNA, 341 bp, Zea Mays
aaacttggttgagggaggactcgatgtctaggcctctaatgtggagagtggagtgctcgatgtgcttcagatgtcggctcttgtgtatgctttttctctccccctttggtcgccgcttctttcttcctccaagaaaaggggggaacctatgtacatggatgcgtcgttcggaccagtcggatgaggctttggtcttgtcgtattgcctctttgggtgtccatcgtccaatgctcagcatcgtcccttcttatcgtgttactgtcccgaggcgtgctttgtcttgtctgtggcggtaccacccagattattctagcttaagtgcctaagtctcgtcttagag

SEQ ID NO: 99689 - DNA, 346 bp, Zea Mays
gtaaatatggtcactgttcagaaaacactgcaatgagtgacaacatcaaaggtccatccaatactcacgaatataacttgaattactcattcacattaagtgttatactaaggaaagcagaagcagagacatgcttaccatctttctatgtatgtgaacacacaaccatgctgccaaacacaagacactgaactaactcaggaagtacaagtgcagactttatgcatcactaactgttcttgttgatacaacacgcgccaccaccaatcttgataattaaatcaggatcttcaatgagctgcctcactaacaacaggttcatagagtttatcatcactgccgaata

SEQ ID NO: 99690 - DNA, 428 bp, Zea Mays
acctaccaaataactattcaaaatcaaaaagaacttgttgttgttgcatagacaagtcaatcgaaggaggttttccacacattttcatactattttctttacattccacaacacattcaacaccaagagctgaagccacaacctttgggctctatttcttcgactagtccttcacctagtcattaggcaactcctccaccattcatcctaggacccccaccatatgagcaagtacccatgggccacccttagtttccagcataggacatgcatcatcaggatagaagagagccttctgaagctcgtatagtgaatattatggtccctgattccaagcacatatattagggcctcaggagctggatcgaagaactaaagttgtaaaaaaacaaagagatttctttctattatattatgttttatcttta

SEQ ID NO: 99691 - DNA, 471 bp, Zea Mays
agacccacgatattctggataacctaaagtgagcactaacactgttttcgggagtcgctaacagtttgcagaaacctcccccaagttctattccttcaccgcccgaggtccacgacgacgaacagcgcggggacgaactccggtgagcctgtgccggtggattcatgcaactaccggtgctcccaagcggcagacaccaaatcagacccctcccgagcatttcccctcaaacaatttcaagaatggcgacctagtttgctctggccgcagtgaccgtagaccatgcggacagttgaacgcgttcccggcgattggtggcggtctagttcaatcagatgggtcgacgagcatcacgggtatgtgagatcactcaaacgagagagcagaggggacgagctaacctgtatcgcgctggccacggcgaggtgtgttttatggtggcggaaaccgtgattgggggaaaagagcaat

SEQ ID NO: 99692 - DNA, 310 bp, Zea Mays
ggcccatgctcctaaggtgctcagagtacgagtttccatggagtatgccaactaattgtttaataacatctttgtctttctgttgacattcttcgcggcacttacaataccgatgctcaagattgggatcatcatcgtaaaagtaaagctcaaggtgtttatgctccgccccaccttccctaccaaatgacttgatattgtggtacatcatgccttgtgctcggaatgtgtatataccagaatctctcacattagttgtcatactatcgaggcaacaatacagtgaagtgaaagagaaatggccattaaa

SEQ ID NO: 99693 - DNA, 352 bp, Zea Mays
cgacccgaaggcgtggtggtgttcgacgcacggagtttttggtctagttgatcctgtgtcggggagggagttgcgccttagtgctagcgaactcggtgatgtagattttgggccccgtcaggttttggtggggtccattcggggtgttttgtgcttgggattgtgttaatgagtctgtccttggcctctttagcaagggcagggagcttgagatcatgttgcataattgcagggaggttggtcttataccaaaggaggagcccccgagtccttaattgcaaggtcgcacgattgcgtcaatgttgggtgtgttgtgttcgtactgagtaataatgtactttgtcaatgcgtg

SEQ ID NO: 99694 - DNA, 381 bp, Zea Mays
tcatctacggtcacggcgttttcttcaacctcagactcgccgagtggtgacgctgcacccgcccgaggaccacggctgcacgacgaccgacccatagattgccagaaccccagaattcaaacctcgtgcacgaatcgttgattaaaatgtcacttctcaaagtcaggaatatggcgaagcaaggggaacgtccttatcagagatcatcgcgggtaaatctccagccacggtggtgagcagtagtggtgcatcggcgaaggattccggcattcaatttgcatggttagtcctcaagaacacatcgcctgatctctggtcggctcccgcggacaaccagtacgatgcagcccgagtgatggcgttcatctcctcttcctcgct

SEQ ID NO: 99695 - DNA, 408 bp, Zea Mays
agggcattattagctaggcgcatcatttttatttgtagacgtctgatcgggacagtgagcagaacctgagtttcccaagatcgctggacctcatcgacgaaacccggtcgaaccgcgcaaaaactttggacctgaacattgagttcctggtcgggagatgcatcggaagtgatagactgatagtaacgtacaatgatcagagattgatgaagaaagagcctgaaggaaatgggtgggggtgttgctgttcgcattgcttagagaagaacaggtggtctagttagttttagggttttgtttgtatggcgtgctgggtttctagtgggctgttttgctagtgctttttttcttttctttgcccccctctaccctagtgttgtctttccttttcctttccggtgtttgtaa

SEQ ID NO: 99696 - DNA, 459 bp, Zea Mays
aatcgatgtggtcgaatgccgaagatcgtcgatgcggtcttttcgacattgctttagttttttgcaggggattttcacgtgtatattacatggctctgcctcattaaaaatctcacccccgaaaggaaaagagtgcgggccggaataaaactgtttggtgaattacaagggcgtgttagccctgaggatttaaacaaaaaatttacggagattgtcaatattccaggaatgttccaggtcttcgccagattgcgttgttagtctgtacgcgctgggagacgacttcgtcttaacgataaatggtccttcccactttggctccagcttaccccgtgactctgtctgggttgtgcagacaagtacgaggtccccttcgttgaattctcttgggacgactgtgtggtcgcgccaggccttcgtttgggcttggtatttgttgagggcctggattgcgaagac

SEQ ID NO: 99697 - DNA, 453 bp, Zea Mays
caagacatcattcgtgtgccggacgatacggctcatcagatctggggtgcccttgaggctcagttcctcggcaaccgccagactcagattctgtacctcgagaccgccttccgccagcttgctcagggtgatctctctatggacaagtactcccttcacatgaagacaatggcagacactctccgcatcctcggggcccccatcaccaatgagagcctcgtgctcaacctcctacgcgtcttgagccctcgcttcgatcgcgtgactctcatcctcacccgcatgaagtcatttcccacctttgcagaggtcaagaacgacctgcttctcgaggagcttcgcctctctgccacttcgacctttgctctcgccacgacgctctacaacgcacctcggactgccccctctaactctagggggttcctcttcaccacacttcggcaccaccgcccc

SEQ ID NO: 99698 - DNA, 641 bp, Zea Mays
tttgtatcactctttctaacagtgaatccaaccttaccggcataggtattgtacatctgataagcaactttctcatactctcaaacattattcctattagtggtggctctaacgatgcttcgtctaccgttgatatcaagatcgactccatgtctgtgtttctccaacaagaataagatcaagtgatcttgaagttggctgcatcaaacttggtggcgatagaggagacgagtatgctggtggagaggaagatgatgctgacaatttgaagggtggtagcgacggttccgcgacatatgttggtggagaggaggatgccgatgatacgatcagtggcgcagcggttctatggtgccgtgttggtaggagatgaggaggatgtcgatgatgacaccagacgaaaacgaggacaccgatgatccgatcaatgacgacaagggttctacggcgccgggcgctgtggtggactggtacaggtagagccgcgatgccaccaggcggagccgtgcctgctcgctcacacgtcaaaacagagccgaacgcaagggagccgaagggagtggagccaacagccatgcggtcgttctttgggcccatcctccagttttgtgaagcgaccagagtttgtaggacggatgcac

SEQ ID NO: 99699 - DNA, 407 bp, Zea Mays
cgggaacagtgaccagagtgggggagcaatggtcgttatttccgggcgtgcgtgatcgtagttggtgaaagtggatgggacccatcgctccctctttgactgtggcatcacgtggggtaggtatccgaatcgtcgcattaaatgcacacgtctccacggctcctgtgacctttgactgaggctgtgcttgggtttgtcctcctgtccgagacagacaggctcgggcgaggcggaaactgccactccgtgaagagggtacctcgggcaagacgaggattttctcgagtgctgccttcgccagaagacaggcttggacgagacggagttttgagcgaccatcgagcggggtcttgggcgaatcgtgattcatccttgcttggccaggggaacgtgtcttatgatttttg

SEQ ID NO: 99700 - DNA, 398 bp, Zea Mays
aactcgcaccgcttggcccagccagccgctcgcgcgaatggccctgtccacgtgccccacatgcatcagctgccgttggaaccactgctcaacccgggcaccactattcctcttcccgaactgcttctcccacttggcacacgcccacgatgtgaaaatttagcaattgtcgctcgttcaaaacacccggcccgtctctcccctccttcaaacatccaggaaccacccctcgcacctatcgtcgtgcacacacaccttgtcgttgcaccatgagctctgtcgtgctcacacgcccggtggcacccctgtgccttgccatctacgctccaccctaaccgtgcatggtgagatgttagggtaagcgtctaccctctctcctctcccttccctccttcccc

SEQ ID NO: 99701 - DNA, 411 bp, Zea Mays
gtcacctatgcataaacaatgcgtagtgatgtgaaatctgtagttgatactttgcctacatccacatcttccatggacgacaaaacttgggcaacagtggtcatgctgatgaccggaagacaaaacatgacaaaactgtgttcagcttacgaaaattgtatttcttgtctcaaaagtaactttggcccactgctagggcatgtactgatctaggagtacactaaagtgggagtcttgggtgttgtgccaagattccaggatttctgggaacttgttgagaataatgcttagacatcatcatggaatactggttacacatcatgatgtgtcatgaaacgatttgtctcccttttctgctgtatattgtccttgttagatgcaattgtcttactacactttatcttaacattc

SEQ ID NO: 99702 - DNA, 1373 bp, Zea Mays
caggactccagaatgggcacaaggcagtttctttggacaaagggaagggccgttgaactggagaagcagggaagactgtgctcatgcagaaagccaatatttgttctcacaacgtgaattcccgaagcggccatatttggagacagagcgaaggcatggaggtggagtgtggagcaggctagggagaagtatggggagtcggcccggggctattaccatatcagaagaccccgaggagtcgcgctcgcagattcaaaagaaatggtctcctcgcaacccagtggatgctagagggctatgtatgggcaaaaaattagaagggggaattattgttgatgggcaaaatgagccgctgaggaaaagctgctcaaaaatcatagtgggaacagtggagtgcgacatattaaatgctgcagaaggttcccaggcagaggtggcaaagcagaatggtcaggtggctgtcataaagaattacataaagaacggtgaagaagtggcggccaagccaaacatagtacatggacacgtagctgctgctgggataaacagattacaggtgatcaggccacaaagtggtggtggacaagggatgagcagcaagcgcatgaggcttgacgtaggggctgcacgagaaatgaataattttgctagctgggatggtgaacgcagggctgaaatgattgcaaatcaacgcatagttggtcccggtgttgtgatggatggccactataggggggagcatcacacattggccgaacaatcaggttgcaataataaacaaagagcaataccagcaagaatgccgtttagagaacatgttgatacaggtggaaaaaatatgttgattgatgtcacccagaatgtaggtcctactggtcgagcttcagctggcagtgtattggacgtggggggcaagaaaaatcatggttcagttgcgcccggtacaaaaccagcaccgagatggtgtccacctgggttaagtcgtacgcaaaagcgtcgtgtccagcggttgaggactatggaaatgacagaaaagatggaagaggaggaacgtgacagatggtttaacgaggataggccaatggttatccctaagaaaacatggagggagaaacgattggccagggaggaaaaagatgatgacaacagcagtggttccgataaagaagaaagcactgaagcacaaggggacatggatataaacatggtgtttgttttacctactgagttcagagcaggagagggagatgtggctgagctaacattgggggctgagcgtgctgtgtttgaaaaaacaagtgagcagggatctcatctaaaaccattatatgttcgtggtcacattgatgggaggccaatggggggcatgctag

SEQ ID NO: 99703 - DNA, 491 bp, Zea Mays
caggcccacaagcgaaggggtcctcgactcaaggatcaacagttgacgagaggcccataggcgaaggggtcctcgactcagataacaatcgctgacgagggatccacaaacgacgaccgcaataggtcggcaatagctaagaccttcgccaatacgtcgactaaaggacttccatcattcagccaggcgtagcgaaggctacaaattagctccatatgccactggtccaccagaagacatctctagggcccaactgttagcgtagcgtgtgggtgtgttatctggtgtgcaccgtctattatacgaacaacactgtaattacactgttacatggaatatcccctatatatagatggtagtcaggggtaaggttgtactttggaccatctaccccatgcgcgggcgtataaatacccccttcctgtagcgggatgtgacacgcataacaagaagctacaattttctactgtttgtcttgtcgtgcacctaag

SEQ ID NO: 99704 - DNA, 283 bp, Zea Mays
cagtgatgtacacgactgtggggtcatcctcaagcagttgctgctcttccaatgcacacatcctggccatccaaacaggacggtttctctgaaagggcggaaagaatctgagcagggtgtcggccacttcttcttcatagatctgacatagggccctcaatgccttgcgagcgacgacttggcaggtgtctttgaatctgtgcccagcggcagtgacactccattccacatggtgcggactggatccaatgtatatattcacgacacacttctctgtgccatg

SEQ ID NO: 99705 - DNA, 437 bp, Zea Mays
atcctaaaaatgtagtttccttaattcagtgggactgatttaaccatctagattgttaagtgtgaggactgcttcaatctgtaccaagtccctgaggcgatgaagataacaacaacatccatgaatatgcagggaaatgcagcgcgttggttgcaagtgttcaggttgaagcatggtttaggagattggagaagcctagctagagctgtgatggagaaatttggtacataagaataaccaagggctatgtggaagctgatgactatgaggcagaaaggtgttgtagaggagtatgtgcaggagtttgaagaggctaggtatgctactcgatgagactttctttgtgacatagtttatcatggggctgaagagtgagattcaagggcttgtcttgtcacaagtcccttctactatggacagagctatgttattgaccc

SEQ ID NO: 99706 - DNA, 513 bp, Zea Mays
ggcctcctcgccttctgctatatcaagacactcttagagggatgccttctcctttttaagttccttgacctgctgctctaagctttccacccgggagtttaggtgggtgcagtgggaggaaaggtcgtcgtagtggttatcgagagtgtggaggtatctggccatgtagacgatggtggggtcatcctcagtaggatctctccctgacagggcctgaagtcttttcctccaggtgggggtatttttgttgctaggtgggaagtaacgaaggggggtttcaaaaaacctctctgctgtagtttaggcatagctgtttaagggcttttcgggcaacattttggcaagtgtctgggaagcggtgcccgatgaaggtgacttggaagggagggtggtttgggtaacttcggctttctcccaggtagactgccatagagcacttctcaactccgttttcgtggtattctttccagacatattccggcttcttgcggatccccatgcgtagcgcgcaac

SEQ ID NO: 99707 - DNA, 402 bp, Zea Mays
tattcatcaagtacataaagaaagctggcgcattcgtcaaactgaatgacatgactgtgaactcataaagcccatacttggtgataaatgcgatttttgatatgtcctaaggtcggattctaagctgatgataacctgaccttagaactatcttcgagaacacactggctcctctcaactgatcgaacaaatcttcaattctaggcagggggtacatgttcttgatagtgacttcatctagagctcggtaatctatgtgcatcactgtggtgggccaaggcaaggtgctaggtctgatgtaacctttctccaacaactcatctatctgcttcttcagttccaccaattctggtctggacactctataagctctcttggaaagagaggtggtgccagggataa

SEQ ID NO: 99708 - DNA, 377 bp, Zea Mays
tcccctatcaggtttggccatgcccaaccctaggctcagtgccacagggttcaaccaagggtgggttattttgatggttgacgcatcctcttcctccaggtgaccaataggccccagtgactaggggctctttcctcagtgcaccctttgactggcgggcctcgggatcgtatccccgacactagagttaactcacattgacttaccatagcctacgagaactgattaattcttgacatgtaatccacttcagtcaggtaccgacgtaaattaactatataccaatgggagttcctaattcccattggcaacaccttaattctagtcaattctaagccaatgggaatttcctaaattcctattgtggtagctatcac

SEQ ID NO: 99709 - DNA, 303 bp, Zea Mays
caagtatgatgtagttgcacacttgaagaaaataccagctatgctttctgtgtatgatgccttatgtctttctcccgatttgcataaagcatttgttactgcattatcctttccagaagattatagagccaaagtttcccaggtggaagcgaaattagctcaaactcaaaacatgacttttgctgataaagatttgttattggggatcaagaaacataatagaccccttctcatgcttggtgagattgatgacttagtcattaaccgtatcatgattgatggtggttcagctattaatttgtt

SEQ ID NO: 99710 - DNA, 291 bp, Zea Mays
gtcatctagatattggggcaagggagcattatactagcgaggtggcatattgtagcccatgtgtgcagcaaactgacataaattatcatcatgctcacgagcctcgtgtcgctgctccatggtgtcagtagcgtggctgcgatagatagcaaacataccagcaatgcttctcaccaggtgcatgaatgaactgggcctcctaccacgaccctttcctcaatcgtcgcggtccattggacgagaagtggtagaagcacatgaggaagtctcatggagaggtggctaaggcgg

SEQ ID NO: 99711 - DNA, 646 bp, Zea Mays
gggagggaaggatcccatgtccctatgtttgattgaggcaagtgacaataccgtgaggaagagaaaacgtgtgaagtgttcccttcttccggaagccgtaagctatcctatttataggcctagggggagcttcctggaggatgagaataggccaggcactgtgagatgtctttgtatccctatagatggtatgacctgaggtatggtcttgtacttgttgttgacttgcacctgcttagtttctgctgagagccaaggtcgaggccgagggctcggtcacctaccgagcacccctggcgagagattgcccataccgtaatagttgacacggtgctaagtatggggaaaatcttcttaagtgttgtgtgattgcttcagctctgcagtattcgatgacattggggcgtcctccgttgtggatatcgaggtcagagctgggctcaggtgaggtggaagtctgcccgaggtcacgaccgaaaccgtcttgagattcaaagacatgcaccacggttgaagaaatggcctcctgtgggattcgcgggggagcaggtagccgagaccgggcgacgcagagttttgtgtggagggcaagttatgcttcgggcgagacaaagtttgcgtccgagggctagtatgtgttcctgac

SEQ ID NO: 99712 - DNA, 576 bp, Zea Mays
accagcatgacgagtggcattccgatctgattgactcatgcctcaaggcgtgtggttggtgtgcagaccatcaccgatagagcgagcgaccagaggtgcaccgaaaggacggcaaactggacctggacctggacctctgtggggagcagggtttgggccttgcgatttccgatgatgagctctcccggctcttgtctagacggcatcttgggcctcttggatcaggaacagagtacattttcttcctttttatatttaaagtaaccaaaattgaactttaaaatcacaatataaaatctaaattttgattacttttaattaaatacatagggcgagggctttgattgtcagatactaatatcgcccccctcgccccaactccttaatcctttttttaaaatttactttgctatgcatagacccccccccccccccccccctcttcataccacaagatcgaccagtaaatgttgaaattaatgtctccgtagctactttttgtttcaataaacacaccgccttttaccttttctctccctctctctctccctgaaatatctgcacataaaagctttc

SEQ ID NO: 99713 - DNA, 388 bp, Zea Mays
ctagcatctcatagaaagcctactacttcacattgcaattcatatagaaccgcaaggtgacaataataacacacaagtaatcgacccttctctatgaccttcagttaggtcaccaacagacgacatgatgactacgaaggcatgtcaccatttcatcacacccattcatcgcctttagacgcactaattcatttcttgcgacacatgcactcaaaatcaatccacactacacaaaatacacttatctcttatttatgcacagacttaacacctttcgggataaagcgtcactataaacaccttacacataattgccttaggaacctattagttcactcgaagacatctattcaagtcataaacacaatcatacacttatttgtgaagc

SEQ ID NO: 99714 - DNA, 1027 bp, Zea Mays
gcaattgacaagtattttttggaagttgcctccctgatctgcagcagtgatctgtagataagttccaatctttagtgaaagatctttatggaaaaaataaagaagtttacttgtgaagcacttcataatatgaaattatgtggtgtcacgtttgtgctcacatcattaaactggatgctaaggacatcgctggagtaaaccgcagaggaggaacgggccttagttgtgctcttttaagttgaatagattagtactgcgtcattgatatgtgagagagattgacccgtaactactcttggtgactgattgatggaaacacgtcaatttgggttgttgataaacttgtaatgtcattcaacgtcagtatccaaacaacgactaaatcaattaatccatttacatcaaagttgtttgtaagaaacttaggcacgcattcacttgttgtcgacatccttactccatggccaatagttgttagctaagcattcatatattcatagcagaactaactggcttataatacagtatgagttgctagaagctatatttcttctagatgaattcactccacgggagtacagtaccttctatgattaagaaagatgggtacgcagtttgttttctcctcgtcactacaaaggaatgcatatttcttttatgttacactgttatgctgtcttgtttgatccacacgaaagagtgttgctccccctgcactttgcttggttagaagctgtacttgcaacaaaaacaacatttcacagcaacaagttgtattgttagttactatcgatgttaatatcagttactagcgaaatatatgctctaagtaatacatgtaggtgtaatgcagctcagcgctgtttgggggagagagttcaatcatttctcttgttcaatggtacactcactgttgtgtagcaattgaagcattttggaagtatggaaggtagtgtcttagacagttgacatggaaactgggtgaggcgaagttgtcacttcaaaatatcatttaattgaatctcct

SEQ ID NO: 99715 - DNA, 314 bp, Zea Mays
ctgcgaacccagccaagccgggccttgcatggaaacaccatgttcttcatggtatatggatcggaagcagtattgccagcggatttgatctttggagcgcccaagctaacatttaaaagtatagctaaagcaaaagcaactaggctggaagatgttgatatattagaagaagaacgtctcaatgttgtcattcaatcggctagataccagcaaaccctgaggtgctaccatgacaaaagcagtgtggtatcgatccttcgcagtaggagacctagtcctccaccgagtgctgacgagagaagggtgacacaaat

SEQ ID NO: 99716 - DNA, 450 bp, Zea Mays
gaaaaagaaggctggctccagcgaccggccaccaaagcgacctcgcttacccacccaggtgcgacagcaggttaggccgattggaccaccacaccaatcggaaaggacgggaggtcataatgttcaactaagacctaacgtacctacatggacacctccaccaccatatccacctatgccatatccatacacatacatacctccaccatatgtcccaaatcaaatgtggagcatgccaccatatccatttgggatgccacagtaccccgcttggggggcacctcaaacatctgtattcaataggttgacatctccagtacaagatcgattgggagcccctcaatctggtccacgagcacatgcccaacaagattgtcgaacaactcggccccaaaggctgactaatccggcaggggggcatacagctacaacctccaacagtacgaaaaa

SEQ ID NO: 99717 - DNA, 385 bp, Zea Mays
atttgatgctattggcttcgtataccctgactattgttacacgctgcgagggcaaggggtaaaaagaaatattgctacttctagaaaagttgctgcttcggccatcacagttgagccgaagggcaagaagataaaggttctaactcaccggccgcgttacattgaaccggccgtgatacctgaatttggcaaaggggcctcttcagctgcggaaacaaaagaaactgctccgcctgcgtagagcactgaaaagccgattgtaatgttgaagttactttcagtcgagctagttgagacgaaggctgataaggctgaagggccaaaaattgaagaaacaacataaatgccagagattttgagccctccaacagaggtaacagtgtcg

SEQ ID NO: 99718 - DNA, 777 bp, Zea Mays
atggctgtaatagcccagcaggtgaagatgttcggacttatttctttgacagactgcacagccccgaacaaattcctgtacccgtctcctgatatgggtattgtggaatgagctcctccatctatgcaaggtcttctctactccctcatgacctgctgcatgagcagctatcagcaactgatcccacacacttgaattatctggaacgaagactctgccccggcataccaacaatccatctctttcagtccacccttctcctgcagttcttgccgccaactgtgtctttagttcctggacttgcggatctgtcaatgcttccttcctgagtgtatcaaagacttccagagttggggtggacagcagattcactgctgctgttggttcctcatcccttcttgataaggcgtcagccgcgccgttcatcttccctggcctatactccacctccatgtcatacccaaatagtttgttgacccacgtgtgctgtggtatggtggataagcgttggtccagtatgtatttcaaactaaagtgatcagttctcactgtgaacgctcgtccccacaaatatggccgccaattgcggactgctttgacaagcccaatcagttctctctcatatgtggaagtttctggtgatgtggtgccacagctctactgaaatatgccactgcccctgcaccttggtggagaactgccccaaaccctgaacctgatgcgtcgcagtcaaccacaaatcttttgctgaaatccggcatctgcagcaagggagcg

SEQ ID NO: 99719 - DNA, 402 bp, Zea Mays
ctcagcttgtcagcctaggctctggtaggttctgcatcgcagggttctttcaacctttgaatcccatggccatcagcaataccagcctgaatattcatagctgttactagtgttgccattatgtatgtttggtagcctggtaggtgtgacactagcttgctactgaaccaggaaaacctgtagatgaaacctgggatcaggagaacccagtccaaaggtcaaacagagtcggtcttcacgacaggttcagcatctgggtcctatgttatccttcagtttgagaaacatgactctgatgaggattcagaggagaaacctgactctgatctgatgacaatttgaaggaacaatcaggctcaactcagagaatacacaccccctgcattacatttatcgttcttc

SEQ ID NO: 99720 - DNA, 407 bp, Zea Mays
aaacggtatctaccctctaatctagaccacacagcgtggatccaacgacccaagcatgagcctccccatctaggctggagcagagcggtagagatgagttccacaacggagcttccgctagcgatctaagaatcagcgaccccgagccctaattacagcgccgattgtgccgacacgatgcaggggtaaaagtgaactcagaggggacagtcttactcacaacatcgatggaggtggcgtagtccacgacggtgcgcggcacgacgtcttcctcatcgactggcaagaaatccctcgagccctagaggtgcttaactcgtctcgaggacacgggcggccaccctagatcccggcgcacgccttcggccacgcacagaggccgggacgtcgatatggaaggaggtcac

SEQ ID NO: 99721 - DNA, 933 bp, Zea Mays
ctcgtgtggtgaagtgttcgtgtaccaagtgtcggaattttaagtatgttagaaagatcgaagaactggagcatcacctttgcaagaatgggtttatgcctaactatcttgtgtggcgctcacatgcagaagtagagcagaatatcacagagtcagaaataattgatgatgacgaggaggatcggatggatgacttggtggctaatattagtagagagtatccaacattggcctcagaacaggctacaccagatgaagtgtaggagttttataagcttcttcacgcgtcagaggaaaaagtgcatgaggacaccactgtgaccgtgttgcaggtggttacacatcttatggcaatgaaggcaaagtataacttctcgaataattgctataacgatataatcaatctgattattgatctcatcccatcgtaccataagatgccaaaagacttataccaatctaaaaagattgtgtccggtctttggatgaagtataagaagattgatgtgtgcgaagataattgcatgttattctggaaggaatatgaagcggccacccattgtcagaaatgcggtaaatcaagatatgcggatgtacgaaaagaggatggagctacttttgctacaaaagtggtagttaaacaacttcgatatatgcccatcactccaaggcttaaatgtctgtttttaaccccagaaactacgaagctaatgttgtggcataaggaaggagaacgtgagatccaagacccagacattatgatgcatccatcagatggtgatgcttggaaggctctggatcattttgacccagaatttgcaagagacgctaggagtgttcgtctaggcttgtccactgatggtttcactccttacgacaacagttcaacttcatactcttgttggccggttttcatcatgccctacaaccccc

SEQ ID NO: 99722 - DNA, 307 bp, Zea Mays
cgacggtgtaggacacctttaaattggtcagaacctagagaacgatggtatttcaaacctgacttagtcaaggaaatagaagcaaaggttcaacggataaggcaccacttgaaagaagctcaagctcggcagaaaaactatgcagacaaatgacgtcgacccttgttctttcaagtcaaagatcatgtgtacctgaaagtatcactaatgaagggtgttaatcgattcggggtaaaaggaaagttggcaccctgatacattggcccgtttcccattcttgaacaatgcggaccagtggcgtacatac

SEQ ID NO: 99723 - DNA, 341 bp, Zea Mays
gaaggcctgtgcgttgtccgatcgtgtagcggcggccatgattgttggagggtgtccagtcggctgggtgtaggagaaggaacgggcgccgttgttcaaggattgtgcggtcagtgtgggatagaattgatagtgtgctgtggatcataggattcggatccaacgtgtgaggatgatctcgggttcataagtgtctcgggctaatcctggcggtcgagttctgatcgaacggctctagcgcaaggataccctttcgccgagctgtttttcacatgagaccctcagtttattgagaacgaacccgccgtccagtagggaggaagtctgtgtcttgggaagaa

SEQ ID NO: 99724 - DNA, 693 bp, Zea Mays
cgtactgcgtacgttactctagtagtaaccggtgaatggtgatggatggcagccacctgctgtcctctcgtttcaggtaatcatcaggtgctcctgtaatcacctaccacctcaagtaggatggaactgtttcgaacctactcttctgcaagtaattttttttgtgtgcgtgttctgtggttcagatgatgagtttggtgggcgcaatatttatacggattcgagtctaacgtctctacatacaatatacggcggctcgtgctactgacatctttgttgctcaataatcgtaatataggtcacaagtgggcgagagagaggagctcccaagtctcttatgcgtcggttgacctacaaattacgggactagagttctaagctaagtcttagacgtctcgccttggctccaccctccgggtcttcaggtctcatcgagcgtgagtggtcgtcttccgtcaaatgtcctcctcgtggtttttcttgtggtcctctccttattttccatacccatacccgcatacccaatggtgcgaggattttgttctatatttatacctatgggatattttttgtcctatatcctaatagtataatttcccacgagttagcaggtataagtttccattgacatctctacgtgggaatgatacatgataccgcttgtcaatttctcggcaacagtagaatgctgga

SEQ ID NO: 99725 - DNA, 427 bp, Zea Mays
aaaccacatacaacaagaacaagcaccatacagataagagctgtttaattgatagttcccaaaaagtatcttacaaaaacaaaagttattacatccgcctttaagcggagccctagcctcatttctacaggtatgagctactcgacatcactaaggtcgcactggaagcgctcggccgccgtctccatgacatcttgtatgacctcccgggcaacgtcttcagtatcgacaaccagactaacggtcaccattggaggcgacgtcgaggccattaaagccaaagagataaaggcacgaaagacagagccgcagctcagctcgcttcacacctcatggagttggagctagaccagttcatggaggtgtaccatgggatgctggtgaagctcatgcaaaagatggagccgcagctcagctcgctttccac

SEQ ID NO: 99726 - DNA, 347 bp, Zea Mays
cggccttgtaagggagaatcactcctataaatacctgtacttggtgattgagaaggaataacagaaataatacaaccaaataccaaaatcgaagtccacttgcctaactgactcacctggtgacgtctcggctcatcgctgcagtgacctcaccgtcgctggaaatctcacgctgtagtggaaatccccttcccacggccagggggtcatcacatctggtatcaaagccatcggagccggcgatcgttgaagagaagacgcaacggctccctctgcaaaaccatccgtgcagacccggtttctactggaagccagggatgagagatcgagcagtgcaagggaattgg

SEQ ID NO: 99727 - DNA, 484 bp, Zea Mays
cgggagttgatgaggctatcaggggccaaactacatatgatgtccgccttccacccacagtcggacggccaaacagaggccgccaacaatatcatcgtcatgtaccttcggtgcttcacaggggaccggcccaagcagtggctgcgttggctaccatgggtggaatacatctacaacacggcgtaccaatcatcgctccgggacacccccttcaaggtagtgtatggaagggaccccccatctatccggtcctatgaaccaggcgagacgcgggtggctgcggtggccaagaccatggctgctcgagaggaactcctcgctgacgtctgcacgcggctggaacaagctcaagccatccagaaaaaattctatgacaagctgcaccggccggtctcctatgccgtgggtgactgggtgcttctacgcctccgacagcgcgctgcagcttcactaccgcagctgtccaagggcaagctcaaaccac

SEQ ID NO: 99728 - DNA, 402 bp, Zea Mays
tggccacactttgtaagcaatatgctcttgtaccaaatccctggtaccaatatacgtgcacacagtgttaaaagccatcaaacacgcttgcactttgttcccaattgcaatggacgaccttctgatgccaaagcgtgaccgtatgggacgttggataatgccctccacatcttcccactcactcagatcattcttcacatagaaccattatttcattcaagagcccggccacttctttcgaaatgtcggcatggggtatctcgcatcagaacgggacacaaagttgtagcacccgaagttattgtgatactgttccttcccagttgcttttgtctggtagtataattcatgaatgttacacaaacatttagcatctggctccagcccttggcttctcatggc

SEQ ID NO: 99729 - DNA, 657 bp, Zea Mays
atggttttatccgaagccatctgccatgggaaaagagttactatcatgcacatgccaatttttttcaactagttactttattcattacatcaggtcattacataatgcagcacacaactaccataagctcattacacgcgagagctatcgagggtacttccgaactctttctctaaagtatccccaaattccttgagaaggtcatcaaggctggctagggacatttcctcggtgtcggacgagtttcttatcccggcaggaggtagggctggaggggctccttccttttgctcagtctgacatccttggcttttggtcttcttgcagatttttcttgtgggggcgagcttcttcagtttcttgtcgtaatccatcttcagagtgcggtaggcctcacgggtattggtttcctcgccttctgctatttcgaggctctcttgaagggacgctttttcccttgaaagttccctgactttttgctccaggctttccacccgggaggttaggtgagtgcagtggagggcaaggtcatcatattgattatcaagggtgtgaaggtatccagccatgtagacgatggtggggtcatcctcaataggatctcctcctgacatggcctgaagtcttttcctccaggtaggtgtatttttgttgctg

SEQ ID NO: 99730 - DNA, 355 bp, Zea Mays
ggcaacaagaagaggaaatcaagaaacgtaccggatgatgattggcttctccccctctgacttatgtcgttgtgctgctaggaactatgcagggaactatccagaatatccacgccaccagggaattcgatgaagggaagaggagctatggcacatagagacgaagagaagatgagcgagggcgcacagagacaaagggaatagcgacggcgcactgacctccctaagatctgcgacggcgcacaggacctttgcctgactctatgacaatggggaagaaaccacaagcggcgaggaatccaatggggagacgagcaaagcgggaagaaggaagagctcaggtggaaccctagcg

SEQ ID NO: 99731 - DNA, 461 bp, Zea Mays
gctcaatggtcatcggggggtggcggtggcaactgctgctgagctgcatcttcctggggtgcctgctattctggctgagcacgccttcctagggcgcctgttctcagacatctgtagaaatcacacacatatcagatctgactttgcagtctttcagcataagaaaagatgtatggaaaatcttcataacactgaacaattaaccatcttcactgacaacatctcagataaagtggaaagtggaaataaagggattaaccaactaaataattgactttattaataactacaccaagtttcaggggatacccacaccttgatgacaatcattacaaagatccaacttcattacatgttcatcatgacaagcattccaacaaatgataagcaatctaactctaactaagactgaccaagactaagacactgaattaagcataattacagactctgactctgtc

SEQ ID NO: 99732 - DNA, 340 bp, Zea Mays
agttaagtaagcgtgagcatgttacaccggtaagtcgttgccgacttaagccgattgctccgttagcagggcatagtggtcaccccgagttaagtaagcgcgagcatgttgcaccggtttaagtcgttgccgacttaagtcgattgctccgttagcagggcatagtggtcaccccgagttaagtaagcgcgagcatgttgcaccggtttaagtcgttgccgacttaagccgattgctccgttcagcagggcatagtggtcaccccgagttaagtaagcgtgagcatgttgcaccgccttaagtcgttgccgacttaagccgattgctccgttcagcaggg

SEQ ID NO: 99733 - DNA, 637 bp, Zea Mays
ctgacagtgctttattctctgctccctgtgatttacatctaatttgtatgcaatttgattttccaaaacagggttggtgcgactggtgacgagattgtagaagctttaatagcaaatagctcaacatttggaaagaaaattgtcttctcgcaggttagtacaactagctagtattgtccgtgctaacgcacgggaggagggggtggggcggtggggtcatggggagagggggaggcaggggtttagtgtgtgtgtaagggatgagggacgaaggtcattggaaattgaatttgagtgagtaagatagagaagggttatctaatgatctgaactattggttttgaatatatgttacgcgtgggtgtgatttgtttggtggatttagagaagatcatgggtgtggaggtgatttggttgagtggattttgcaagtttaaactggtgggttatatagggtatagataatttcttgactttatttttctttggtcttccgaagtttcaaatttgttgacaattgatttgattaaatcattttgattgcagaagtacaagttaaagaaacaaaagaaatatgcacctaatgttctgataccacacccatctgctcagaggtacctttctattagtctttgta

SEQ ID NO: 99734 - DNA, 631 bp, Zea Mays
gctgtctacagcaggttgcgcatatggtcgtgtaaaacattgtacactgtattgttcacagagtaaagtttaaaacaagagatgacatgagagatggccagataggacgggtaagctgctagagacagattagggtgtcttcaaatgggaacaacttctacaacatcgtcaagaacggttgcacatcgatcaacagactaaactcgacgttgacaacatatacaccagcaaggactccaccaccaatgccatctacaccagcactcgatcattggagaaaagaactgcatagaatttttgcacgacaccaaagttctccattgataaatagagaacaatgcatcaaaggtgccaaccaaagccgaaagaggagcaacaatagaaacacccaccaaatctaacatccaaactaccctaattttttttctacagatgcatctaggatgtcatcagactacctcggcgtccacatctacgcagtcagcaactccaccaacgtagcccacaccatactgcacgtcaaatacatctacaacaacactatccctacctccggcaaaatcctccaaatttagacaggtgacacttgctttagttaaactcaagcattgtgttttctgcttaaagatcc

SEQ ID NO: 99735 - DNA, 610 bp, Zea Mays
atcccaggcccccagggcataatcaccatatacggagaccagcaggtcgctagaaacatagagagggcctacgttcccggccaacacaatgtgcacgacctcacatccgagcatgaaaaccccagtagtcctcacccaatcaaagaaaaaagggccaacgcccagttacagagcaacgaaggggtcaaaaaagtccccctagacacagcgagccccaatcaaacggtcttgttcagtgaggatctcatcgaagcggaagaagaaagactcatgtcctgtctgaatcgcaataaagatgtattcgcgtggtctgcccttgatctcgtcggcgtcagtcacaccatcatcgagcatagcctgggcatcgaccacaccgtgctccctaagaaacagaagttacgaaaaacgtctgatgagaaaactgaagcagcaaaggcagaagtccaccgtctactggaggcaaagttcactgagccaattgaagcgaaccaggtaagatacaaaccataatgaacatggccccgccgcaaccaacccgagatgtccaaagactaacaggaagactcacaacattgaatagattcatctcatggtccgtcgagcagagtct

SEQ ID NO: 99736 - DNA, 409 bp, Zea Mays
gtcaatacattgatgtattctccgagccacccaagtgcacctagatggagacactcctaatgtcctagcaactcgcattagggatgtgagatgagaagaagtatttccaaaagccctagtagggttccaccatgagggatgcgtcacattgtgccatgaagaagtatattggagttcatttggtggagatctagcccatggtaccaaatcatcctctgaacaaagggatgaagtggcaactcgatcctacacttgaaattctggagcatcaccatcacatcctctgctttcggtttggcttcatctaccccatgtgtcaccctccatgttaacatctctaccatgaattctttcatctctagtgcacaataggccattggtggctgtgtggagtgggaacgaccacaaa

SEQ ID NO: 99737 - DNA, 292 bp, Zea Mays
caaatttcttgaaagttttgatgaacatagttgtgtcttcatcacttgaactttcttcatcacttgatgtttcaaccactttctttgacttgtggtctttgctcttcttggaagaatcttgttcatttgaaatcaaggcatgagagtctcttgtcttgattggggcttcttcggactcgtgttgttgaatcttggcaaatagttgatgaggagtcatctcctcataatcatcacggtctcttatcatccttgctagactcttgtccttttctttgtaggctctcatgaatag

SEQ ID NO: 99738 - DNA, 466 bp, Zea Mays
ttaagatataaatctatttgaaatttataggataaaagtgctagactaaagtttgatttgttagagttttccttttcttcctgttatccctacgttatccctatggctcacctaacttttctatttaatacaataccaacctagaattaaggttagggtttcacacattccaacttggtatagagctatgttttttctctcccacctccctcacaccgtcgaccacctcacgtctccatcccccctccccgctgcgagcagtagcaactatagtcgtcgcctccatgactccttccccaaccatctgtaacaccctattttttgaactaataaaaatgtctatgatttagtttgatttttaagatttgagtggtctagaatcacaaattatagttttaagtatttacttttattataaaataattaaagcaaaatataaagttgaacttgctttgttgtatttatg

SEQ ID NO: 99739 - DNA, 435 bp, Zea Mays
ttaatttagacttagtatgaattttctatgaattaattaagttctggaattctttttatattaaaaattcattttctaaattcatttctcctattttctctgagtcccgggctgcgcacacaataacagagaacccagggtctaaaccataaaattgcttaagactcagttttcccccgcacaggacgacgagttgattgcatagaaacataagagttcttttgcaaaatgcgctggctgaaggggtatcatgagccatgggccgttggattaaatctggacgacccagattacatcgcgcgaagggttagactcgctctgatccgtaccacacgatccgcaatacacgactcggatttaaaacatcggaatcacatcatggccacccatcatccgatcgatggctggggcacactctgcccaaacggcaagcta

SEQ ID NO: 99740 - DNA, 963 bp, Zea Mays
aggcagtgctacctgccgacctcaggtttggggcaccaaggctggtcttcgaaagcatagctgaagcagaagctaccaggctagaagatattaacgtgctggaagaagagcaattgaatacagtaattcagtcagctagataccagcagaccctgaggcgctatcatgataaggctatacgacaccgatcctttgtagtgggagacttggtccttcgccgaattctaacgggagaaggacggcacaaattgtcaccgctatgggaagggccattcatggtatcggaggtcacttagccaggatcatatcagcttactcaaatggacggcacggaagtggggaactcatggaatatagagcatctcaggaagttttatccttagcaagacttcaaaagctatcagagcaatgttgtactctgtaattggaaaatacgtcatcaataaaagatttcattctcaaaggcattcaaactattggttatcaattgacttcgatttgattagacttggaatcaacgcacttactcgacttagggtgaccactataccctactgatagagcaatcggcttaagtcggcaatgacttaagacgatgcaacatgctcgtgcttactcgacttagggtgaccactataccctactgatagagcaatcggcttaggttggcaatgacttaagacggtgcaacatgctcgcgcttacttgacttagggtgaccactataccctactgatagagcaatcggcttaagttggcaatgacttaagatggtgcaacatgctcacgcttactcgacttagggtgaccactataccctactaacagagcaatcggcttaagtcggcaatgacttaatacggtacaacatgctcgcgcttactcgacttagggtgaccactataccctactgatagagcaatcggcttaagtcggcaatgacttaagacggtgcaacatgct

SEQ ID NO: 99741 - DNA, 323 bp, Zea Mays
gcagaagtcgcctacgagcgcggccggatcaacgaaggcacgtaaccttatcatacaaattatggttacatatacacagcgagggcatcacatattacattggctcaaccttcgagatgatacccatctctttatagttgaacaacattatcctcagttcctcaccctcaaaaagatttcgcagctccccctcacctacactcaccccaatcggcgaggacaacaattctcgcttaccagtcccgtccacgcgaagacgcccactctccatctcaccacgatgacgcccaccgcttcacgacaatccactcaatctccatttc

SEQ ID NO: 99742 - DNA, 643 bp, Zea Mays
cggatacttgagaacaggttatagcagataaccagataacagggcagaatcaataggggatcccgagattcggatgataaagccaacatgattcccaagaaaaaggattaccagatccaggtgaaagaagtggtagtcgcatgagatcgattaggatgagcaccagaatggttatgaagatttggggcaggatctatggaaagaaacatggctttgtcatggtttacgcaactagacaccaaacgattttttttgacataaccacgtgcacaaggaagttccggtttggctagcggttaagctatgggggtctacaagttgtgtaggtgcaacttcagggtaaaacacactagggttagaaaacaccaacacaagaatgaaattttttaagaggtttcacttgctaaactcaatgttgtttgggtgggggtctttttatgaacagagctagcaacaaatatttttgcataaagggttgaacatttacaataccacctagatagcaaggctagagaaacacataacacaacctagcaagacttcctaatctgacataaggtaaagcatttcttatagttttcataacatagcagtacatcacattattcacaagttcttattattggaataaaggtgagagaag

SEQ ID NO: 99743 - DNA, 351 bp, Zea Mays
tcatcaatattttttcgaattctgtcacgttcggcttcggctatctcgtgctttgcttattcaacttcaaactttttctgtacctcatcaattttttccttcgacttagacatttcagacccatgtgccccagcttgagctgccaatttagcttcgaggtcagcaatgtgctctgcattttgtttcttctcatcttccaactttaaaattatggcagaactgcccagattattccatctcaagtgcttcaaccatcgccaagaaggcaactatgcacttaaactggaataagctgtcagtccgtcgaatcaagtctgattaaccacatgacaaggatcgagtaccactttc

SEQ ID NO: 99744 - DNA, 288 bp, Zea Mays
cttatggactaaaatcgccttatccaccattgtgtgtgcaacacacattactttaggtggttacataggcaaaattattgaggtctatgtagaggacattgtagttaagtcatgtcatagtggtttgatcctctaggacttagccaacatgtttgaaagccttcatcgaacctgcatgatgctcaaccctaaaatatgtatttagtgtcttcgaacaagtttcttagttccttagtatcgcatagaggaaccaaggctaacctagagaaggtctaagccatagaatta

SEQ ID NO: 99745 - DNA, 371 bp, Zea Mays
cgatgtttcaatattgtccgaactcctaaaattaccagggagtttactgcttcccctgtcactccatgtatctgattgcccagccatctccaccaacccataaaagatgcatcaacaagctgagaggccatgttttggagattaacttgagatagtagtttaaaccagaaatcccgggcgaacacacacccaatcagcaaatggtcaggtgtttcctgctcccgatcacacaaacggcagctcgtagggtgatccatgcctctcttttgcaacctgtcagctgtccaaagctgtcgttgagtgaccagccacatgaagaacttggtctttggatgagcccatgttttccaaattctgtggtatggctcaaa

SEQ ID NO: 99746 - DNA, 400 bp, Zea Mays
cggcgattccctctctcccaccggcgttctccgaccaccggcggccaccatctccgacggtgctccggctacctcgggcccctctccttccctcctcggtgagctgccctgttctcctccctctcggttctgtgagcagaggctttcctatcctccccgtttgcaccaattccaaattcttcaaattcttgtcaaatccaatgaatccagttggtggaatgtgttcaattgtccctattatgtatccctgcgggttcttggctccttcgggagggttttcactcctcatatggccatttctctaaaaccctaatatctcgcccaccacgtgttcggtaaaatgcccaaaccagccaaaaatgctccaattgaacccaaatttttcaggcaccttcacaac

SEQ ID NO: 99747 - DNA, 578 bp, Zea Mays
tactcgtcgcggtagacaagttcacaaagtggatcaaggcaaagccattcatcaaactcaagtcgtcggaggccaccacattcttccgcaacatcgtctatcgattcggagtccccaactctatcataatagatgatgggactcaattcacaggtgaacccttcctctggttctgtgacaacttcaacatctgcattgactgggctgtcgtggcacacccacgaaccaacgaccgggtcgagcgcgctaacggcctaatccactaagttctcaagccacaaatcttcgtcaagttgaagaagttcgctagacaataggtggtggagctatcggtcgtcctctggagcctacgtactacaccctccagggcaacagcttgcacacctttcttcttatcgtttggtgcagaggcggtgttcctcacggagttggaggatggatccccaagggtccaagccttcaataatggacaacgaatggtagacacctagctccccaccgacctcctcgacgaagcacgagacatggtcttcatccgctgcgccatgtaccagcgagacttatgactaggaatggca

SEQ ID NO: 99748 - DNA, 627 bp, Zea Mays
ggtcgggttttgaggagcacaaaaaatcacggagcgaccgagcacagtccagttctgttaaacgtggcagagagtggtcatgtgtagtgtgcaagctatgtgtttcctcaccatatgcaacctgaaacacaatgcaggtagagagtatagtaatttatgaatgagttatgagaagcaagcatgcaataaatgtataactgaattacttacatgaccactaggtgtctgataaaaaaggggggtcgtgtaagttggagtgtcatgagatgcatcaatgtcacctccctgacccaaaaacaatgatactatgtttaaagcctcattcatgtgtcaattaaatttaatcgataattgagattacaatggagaaaacaaagatgaaacatatacatgtttttgcggtgtggcgtcaaacatcggcaagtgggaagacggatatgagctcatagggttgcagtctggtacatgtcgatgagacatgtttatgtcgctcggcatattattgccaacattaaaatggaaatcctgtatacattattatggttttgtctaatattttggatgcaaattggaaattaacatataatgtaaccatgatgagactgcataaaataccttgcttttccg

SEQ ID NO: 99749 - DNA, 425 bp, Zea Mays
ctccaatgactgggggttgtggatctccacatcatggttgagtggacagaggaggccgacgatgaacatctagacatgttgcacttcatcgagacagcccacgcgcggtagcagggcctagaatgtgtcatggtactcttccacggtgctggatcagtgacaagccgctatcttgtcgagtggatttgatcggagaggaggcccatggcgtaggtggaggagctccttgaaatggagccacaaaggagtaccctcgtcttgctggacttggtagtaccatagctagacgtcgtccttaaggttgtacgatgccatcaagaccttctcctcctccatgattcactgttgatgaaaataagattcacaatgattgataaagatcaggggatctgacttgcaatctgtcggtgtttggactcgaggac

SEQ ID NO: 99750 - DNA, 718 bp, Zea Mays
ctgtgttacacatgatcccgaggagatgatcgatgatggcggtggcgcaagtgaggagagggggaagggaagcgaagggaagggatgagggatgattcaaataaagtagttcatagggaagggagatgagttatccaactatctggaccgttgattttgatagtgtgttaagtttgagtacaatatgtttggtgaatttagtggggataatgagtatggggtgatttggttgtttgacttttgcaaagtttaaactgacgtattatacagtggtaagagcataactcttttctattatataaatatatgtaactttctatctttaacgtatacaactttatatcttactttctgtcttttaacgtacataccattctatatttaacgcaagtttttttattattattattttcccggccggtcccccctcccctcatcccctgtgcttccgggaaacaacgttctgaattcaacagtgcctaaattaagtgacagaaccctaagctttcatatggctactatatagcctatgttacacacgatctcgaggagatgatcgatgatggcggtggcgcaattgaggatagggggaagggaagggatgagggatgattcaaataaagtagttcatggggaagggagatgagttatccaactatctggaccgttgattttgatagtgtgttaagtttgagtacaatatgtttggtgaatttag

SEQ ID NO: 99751 - DNA, 510 bp, Zea Mays
cccaggcatgtccgatcaattcacaactccaatgctaatgatgaaagggctagcaatcctcagcatagccatcatagttctcagtcttcaagcatgcaacacacttctttcagaccatcggctccaaggggcaggggaggaagaagcttcgatggaggacgatttggcaatcgacctagaaagatgtactgtcttttttgtggcgaggacaagggccacacaacaagaacatgctagattacaattcagaagcagaaggaaattgccgaagctgaggcgtggcagagtcagctgaagcaagtcctccacactgcttcatgttactccccatacatcccagaatacataggtaatcaacaacctacggcttctgttgcttcggcaagccattccccagcctcttggccccaattgccaccaccactgatccacaatcaacagccagaagggcgcaatcatattcagcaacagcgcgaccttcaggaggagtccgaagctcgcacaatcaac

SEQ ID NO: 99752 - DNA, 692 bp, Zea Mays
attccttttccacttgcatcagtttcaatggtgaatgactaactgaagacaggtagagctaacactggagcttgagccagggtcaatttcaaagtgcggaaggattcttctgtttcgccagtccaagcaaaaatggtatccttacgcagcaagttggataagggacgattgatgatgctgaagtcgcggacaaatttacgatagtaacccgccatgtcgaggaaactccttacatctttggcactggtgggacgtggccactcttgtattgcttgtatcttggctggttttgtggacagcccagctgcactaactatgtgccctaagaactctagactgtctcgggcaaactgacatttcgaatgtttcagtttcagttgatgctgatccaatagcttgaacacttggtccagatgatccacatgctcggtcaggttcctactgtaaaccaagacatcatcaagaaaaaccacgacacattttcgcaacaacggagctaagattttgttcatgaattcctgaaatgtggcaggtgctcccgtcaggcagaaagacatgacctaatatttgtaatgttcgtggtgcgtctgaaatgttgttttatactcgtcaccctctttgatccgaatctggtgataccccgatctatggtccagcttagaaaacacctaggcaccatttagttcatcggg

SEQ ID NO: 99753 - DNA, 1353 bp, Zea Mays
caaagaaaattatgtttacattcccttatatatttgctatcatgtacaaatgcttagtcagtagcagttacatgtgttttgttatacattagttcatagtcagatgcttactaatataattcttaattccatgccttttgttttgtacaaaagcctcatgttgacaaagccaattggaacgaagaaaacacacaaattttctgtgaattatgtgttgagcaaataagagcagggaattgtgttagtggtacaatgacaacaagaggttacaacttgataaaggaagaattctttgctaagactggcgttaaacatgacagaaaacagttcaagaatagatggactcagtgtaagtccatgtattctttttggttgtttcttaacaatcaaagtggcctgggtagaagggctgacggtgtagttatagcttcagagtccttttggaagactcatactgaggttagttcactatgtgtcttgtctttcttaggatgcatgtaactatttagtaatgttagctaaaagggtgtgttacatttaattgcagaaaagaactgagtgcaggaagtttcaatatgggattcctacatacatggaacacttagcagagatgttccatggaatcgtggttgatgggtctagttcttgtatccctggaagtgacaacagacaatcagaagaagtgtatgaagaagaaggagatgatggagatggtgaaggattcataaactccacacccactagtagcagccgctaaagggctagtagtacaacagacacggccactagtccacctaaaaaaggaaaaagttctatgataaaggtgttagaaggaataattaatgaaatgcaaacatcaaggactacagatactaaagttttcacccaatttacaaatacccagcaaaatagaagtacactacccatagaagaaattgaaagttgtttgaacttggcagaagcaagtggagctgataaagcatcagatgaatactttgtggccaccaagttgtttagggatgactacaacagagctatcttcaaccaatttgatacagcagaccaaaggttcaagtggctgcagagatggtgcagggagtactatggttgactaggagattatgtcatttgagagtcttttagtctgttgtgtggacttatgtcatttgagagtcttttagtctgttgtgtggacttatgtcatttgagagtcttttagtctgttgtgtggacttatgtcatttgagagtatgtgttgttactacttcagttttatgccaaactattctctactactacttatgtttctaatgtaggcgcccacaacacggttctgccgatctctcccacgca

SEQ ID NO: 99754 - DNA, 648 bp, Zea Mays
ggaatttgttgctcagctttatcctcaggtgtggcagccttcgtctcaatgggcactgaaggcccagcttcggcttcggtctggactttgacagcttcggcaactttcttagtaggagcaggggtcaaggcttttgtggtctccatgacagcgtctagcacgctggccatcctccttctattgggagttgcggcaggagccttttgcactttcggcaattctgcctctactggtgggcttagaatttctagcattttcactgtttttttccaattttggctctttggccgcatcatctttggcttcggctggcccgactgtaggcaccttcggcactacaatagacccttcagcgctccaagcggcgggagcggcttgttctgcttcggcattggaggaggtcccctctccaaattcaggcaacggccgttacaatgtatcaaggccggtgcatcagaaccttcattttcttgcccttcggcacaacggtggtggccgaagcggcagttttcctcttttttcctttcctcaaggggtagcaataatcaagatatacgaatccaattgcatcaaaaaccttgtttaatcttttcttgccccgacccccgaaggctgcggacaaggcatcatcttcggccttggagtatg

SEQ ID NO: 99755 - DNA, 900 bp, Zea Mays
tgtttggtaacatggaaaagtgcacattttgcatgcaacgtgtctcgtttcttggttatgtggttactccgcagggcattgaggtggatagcagcaaggttgaagccattcaggactggcctacaccaacgacggtcacgcaaattcgaagttttcttggacttgcaggattttaccgccgttttgtgcatgattttagctccattgctgcccctttgcacgaactcacaaagaaaggtgtgtcttttgcttgggacccccacaagaagaggcattcaacactttgaaaggtaagttaacccatgctccactcttacaattgcccgtcttttagaaagtgttttaacttgaatgtgatgctagtggtattgggttaggtgctgttttgttacaagaaggaaaaccgaaactatattgctggccacaagtgcaaaggatggatgggaaaaatactgcggcaacgcagaattaccgatgaaggccagcaagagtgtgcagaaaacttcccggcgccgatacactgccttaacaattttttttgatttttttggagcaatcacctggtgctatgcagggtgacctgtatagaactttttgagagctttccggaaaaaaagagcactgaaatcggagttccgagcgaaaagttatggccgttttactacaggacatccgaatcggcgggaattttcaaacgagaacgaccaagatgagacaaccgctttgtatcctttcccctttcttttttgtttgttctttggttctatcctttctctttctttttctttttttttctttttttgtcttttcttttttttgtttctgtttttttataatcgaaggagaaaaacaaggaagcggcattgactcggtttgtggcgtgatcaaacgggagatggt

SEQ ID NO: 99756 - DNA, 408 bp, Zea Mays
attccagctttgctaatgaagtgcggaatgtccgcttcggtttggcaacagatggtttctcgccattcaatctaactgcaacgtcctactcatgttggcccgtctttgctgttccatacaaccttccaccagctctttgcatgaaatatgaatttattttctcatgttggcacaaaggaagaaacaattgatgaaatggttgaaaaacttaaagttcccagatggttacgccgcgagttttagaaggttggtgaatttgaagacgggcaagttttctgggttgaagagtcatgactaccacataataatggaaagactccttcctgttatgtttcgtggttttgtaaaaaatgatgtctggaaagcattagcggagctaagctacttttatagacatctttgtgctaa

SEQ ID NO: 99757 - DNA, 565 bp, Zea Mays
ccgtcaggccccttatgtcgaactgtccgggtacacatacggagaacacggagctacacaatatgcacaatttttgcacccatcacagaggcactatgccgccccaccagtagcatattataatcatgtcatgccacctcatacacatagggccgaatattctttggtcacctgagagctcgagagatataagcgaggaggggtagcactaataggacacctaacacgcattttgggcatccctaggaggaaagccgacacaataatgttcgacgacttgaggttttcacctataaacttaatagatggtcgctagatgtggtggaaaaatcagggacgaagtagccaagttgttcaaaggcaaactcgacgttaatgtgtcaggcacatggcagtcatattggaagccttataatcacctatttgacactatgccatatccgtagggaactaggatatcgaatttctctaagttttccggtgaaggcgggaaaagcacgcatgagcatataagccagttcttagcacgcctaggagaattggatgatagggaagcctactgcat

SEQ ID NO: 99758 - DNA, 307 bp, Zea Mays
agaggacaaggttcataagggatatacacccacaacaatcgctccgacaggcctcggtgtccttgagaccttgctcccccttcaaaccctaatccccaatcttcatccaccctcgcctctctcatggcgccgctctcacgtttctcattattgtctgccactgtttttgtttcgctcgttgtactcctcgtctccattgacctctccaccattgaatacctcctcgcaattgctcctgctcctatatgccccatgatcacgcgcccttcaaaccctaacccctaatctccataccccatgatcgtca

SEQ ID NO: 99759 - DNA, 461 bp, Zea Mays
cgattccatctgcatcaatcctcttgaaattaaacagaacaagctgaaagcacgtaattgatcttatgcagcgccacaatatcgatgtggtggttggggtttggtagatttttttggacgatttttcttcaactattaacaaaatctggtcatcttctttttaattttgtcagttgcgcacgagaaacaaacctattcggaagatttcttttttagttctttgttctcatgtgatttgtcgtgatacaatagtgcccctatagtcattcctctgttttttcccaatcatgctttgttgctttctctcatagtacctacaaatggttgtcttattcttgcaacaacaacaaaaaaggtaggttggatgaaactaatatgggttgcacatttattggggcggattgtcctggaaaagatcaattttgcagcagagtgagaggctgttgaaaatataccgttag

SEQ ID NO: 99760 - DNA, 340 bp, Zea Mays
tgcaaacttctcattcttatcgaagattttctttctgagtgcttccaatatcattctgttggctctttctacctgcccgttggctcttgggtgcaccatcgaggcatatttgatctgaatgcttttttgttcatagaaatcgaataactctgaactagtgaaattagatcccaggtcagttatgatgctattcggtattccgaacctgaatattatgccttgtatgaattccactgccttggctgaagttagagaagcaatgggcttgtactctatccacttagtgaatttatcaatagcaaccaatacatgagtgtatcctccttgagctttcttgaag

SEQ ID NO: 99761 - DNA, 351 bp, Zea Mays
ggaggaatgactgccgcagcagaactctgcttcttctgcttgggcaccatcgcaatctcgccggcggatcgaacaagcgcgaaatgttagggaaacagaggagcggttcgaggcggaaatgtgaagttagggctcagaactaaaaaatgcacgtcgacatgagtataaatggggttttcccgggttgggcaccatttctaaaaagtgtcaagtcatcactcgggaaagcgagatttccgacataactcggttgttacctctaaaacgccgacaacatcaagcaccactcggccgttacctctaaaacacgacagtgtcagccataactcggctgttatctctaaaacgccg

SEQ ID NO: 99762 - DNA, 543 bp, Zea Mays
gattcctgcatgttcctgattacacagctgatcaagaggtcgtctggctacgaaccttgggaatgaccctgcagagtagtaatcgtctggcacagcattatagacagtcaatgcaaggctgggctagcgaatcacttcctgcattggctgaaaccctgagcgagaggcagaatagtctgcacgcatactcggaggcccggcgcagaccgtaaagcagtacctctgttgaccagcagcgtatgcctctttactgtgaaggcacgcataggccgttgagaatttctagcggataaaatgctattgaaaaacaggtataagcagagcacttttggaagattcatccactgcatggtttcgttctgctctttgcgttacgttcggagacagtagtccatactcgtattggtcaggaacaaagagctaggggtggtatcatctagatcactgaacttgtatgctaacattagtccgaacaagttctcttatcctgttaccccggccgcatctctcctgagcttcctatctcccttctcggtacccgcc

SEQ ID NO: 99763 - DNA, 374 bp, Zea Mays
tttcctattgcagctgtatttttactttttgcaaatgatgcaaggcagaccttgcttgtgctggtgttcatttcaataacacatttgcccgctgtctgtttgattgctaacataatgagcactgtgactgtgaggttgtaattgttgaatttgtacacttggaggtaattagtgtgcagaggcggcatctgatcagcactggcaggggaatcccatgtcctcagttccttctgacctctaatgtgttgtatggccctggccagcctaggttaccttctggttggcatttctgttatttaattttcttattaagttcatatactaatggcaccctctgtttcgggcccttcactatcacatcctctctcttctac

SEQ ID NO: 99764 - DNA, 1004 bp, Zea Mays
ctgtgtacatatataggcgaggaggaagagaggtaaaacgaaacccctatgtctatggaagctaataatacacaggatcaatcagatccggactcctctccctaattccctctatccataagtacagtggccggccgacacaggattgccaggctcaggcccttccatatgtagctgattctctaacaggcatcaacttcttttaaaaattgaatatgtgacctcagacgtgcaactgtcctttgcaaagaagccaggaccagacaatgttgtttaagctgtctcaataaccaaatttcctccctggacaaaattttgttatcttgcgccatttccagtctatgcattacctcacgagcaagacccaactggacattcacattgcccacttctttatgcccccaggattgcagacacttagctaatctttttaactttaatgatatcttctccatagggcaagaatcctataatggctgattccacgatgcagccaccacctccaaaaaaaccaggaatcttaggccaaaaactctcgaaatgaaatcgtctcttacccaagcacacctctctgacttaagttaggggacagtgatccaaaactgaggtagcattactgtgaagagaacaattaggaaaataatcttctcaatctgtagtgcagaaaacatgatccaatttcataagggtaggctcatccctctgattcgaccaagtgaaccttctaccaatcaaaggaatctcctttagctccaaggaattaacaagacctctgaagttacccttcattgtcctgtttatgttggaattattcttatcctcttctttgaaaatcaggttaaaatcgccacataataaccatggccccgcacactcctccctaactgatcttaattcatggataaaagcctgcttaaggctatcctgatgaggtccatacacacctgtgaaccaccagcaagaaccagagttggcgtttcttaacggcgacttaaaggaggagg

SEQ ID NO: 99765 - DNA, 497 bp, Zea Mays
gaggaaactagtgacgagttgcttggtgcctacacgagggccaaagacgatgccctgacagtggccttcggagggcgaggcaagaagagattgaacagagtctttaatgttactagctttgtgtacccagactattgttatccctcgtgaaagcagggaaagaagagaaaggttgttgcttcggctatttctaccacgccgaagggaaaaaggttaaagtcttgacacaccggcgcaggtacattgaaacggccaaagtgccgaagcttgccggggagacttcttctgttgttgagccagagtaccccgctcttgcggaagccaaggatgaacattctcttgatctcttcctttttgatgcaggtcgaaccattctgttcttccaagaaaataccggcagtatcctttccccctatgtacatataaaccatacttcatatgatggctcaaattttatcggactcattgtattaaatcctttactgtttagacactgc

SEQ ID NO: 99766 - DNA, 638 bp, Zea Mays
atgaaatgcacatatttcaaaaatttatccactaccaccatgatacaactgtacctgcgagatttgggtaagcctgttatgaagtccatgctgatggtctgccaggagtggtccggcacaggtagtggaactagaagcactggatacttggcacggtcaggttttgcactttgacagatatggcacgattgaacaaaggcctttatctactctttcatccctggccagctgaagatggatttggctcgcctgtaggttacgggaaaaccagagtggcccctagagcactatcatgtagtgcctgcataaccttcgtttgaagtgattcgttatgtcccaacaacactcgccccttatgtctgatcaccccatcagtcaactcatacggaggtaactcaccccctgttgctagcactccaagtatttctgggcttgggcatcattctcataaccctgcataacctcttccaaccacttaggcaccaccgacgagctagccaactgatttaacgtggctgtatcttgatctatgcctggtcgacgctacaatgcatcggccacccgattttctgccccctttttgtagcagatccggtattgcaatcccagcaacttcgttagagctttttgttgccaag

SEQ ID NO: 99767 - DNA, 878 bp, Zea Mays
gcattcttcacgataatcacccaacaatttgcattttaaattagacatcacatgagcactactactttttacccgcgatcataaccatacgcatttagactacaacaagtaattcatcataacttcgagcttaaccaaagccatctaacaagttgattaaccaaaggaatggcatagcccgccatacgacatacacgtcggcttgcctattattaacgcagttcgagacaccacatgtatatatatcacaatcacttacgccatcgactcttacttaacatgagttggctaacgccatataagacttaccaaaccattttaaacattgtaactcgaaacatgggttgaagcaggttaattagtttttcttaaccatttctccactcgaattagttaacacacaagtcacttaaaacaccatattttaggagggctaacatagagacattaaaacatggcataaaactccataagacttacactggctaatgaaagacctaaagcacccatgtgcatatgttatcggactgttcttaaattttagcaaggattgactcatgaacactacttgcctccaataattattgggctgcgataacgctcatataagacctctaatcgatcaacaagacatttatttatccaaagggaatggaatgcaataatttataaagctaagcatcgatcggtcatacaacaaaaatcatgacaacactgacagatactatccactaaccgttgaaaatttaaacttacttctcgcttgccactacatcactcctcaatcacacaaccatcacgagcatccttcacacgattatataatagcgacctaaacgtcgtgttacacaatacatacatctttcctcgtcgcgagt

SEQ ID NO: 99768 - DNA, 434 bp, Zea Mays
ttttgatcattcttgtaaggttgttgttggctcaaacactaggagtgtattgtctagcattgctctttgcgacaacatggacgatccacagtacggagccaggtggtctgtgaccctatggccggagtgagtctcctctgctcgtgtgcaggacagtccgcgctctaggccagagatggtcttcttcctcgcgaagaatcatagaactcgccccttggaaggaaccacgtcatggaggagagttccaggggtgcctcaggaccagcagaccacccatgacgtccctagatgacatagagtcgaagagggatgaagatttagggttcgagaaaagctaaactagatctaattactactactcctagggcaagaaagtaaatgaattgaaatattgattgattggttcgattcgtgatgcgctcaatcggttgtac

SEQ ID NO: 99769 - DNA, 867 bp, Zea Mays
tcaaatgggtgatgttggtggcctgctatggcattgaaacctaaggggccagaggcaggttcttcatcaaatccagacaaactttagcttggtagggttggcttttggggtttgggagggggtcccccaagttttctaaactggtggtgtggacctcgcactcttgttcggtggaggtggttggttgtttttgttttgtggcgtgaccctcggcatgtgaatcgttggtggccttcgggttgtgtggtggtgagtggtcagtagcgagggcaagcttgcccttcttggcggcgagggctgctctagcgtcatcgtcgtttagtggtgagctagaacggtctttttggaaggcatcgtgggaatagtcttcgtcgtacaaacgatgggcgtcaaatattgggcactgacatgcgctaacacgttgtcaggcggacccaaacactcagacggtgggggagagctcaactgcacgacaagacaaacgacagggaacagaagcttctcgttatatgtgtctcatcccgctacaggatgggggtatttatatgaccatctaggggtaggtggtccaaagttcggtcatatcctggtcaccaactatatccggagaatattacatgtaacggaataattgcagcatcgcacgcgcagcggccagtgcacaccgaataacacacccgctaactacgctgacaagtgggccctcggaggtgcctcgtggtggactgatgacgtaacgggttgacgtgtagcttccgctgcccttgagccttcgcgctatgctacacatcgctgcacttagacgggagagcggtcgctgccgttggagccttcgcgatacggtacccttcactacacttagacgga

SEQ ID NO: 99770 - DNA, 532 bp, Zea Mays
tgatgaaaataccaaattcttccaccttttggctaaaggtcggaagcggagggttaaaattcccttcttgaatcaggatggtgtctctgttagtgatgctgatggcataaataaaattgctacttcttattataaagatctttttggccattcggtgttatctggtattaatatgtcgcactgcaatatgaaccaattatcagactctgatagatctttcctgacggctcctttctcagtggatgagattaagaaagtgatttttgagatgaaacataatagtgcccctggtcccgatggctttcctgctgaattctttcaaactttttgggataccattcaattggatattgttcacttattcaatgacttttataatggtaatctcaaaattgagagactgaattatgggatggttactttattaccaaaagtggataatgcggctgacatgaagaattttagacctatctgtcttctgaatgtgtgttacaagattatttccaaagttctgaataatagacttgcgggt

SEQ ID NO: 99771 - DNA, 288 bp, Zea Mays
gctacagaagaagtttggcagttcgaaagaactgatcgagtcggcgaggagcatcatcacgtcgaaagaagcgccagctgcggtggcagatctaacgagccgcgtcgaagtggcgaagcaagtctctgcctgcagctacgagacgggcacgagctggggtcaggaggtgtgcatacgattttaacactgtctgtcccgtcccgtccctcgcatatatatcacatcatgcatgacatgacattgcatgtgtcgccgacgccgtacgtgcgctcgcaggttggctgggtg

SEQ ID NO: 99772 - DNA, 631 bp, Zea Mays
tcttctgatcaatacagctgtgaccttgcaatcgcggtgtcactacctcttggtaagtatcacgaaccagcctccgattgtaccatcctttgcttgtatttcgtcagacacttgtaagagcttggtaagatacattagagtgtgttcctgtgttccacctgagaggagcgtgtagtgagattattagggataaccgtcaccgtttgtttcctgtttttgtgtttcgatggcaggcgacgacgaggaagcaaggatccctacagatttcgatgaatgtgttagccgccaagatcttgaggcaaacaacaagctcctgaaggagcaaatggaggagacggtccacaagtcagtgcatgatgccttcattgacatgaaccttggcaagacttacgagaggctagatcgacgattgtccgagatcatcgacagacttgctgtgttggagacgcaacaacaagcaccgccgccaccaccacctcctcgtccacgtcttcccgatgatgctgtgtttgatgaagaaggtaattatgatgaagcagccaccagagatttgtgcctacgtcgccgtcttcatcaaaacacagaaggtatgccacaccaacaccgccagcaaggtaataacaattgtgct

SEQ ID NO: 99773 - DNA, 308 bp, Zea Mays
ttgttgcttttctactagaacatgcctctgaattgatcaatagagttatcttaagcatagtttctgtagtttttatttacctggaatacttaagagggtcaaatctgcaaggaactagatataaaatctccatgccgcttatcggtcatcctttgaatttctgaagcattagtttttaggtgtaaaatcgtggtgctgcagattatcagacctattgattttatgtagattaggaaggacgcagatagtaaaaacgatactaatttagtgtgctaattagattaaggaacccaaaattcctatccaac

SEQ ID NO: 99774 - DNA, 393 bp, Zea Mays
aatgatgaattgtttatattccttatcaaaaagaaatcattcttcatcatatactcccttgtgcttttaacatctctcttgagtattttcaataagtttggaaggaaaaagagtcaactataaagggaggacactcaaatgaaaaagaaagacatcaagagcaacaacacctacttggataatgagatcttcaaaacaatcaatggtgtggttgtaagcattctaaatctttttcattatgagaatactaggcataaaatgtttagtgcaaattttgtaagccttgatcaaattgaatagtgcttctccccatttgtctttaaaagtgagtacatctatccaattcattcaatttcttgatgcatatctttagggggagcctatttctatatc

SEQ ID NO: 99775 - DNA, 794 bp, Zea Mays
ccggacagctagagacattgtgatgtatagcgatcaagtctgttgatgtgtttaataattaatttgaaatatagtttttattagttattgcttgttttaagagatttcttgtgaggcatgcttctttatccaaatgcaagaacttgaagtcccttgtaaaaggacaacaacttaaataccccatgctttacatattgatgcaccaaaaaccatgtcatttatttaagtattattatgacacagatactgaaagcaaacatggcttgttcagtcgggcagcggcagcagaggggatggggccaatgacggaggcggagaggagaacccatcgatttggtggtgtaagtgggagctcattgaggccggtgcgtttcggcaggtctatcgcaggatgaacctagactcgggcgatctcctagctgacaaacaggtgggggcgaggcagggggatcgacacgccgaaccattattatgttttcatcgtttatgaagttttgtggataggctcatattaaagagctcgaagaagtgaagctgctcaagaaactgtctcaccccaacattgttgtgagtggatgcaattttttttctctcgttatgtaattgctaagttgtttgatttactctatttggtctgaaaagagatatcttgtgactgttcgtgaggaagacacactaaacattttgctagaatttgttcctggagggcctattaattcagtcacttttggggaagctcggttcattcccagagcatgtaagtaatcatcaaactgtgtgacttgcaattcttg

SEQ ID NO: 99776 - DNA, 548 bp, Zea Mays
gttttgattcggacatgtttgatgttagagaaaaagagttgggggaatttatgattcggttgctggtgattcaaaaagaatcaggttttatttggaattttattaatgtttacggtgctgctcaaaatgaacaaaaacagaaattcttgagtgagttatcagctttctgttcaaaatgttctcatccattgttgattggtagtgattttaacattctcagaagagaatcagatgagaacaaacctggggggactaacaagtggagttctcttttaaattctattattgatgttcatgatctgattgaattggatcttagtggtcatcattttacctggtctaataatcgtaatcctcctacttttgagaagttagacaggtttcttgttagtcctgattgggatctgcattataataatttgaatgttactagtctgagtagatctttttctgatcatgtccctttatgtctcaaaactgactttatttctccgactagaagagattttcgatatgagctttgttggaggttgagacctgagtttaag

SEQ ID NO: 99777 - DNA, 363 bp, Zea Mays
cacacctatggcctattatccaatatgttaagtggaaagtggaggcactaaaagctttagaatcatggctaagctaagtattgatcatgatgagagagataccctagctttcatgtatcttcacccatgaaaaagattctaaaaccctaatttcccctcttgagccattaaaccccaaacattgggttaaagggaaaaattaggcaaatggccaattcatgaaatgaaacctttaccaaagatgaagtacattaataaatctacaaaatgtagtaagggaagtattacaaaaaggcccaacaaaaaccccaaatcaagcccctaagtgcagagcacactagagccatccatttttctctaagt

SEQ ID NO: 99778 - DNA, 651 bp, Zea Mays
cgaagtgctgggtggatgtagttgccacagaaacaataggagtgctagttggacacttagattctttgcccttatgccattcttcccattgtttagcttgttccccagtcagggtgattgagggggtgtcttcagtgaccgctacattgacacgagggccaccacgacctctacccctagcatggccaccatgcccccttccatagcctccacgatctcttccataggtactacgagtggctccatgagttccaccacctcgttcaccactgccacgaggatgagaacaattgtagctcaactgtcccttctcaccacaattatagcaatctctatcatcagttacagtgtaggttgatttcataggatcattagctatcattacctagagcctgcattcctcattaatcattgacgacacagcctcatccatggtaggaagactctcttggtgacaaaaggcagctctcctgctctcaaactctggatccaaattctttagaaagtgagtcactctcctgtcctctacccacttgtggacaacctgtgcatcctgaggacaaaccatttggagaggagcctagtgatctagttctccccacaagtactgaagttcactagcatattgtttcactagtctccccgtctgtt

SEQ ID NO: 99779 - DNA, 546 bp, Zea Mays
tcccggtgcttctttcaccatggcgcctatcccaatccatcaagctattacgacccgccacaccaaatcgaactatttgttatggcgggctcagctcctgccatatctacgcagctccaagttgatcggattcctcgatggatccaatccggcgtccaagcagttcatctctacggcgaccaccactggcgagatcgaagaggcccttaatccggcctacgacacctggtatgaccaggatcagcagttgctcagcggactgctctccttgatgaccgaagaggtccttcgagatgtcatggcgaccacatcttctcgtgaggtctggacctccctccaccgcaagtttgcatcttccacagaggcacggacagtgcaactccgtgtcgatcttgcgacgtccaagaaacaagatctctcggcggcagatttttaccgcaaaatcaccgggctcgcttccaagcttgctgctattgacgctcctcttcgagatgaagagatactcgcctatttgtttgcagggcttcccgtcgagtacgatccctt

SEQ ID NO: 99780 - DNA, 443 bp, Zea Mays
atcgggtgtgctggacgccgacggacgacacatgatacatttgctcgtagtcgcgtcatccttgcccctgtcgggccgggccaactgacctcggtggctgcatctcaaattcatcaggccgccgctgccgcaacctcaagccgcgaccaccgcacagaggacctccgactgggggagaggcttgtggaaaagggaaacacgcaagaatagtttgatggcgcgcaggagaagacgcaaggggagattgggggcgcatcacgaccgcgaagatatgcgtagctcgtcacgaaggattagcgtcgctaaaatttggggcagatttatggtatctgttggacctcagtttttatgtttcccttcctaaaaaacatattagcggtcagattaacaaccttttggagatgctaagctaatcacctcaatcacatgcatgcatatcgtga

SEQ ID NO: 99781 - DNA, 413 bp, Zea Mays
aaatctgctactctttcagaatgtagcttgtaagggtatggcgattttgctacagaagataacagggctagcgcaaaaatttggggggaaatcatctattgaatggagagtagacttttgttggaagttggaacaaaagttgctagatttgaggcaggtggccagcataccggaaagaatcagccggtgagctgtggtgtgtgggttatagttactggttgcaaggggtggtgactcgatactagcttccgtccctcccttggctacttgtgtcaggtggttctctcttggagtttgtgggtggactgctctactctgtagaagaagcgtctgggcatggaagcaatcttttctttggaacggaacctcttggagtggagttatgtggtgaaaagccatggatcagtgaagaa

SEQ ID NO: 99782 - DNA, 392 bp, Zea Mays
gtgtttatgtgaaaagtgtatttgttttatgcaatgtgatgggattcatgattatatagggaatatatttattgatgtgacgagtagtttagaaaatgctagttgcatggaggatgtattgttaagacataagtgacagagttcacatattagtggtcgcgccacattgattgaagtatctcgagtgcacgccacaatatggttgtatgcgagacagggttatgtgcatgatgagtttagtaaaaatccatcggtgtcactggtgttaagttgaagtttatttgcgcgaggaaagaaataatgtgtttaatacttagaactcttagtcgatagtagaaattgttttggcttatatagagaggtggtgacatgccaaagtagtcattgcttcc

SEQ ID NO: 99783 - DNA, 282 bp, Zea Mays
acaacaatacccctgtgcccgaagctgacgaagtagttgtctacagaagcttcatgaaagcagggcttcggtttcccttggaaaaatttttggttgaagttttcaaaacttttgaaatttaccttcatcatattacccccgaggctatcatcagaatggaaatttttatttgggtcgcgaggagacaggggttagagccaaatgcaaaatgcttctacaacattcatgagctgtcctatgagacgaaggccactggtaaagaacaatatcataataattttg

SEQ ID NO: 99784 - DNA, 677 bp, Zea Mays
ggcggcttgatggagtagatcacgaagctttcttatgcagagcgtgatggcgtgatggagcagagcacaatgcgcacagatgggaggttgttcgcggcttcaagatgaggattgcaggcggcatgggcctatgcggctagcgacggatgggggtcgatttgttcatggacggatgaggctgttggcggcagatggggaaggggtttgttcacggatcccgaatgagtctgctggcagcggatgcgcacatggggtgggagggtggatgagtcggcggttgcgttagaaggagtggtagcagctcgggctgggagacggggacggtgattattggtggatcaggcgggtggagggccgaggcacgctgatggacggtcctgatttgatggctatatatggtcgtgctagattcatggaaggcagaacaaggaggtggcagactacccttgcagccttaatatagtagtatagatatgaggttgctatcaagtctctgttggcttttgttgtttagcatgctgctactataaccatgactgttttcgagcttcggctttttgatgtaaccaaagctgagatggccgaagacaagaagagtgaggaccccgcactagctagattttacgaagctatggagagaaccaatgttgagaaataaatcgatgagattttagctg

SEQ ID NO: 99785 - DNA, 729 bp, Zea Mays
taggaggttgggctggaggggcttcttccttctgctcagtctggcatccttggcttctagtcttcttgcggatttttcttacgggggcgagcttctttagcttcttgttgtaatccatcttcagggtgcggtaggcctcacgggtgttggtttcctcgccttccgctatctcgaggctctcttgaagggacaccttttcccttgtaagttccctgacttgatgctccaggctttccacctgggagtttaggtgagtacagtgggaggcaaggtcatcatattggttatcgagtgtgtggaggtatccagccatgtagacgatggtggggtcatccttggtagggtctcttcctgacagggcctgaagtcttttcctctaggcgggggtatttttgttgctgggtgcaaagtagcgaaggggggttccaaagattattctgctgtagttttggcacagttgtcggagggcttttcgggcaacattttggcaagtatctgggaagcgatatccggtgaaagtgacttggaaagaaggatggttcggatagtttcggctttctcctaggtagactgctatagagcacttctccattccgttctcgagatattccttccagacatattttggcttcttgcggatccccatgcgaagcgcacaacttcacaacagatgtgggaacccctccacctctgagcagtaggatgtcctaatgaccagagagtcttcca

SEQ ID NO: 99786 - DNA, 397 bp, Zea Mays
ggcagtgttagtagagaggaggaagctaaggccacattgttgcttgtggttatgggtctttagatcttggcatgtacgtcggtcgaacctgacatggggttgctagcaaaatgcgatgggtgtgtgtaggctcatttaaatgtgagcaccttcattgtttggaggggtgacccccaacgatatcggtctttgttttttccgttttattgcttgcaaaggtgaatcaatggttgtgattttgagatcccctttgatagtatgaattttataaactcaagctacaaaaataaaagaatttgaacttattaaggcgacaaagtcatctttggtgattaggggtccttcaacctacatatcatcctccctttttgattctatgcttgtcatatcaacgaat

SEQ ID NO: 99787 - DNA, 321 bp, Zea Mays
tttttgttcggtgcaggctcgtctagagtggccgaagcagcaggtttcctcttctttccctggcctcgcagtggataacggtagtccgggtaaacaaagccaatagcgtcaaaaactctgttcaatctcttctttccccggcctccgaaggttgtggataatgcattatcttccgccttggaatacgacccaagcagctcatcactagtaacttcaatgcattttagccagtcatcgtttggttcatcgaatttatccccgtatctgaatgtgtactttagccggaccagatcaccttcactagatttgatgatggtttcc

SEQ ID NO: 99788 - DNA, 542 bp, Zea Mays
ccgggggggtggcatgaacgcataacaaacatcaccagaatttgtcctaacgtcaggtaagttgtctacaacgtgcatcttttctgtggccctgcattcatttcttgaagcagaaggccattcgtggtggtggtgattggattggtcttcctctactcccacctccaggccagattctgaaacccggagcaggtgtagcaggcggcaggcaccacaaaaagaaatcgttgcccccaccaacttgcgctgttcccacacccaaataatattcccggctgctgcataaactactgcatcttgtattcctgtgcttcctggtgtcctggttgataaatactcccctccaggcgtctacagaccacacaggcacattatccaactcctcttccagttgacgcggcatcctctccttgaccatttccctttcctcccagcctcctctagcagccgtatcactaatccagttgttccccactaccgcctctggtcgaattgattagtcaaagtccagaggccagagcacatctctgtctcgctaatcg

SEQ ID NO: 99789 - DNA, 482 bp, Zea Mays
gttctcgcatatgtcactagcatcactctgtaaatagaggccaaggaatagttttgtgtgcgtaaatatcatgtgtaagataatagttcaggcttgcagtttctattagcagtttatggtttacgtaacctgaagaaacgcatgagtccttaactcattcagtgccatcaaatcagcttcagaagcatcagcacgggctccagggtatacctttgtttcaaatcctatgtcttagcatattaagactgttaatatattcatgtacctatggcagagaaaggtaccataataaaatgaagacaaattgaaaggtcaaaagtgtatatcctactacaaataatcttttcaaggcactgtagaaccaaatttcaaggcatggcattctgctgattactaaaggacactatgcaactaaacttagcaaagtaacaaatctacacataccttaaatacagcccgtgtgcccctgaatggaccttgaa

SEQ ID NO: 99790 - DNA, 392 bp, Zea Mays
aacacacaagcattgtactagtgattatcttcatatcacacatttttgccacactagtgcacatccaattttcattacttgtagcaataaaatgaaagagttcacacaagcaagtttttaatgatggtagcaaacgatactgatatagcaactagacaataacagagcatagggctccttcactctttgctagggcgcaaaacataaaactactgatcagcatcatgaaccaataaacttcagccaaaccaacgcaacagcacaacattaggggtgtaaaaacaggctaatacatcaagaagctgaccacttaataacttctgccacttgcttatcagcaaatcttcgtgccacaggtgggtttacagaagcacaaataacattgatctgat

SEQ ID NO: 99791 - DNA, 417 bp, Zea Mays
gtccgttctggtggccgccgtggaatgcgctgtggcttacgacaagaaggcagtgctgattgatgggcagatgcggattctcttctccggatccatacacttccccaggagcacccctgatgtaactgcattttacaaaatctcttctccccccactattccctggagaggtttatggctgcggtcagttgtttcttgatgcaaagctctcaaaagcaaattgttttagccgtccctctttcttccacggttagtttcttgtatggggtttgaaattttctcggtcattgtctcctccggcctccctcccttgtttttctctacaacaaccgtgtttcttggttcttccttgcacaacatttggataacccaaactaagaaatttccgacgaaaaaactattttgggtggttttgtg

SEQ ID NO: 99792 - DNA, 318 bp, Zea Mays
ctccaacatatatagtactcgctggccattagtttctccaagactacaatattaacatttttcaaaatcctctttcaaaatcgagcgaggttacaggttcatccccttaaggggagggttctgtataccgagcggtactgtacaagcggagcgagcgcggggatcataacagcattaccccttgtgctgatcactatagccaacgaaaatcattgacttttttctcaaaggattgactcttcctgactgaaaagaattcaaaatacgtatatttggtactaaataaaccgccttcgctggctaatccctatgtcttgg

SEQ ID NO: 99793 - DNA, 421 bp, Zea Mays
caaaaacagagaacaacagggacctaaatcacaatttctctatgactcaggctactattcactggatggcgggttgattccattaaaatccgaggactcttaagtaaaacgcccaggccaaagggatattctttgcactggcccgttcgatcaggaacctagggctatgattagatctcagatgctgtgaaccggaacacacgagatccacaggatcccagataaagagctgagatttaatgcgtgcgtgatcttttccccgccctgcatctgcgatctaacggccatcctttgctcaccccgaaacgatgacattgaccagatctacaacgttgcacaccgatccaacggtcatggttccatctgcgaagcagtacgcccttgttccaatctggacgctggtttatggatctacggctac

SEQ ID NO: 99794 - DNA, 717 bp, Zea Mays
ataagaagttatgttcaagaagactcaaagaaaaatgtgattggacatctggcaagctatgttgatcattttggcccgctagtgatgtggctcgctagtgccgctctgtgctcaatagttcgctccatgtgcatagtaatgtgcttgttctgtattctgcatttcgagatgatttttatatcatagttttatagggaggattcaaggttgttccccaaaattcaactccaaaatatcaaacttttgatactagactagaaactacaaaaccaaatttgggggggttttatattccaaactacccctatttatttggatctaaatcacttaaatagggacataatggtccaactctcaatctgatgatctgacgaccatgatcccttcacagatttgcttcaccatgatgcaacctccatgatggctccacatgccgcctctaattccctccaaaaccacgtcgctatgttttgagcccaaaatggtgaaactattgttgtgtggttttgagactcaatcaccatattgtcataggtagcatacaccattcacgtcacccacatcctagacacatgtcctgccaatccccaactatgtcgtcgactcgacccactgcaccatgtccttacgcatatcggtgtccataggtgtcaaccaccacagctaatcatcttgctttcattacatcacctttactatcaaccatcgcttcctgac

SEQ ID NO: 99795 - DNA, 334 bp, Zea Mays
tctcaccgccaaattcaggcattgtggccggttcaatatagcgcggtcggtgagtaagaaccttcaccttttcctcttcggcgcgggttcgcttggagcagctgaagcatcatccttcccggaagttgtactctttcttctctgaccccgtggcgggtagcggtagttagggtacatgaacccaatagcatcaaaaactctatttagcctcttcttttttcggctcccgaaggccgcagatagtgcgttatcttcagacttggagtaggctccaagtagttcatcactagtgttttcaacacacttcagccagtcatcgtctggttcgataaat

SEQ ID NO: 99796 - DNA, 502 bp, Zea Mays
gtggtccgctcatggtgccgccgtgcgaataagaggtgagtcgctgcactgatgaccaaaatcggggaagatgggtgtgagacgtcgatcccggaactgacggccaggatggctcggggtggcgtttcacttggagataagtggcaccattggatttgaaggggacgatcaggattagatctagcgtatcccttcgattgggagaatgatggccgttgatgccaaatcgggtgggtgaggctagtgctcggtcgtttaaaatctaggtcgtcgatccatgcgccaacagctaggatcgatttcatcatgtaacgttttgttgatctgttctgggccgttcagatctaatctaacgatctagtcaaccccgtaccccttcggttgagcgcttttgcgtatgagcccccgaacattatagaattaaacccgtcgtccactatgcgtgttaagaagtactgaaaggccccgaattctttgatttagacctctgaacttttctatc

SEQ ID NO: 99797 - DNA, 674 bp, Zea Mays
agcagagcggagcggctgcgcggctagcgagcagagcatctggtacgagcagagcataggagaacgcgaccagagcagacaagcaggaattcgcccccgcggccgtgatctgcgcccgacaagccagcagtgagatgtttctcgtagcaccaaccaaccgcagacatagggggcgacgaaggaagagggagctccacagctatggcatcaggtcctctcctgctccacacctcatttcttgcccgcagctttgaaacatttgtatcgtggaatcttgcttcgagcctccatccctgcagacgcacacggcccctgctgccatcagtggcgcatacggccagcggtggcggatgtacccgttgggcacttcacggcccctgctgccagtaccgtgcgattccaagcagatcggctgggacgctgcaagcaagaatcccacggcccctcctagaacgctgcaagcaagaatcccacggttccatggactgctgcaagcaagaatcccacggaacggaatcgatccgaagcagatcggctgggatgagcagagcggagcagaacactgggttgcgccagagcagagcagacaagcacatggtagaagacgcacgtacctgggaaccgcagacgagcagaagagctctcgctggaggacggcgaaactgcgtcgaaac

SEQ ID NO: 99798 - DNA, 527 bp, Zea Mays
ggagatttaaataacgaggatcgcttctcacccgcccgattgaccatcaacgacccacaatcaaccctgaggcgacacgcccaggagctgatctaagccgcacgttcaccatctcacggaccacaatgcttcatccgaagcggtatcctaactctgatcttggccgcacctttgagatcaacggtctaaaaggtccttctcctacctcccgtgcacaggcagtggtgtgggctagcaacggcggcgccatggccgcagccacccagacccgagcaggggaccgccaactatgcttcttatcgagctacacgcggggaagacgaaggcgagcacaatagtatgcttcttacctaggtttggcgtgccaggttatgcagtcgtcggagggaagcggacaggcggtggattttcaagtccggcgaggaatcaccccagcattgacgccgtacttctcgaattgatggtcgtcgtgtcttccatgcgctctagcaaggctacccgaccacaattgaagccctggcgctagc

SEQ ID NO: 99799 - DNA, 421 bp, Zea Mays
tggacctaattagccaaaatatgtcagttggatgacgtatcaattttgtccaattgagttcatctttggtatagagttaggaaacacactccctaagtgcctccaaccattggaggcaaagtgcactttctctagataaaggatgtgcatctcccatggacctaccactttgtaccccttcgagaagaatgtaggtacactctccacctattggatatgttaggaaacacaagtgggactggtgtggaatgttgtttaaggttagttgggatcaataggctatgaagacgttatcaaaacccagccaatatcatagttcatacattgtgaatacctattttagggtacaagtagagggctttacccataattattacatcgccacactgacgaaatcacctagcatctggttttatgtttt

SEQ ID NO: 99800 - DNA, 442 bp, Zea Mays
atcgatcaggagccgggcaccgatcgcgagagacgggagcaggtgagctgcgtacatcagagagcctacttcttgagcagatggctatatatatacgattatatatacgtggcgtaagagatggccagctttgcatgcctaatgcacatgcttcctcatcaatcacataacacatatataggggcgtggtgctcgtagtacgttagtttccgtctcagcagacagcaggcatgcaatgacgctcgcggggagatgatatgatgtcgtgcgtctctatatctcctgtctgcccccgatgccacaagaaccagcccccttggccctgacgtggccagcggcggcatacgtatagtatcataattcataagcactcctcgctctgtatatctctttctatcctctccccgacgccacaacaagaaccagcgtgttccctccccac

SEQ ID NO: 99801 - DNA, 329 bp, Zea Mays
agactaaggaacgaagctgtagagaaagacaaaattctgctttccttagtggacagagtgaagaaagatgaggcaaaatttaatgctcaatctgaagtccataaagccgaagttgagaacctttagaaaaaacttgccgaagctaataaaaattttgaacttgcaaaagtaaagcaagaaataagtgaatggtcgaatgctaggctggaaaagaatgttgaggagcttcgtgaatccaaggagagatgctttgagaaatccttggattgcacaagaaaactgaaaatcagctttgccaaggtgggtgcgtattattcagaagaaaagtt

SEQ ID NO: 99802 - DNA, 592 bp, Zea Mays
ccttcgtctcgtataaaagctcgtgcatactacagaagcacttcgcgctcggctccagccccttgcttcttatagcccaggcaaatatccccatcctaattatagcttcgggggtaatctgatggagaaaaatctgaaagatcttaaatacctcaaccacaaatttgttgagtgggaaccagagacctgctttcaggaagcttcggtaaataacaacttcgttttcctctggagcaggggcagtgttgtctcctccaaccctcataatggacatatcgcggaaatatctccccctcatggcgtcaatatgactttgtttgatgctcgatttcccgaagattgtatggcttggccgctagggctgatcctcagaatcttcatccccactctccacatcataactatcactatcatcagaatcttcaaacaagccctccattatctccttagtaattttctctgtgtttgtcttctctatagattcataaaacccagcaatgaaaggattcacaactttcttttctttatacagtttcttctcctcagttatcttctcctcagccatcttcttctcctcagacatgggtcaaac

SEQ ID NO: 99803 - DNA, 515 bp, Zea Mays
cccgggataaccccaacccggcatcgggcacatcagcacaaacatccatcgcgccaccatctgccggctctgacaacagatcttctggaaccatgtcttcaagagtttgatcaaagttcgccagagataattcttgcagaccaatgagggcagacaaggcaggagaaagaacaccactactttccccactagctatgtaacgccggctattcttccgaatcagagggatttcatcctcttcttcatcatcttcatcaacaacacggacagtacacccattggggtcaacttcagcaggatcacacccattggggtcagcagcagtcgggtcacacccattggggtcagcttcagcaaattcaggcactggcacttcctcagcaacaggaacagaaggaccggcatcctgatccaagctagacactcgacgaagacgtttcttcttcttctgcccctcagcaagagaagtgggttgatcggctcggcgagaacgcttcgggcgaacactgtcaaac

SEQ ID NO: 99804 - DNA, 544 bp, Zea Mays
ctgaaacgcagaaggccctattcgtcgcccaacagttgagaggtcctgccagcacttggtgggcaaaattttcagccattcagcctactggacatttggtcacgtgggcagaattcaagcaggcattcagggaacattacgttctagatggggttctacagatgaagctggaggagttcatacgtctgaagcaagggggagactcagtaatgcaatatcttaacaggtttaatcacctctcccaatatgctattgaccaagtggacatagatctgaaaaagaaaaaatgcttcatgagagggttgaatgacagacttcagtgcaagatggccacgtgtctggatctcacctatagcagggctgtaagcacaacactgttagttgaagccaagaatttggggcaaggaaaaaccaagagatatgggggtgaaggatcatctcaggggtctgaaaagcggacaaggttggtaattcgtcccttcaacccaaatcgttcttctcctcgtccacccacataccccttcaagcaaccagtgttcatccg

SEQ ID NO: 99805 - DNA, 289 bp, Zea Mays
cgcatggtacattgccttacccctaacatgattaggtctagggtgatctagagcttaagtttcatgaacacttttctctagggattacgagttagatctagttgatttggcatcgctcttgaaaggggcaacaaatcggttattgattatctccgaaagtttcgagatactagaaaccgatgcttccaagtccatgtcactgataaacaactagcagggctggtttcaatgggttgcatacatacttgaaagaaaaattagatgacaatcaattctttttgttatccta

SEQ ID NO: 99806 - DNA, 296 bp, Zea Mays
ttgaaatgtaaacttttgcccactaataaaaattgtacaacttaaaaagctattcaactttgtagttaacaattgtttcatttgaattcgtttgcaccctcaaacaatcaatttatgttcggtttattgtaacatgtgggcaacaaaaccacaaaccacacacaaggtatgttatagattgagtggtagaggaggtttcacgcgaggatgaggttggaggttcgattttcagctaccgtgtagccgcgaattttgcgtgaaaaaaataccgggacttgtgacttaggacgggcggt

SEQ ID NO: 99807 - DNA, 416 bp, Zea Mays
tctagggatagcaatttgatccgcggattcagatatgcgtcgaatatccgatccgacagagccggatatagatacattttttacccgtgggttaaattcgtatccgatccaaagtcaggtggacacggattaggatattatcacccaaccacagattattcgttggatatctgaaatcgacccatagtttattttttgtcgtagtctatatcacatagcaaagagcaaatcgtaactccatgaacctcatgcctaacgttctcaattcccaaccttagattgtcccttctagctttattggcttcttgcccccctgctcccgtgcccccttcctagtcccataggccgcagtgcagctgtggctggccgatggctaccccttccaagctctagtgcctttggtcatagccccacat

SEQ ID NO: 99808 - DNA, 581 bp, Zea Mays
ccgaaataacgggtaaacccgaacgcccagctctagtcgacggcgaggctgaggatggagtcatcgacggagccgaagatccagctgcgaacgcagcagtccgcttgatcccagatcgggtcttgcgggcgtgggggagcagagtcgttgatgtggtggcgaaggaggaacttgccgcacatcgatttgaagaaggatgcccatcgggagtagttggaggctttcatctccagcttggtcggtacatgagattgaaccgaaaccgtggcatacgagggcaccatgagctgctggatggcgccaaggttggcgctggcgcctaaggtctgctcagacatggaggagaggaggggtgccggcggcgtgagaggaagcagagagcagcggaaggaaggccgggatcgaattgatcctggtcctctgataccatgtagagagttggtttaggggaaagcaccgcacactcaatcaggtgtgtgacttctcatatatatagccaagtggcttggtgtacaaggatacaatctcctaaactaggaaggctgtcacctatacaaggtaaggctaaactaagaaggttg

SEQ ID NO: 99809 - DNA, 601 bp, Zea Mays
ggtagtatgaggggaaggacgagaacaccgagttaaccatctatagtttgcctgcttgtgatagaaataaggaggttattaacaggtatttttagttctctagatcagggacatgaacgagtctagctttggtctggtggtccctatcgacagaccagggtaggtgaagggaaaactcccgatactgcagttaaacgtctttgctaggatattcatcttgtcactaggcacattgattggggtagatgttggatttattgtagttgacatgaagactgattgaatcagcaaaggagttgaggattgccttaacgaagaatagccgctttgggcaagcttccatgattagaatagtgtcatctgcctactatatgatggggaagttctgatcacccatttgtggcggaggtaacttgaggagaccaaggccttggccttattgatgatgacctgaaggaggtcaatagccataacaaacaagatggtgagaggggatcaccttgtctcacccgtctcttgctgtgaaacaattttctgtggaccccattgagtaggacagaggaggttcttgagttcatgatcattttgatccacattagcc

SEQ ID NO: 99810 - DNA, 583 bp, Zea Mays
gacttaagccgattgctccgttaatagggcatagtggtcaccctaggttaagtaagcgtgagcatgtcacaccgccttaagtcattgccgacttaagtcgattgcttcgttaatagggcatagtggtcaccctaggttaagtaagcgtgagcatgtcacaccgccttaagtcattgccgacttaagccgattgctccgttaataaggcatagtggtcaccctaggttaagtaagcgtgagcatgtcacaccgccttaagtcattgctgacttaagccgattgctccgtttgtagggtatagtggtcaccctgagtcgagtaagtatgcagattgacaataaacaattcgagtgcctttgagaatgaagtcattttattgatggtgtatctccctattatagaatacaatgccgtcccaatagcttttgaaatctagctaggggtaaaacttcctgagatgctctatattccatgagttccctatttctgtgccatccatttgagtaagacgatatgatccaggccgagtgacttctgctactatgtatggcccttcccatagtggcgacaatttgtgtcgtcc

SEQ ID NO: 99811 - DNA, 957 bp, Zea Mays
cctgagtcggttttaataaagaaacaaagaaggaaagctagtccttgcaaagttttgcgatactttcctattaaagataggctaaaaagattgtttatgtgcaaggatatagcacctctcctaaggtggcatgatgaagagcgcataaaggatggtgcattacgtcatccagcagatgcacctgtatggaccaggttcgatgagaagttcacaatttttgcatcagactctcgtaatattcgttttgagttggctacggatgggtttaatccatttgggatattgagcagtactcatagttgttggccagtagttttaacagtatataatctacctctgtgattatgcatgaaagatcataatcttatgttgtccttaatgattcctggtcctaaaagtcctggagacaaaattcatgtgttcttggaatcactattggaggacctgaaagatatatttcagaatggcatgtccacatatgacgcatcgagagatgaactatttaatttgcggggggggctattttaatgacgacaagtgacttgccaggtttaggaatgctctcatcacatatggttcatggcgaatttgcctgcccgccatgtggtgacaatgcatggaccaaacgtctaaagcacggtcgtaagtcatcatttatgggacactgtcaatggctttatgaagagcatccttatcgttttgatgcagattcatttgatggaacaacagagctaagatcagctcctgtgacctattatgattgttcgattttgccgaacataatttcactgggggattttaagaattctaaaacttacaagtcagtaagtagcctcttcacattgccatattgggatgataatattcttagatataatcttgatgtgatgcatattgagaagaatgtttttgataatctacatggtacactgttcaatttagatggaaagacaaaag

SEQ ID NO: 99812 - DNA, 494 bp, Zea Mays
tgagaaatgctccatggcagtctacctgggagaaagccgaaactacccaaatcaccctcctttccaaatcaccgccactggacaccgcttcctagacacttgccagaatgctgcccaaagagccctcctccagctatgccaaaactacagcagggaagtctctgagacaccccttcgctactttccacccagcaacaaaaatactcctgcctagaggaaaatacttcaggccttgtcagggagagatcctaatgaagatgaccctaccatagtctacatggccggatatctccatacacttgacaaccactatgacaaccttttctcccactgcacccacctaaattcccgggtagaaagcctagagcaacaaatcaaggaattaaaggaagaaaaggcgtcccttcaagacagtctcgagatggcggaaggcgaagaagccaacactcgtgaaacataccggactctgaagatggactatgctaagaaattaa

SEQ ID NO: 99813 - DNA, 794 bp, Zea Mays
ctacaatagatccttcagcgctccgagtggcgggagaagcttgttttgcttcggcagtggaggaggtctattcaccaaattcaggcactacggtcgtttcaatatatcgaggccggtgggtcaaaacctttattttcttgcccttcggcacaacagtggtggctgaagcggcagttttcctcttttttctttccttctcaaggggtagcagtaatcaggatatatgaagccaattgcatcaaaaaccttgttcaatcttttcttgccccgaccccaaaggctgaggacaaggcatcatcttcggccctggtatatgtcccaagcaactcgtcgctagtagcctcaatgcatttcaaccagtcatcatttggttcgtcaaacctctctctgtatctgaaggtatatttcaatcgaactaatccaccttcgctggattcagcagtagtctccttcggcatctcccagctatccacaagtggccacactctgtaggctatgtgctcttgaattatgtcccttgcgccaatgaaagcacagacattgctaaaagtcttctgacacgcttcagcatcactttcaataaccaccttcggccttcggaggcctaagcgagaccagatggggcgctcgataatttccttaatatcctccctctcaatcagattattcttaacataaaatcattcctccatccaggccccgggccatctttttcggtatgttggaaccgggtagcttgcattagagcgagcaatgaatccgtaacaaccgaagttgttgtgatactgctcttt

SEQ ID NO: 99814 - DNA, 495 bp, Zea Mays
attgtgagcagtgggcccaggcatctgcgcagggtggcagtacgtactatggaaccgaggcgaccttcgatctttggcagcccgtcgttgagacggccagtgacttcagcttgacccagttctgggtcgtcagtggatcctaccaagccaatgacctcaacaccattgaagcaggatggcaggtgagaaaatgcatgcatgcatcacctcaacacaccattgaagctataagggggctgtaccacttcatgcattatgtaatattaagctgtgcaatctcgatcttaattaattaattaactgatggcccttctacaaaattgcaggtttccccgaatatgtatggcgacaacagccctagacttttcatttactggactgtacgcaattccttctttttacttccaattaataatattagtaatctatatatattgggctcgtttttgctgatttgtttttggaacaccataaaataaaggcactaactttcta

SEQ ID NO: 99815 - DNA, 860 bp, Zea Mays
agaagcgggaggctggctggggcgtgtcgtgtagagggtgcgggaggcgacacgggtgttggcgagcatgcgtgggcctggggagggtggagtcatggtctgcttgtgtacggtaggggtgagttttggtgtgagtgtgtgcgtacatgaacagatactacaactgtacttgtaagtgagaggcaattaaaagccattgcgctgcatgggagacttaccgccaactacacactgccggggctggggttgtttctgcgcttaaactcaactgccacttctacatgcatgccgctattgctaattgttgctgagctatagtgctaccaggtgtaccgaactgaagctagttgtgttgggctttggcctccgatgcaagaacgccatgcttgggcctcgaggccggaatgaccaatagaggccgcgacaggccacatatatgccggtggggtctgaggagggtgaagttatggtagtgtcgcggtctacactattgacttaatagatagtagtagaaactagtagtgaaggtagaggggttgataggttgcctgtatctaaaggtaccctcagcagagtgtgacatagatctcttctgaattctgataggcatgaagcatgatgaacaacgaccgcttgaattcattgatggacatgccaagctcattttgtttaggtccgtgggccctgctgtccatctgcttttcttcagcaagcatcaagagatttgggacaactaagatgcctaattggtcggtcactagctagaaaatgaaaacagtctcatgcaccaactctggcttcaggtacatggcctgcgagatcttcgatagtctcagctttgtctaatccaatatttctcg

SEQ ID NO: 99816 - DNA, 401 bp, Zea Mays
acggttcatcgtgggatacgatgaactttgaagttactagattgtaacatgatctttatgctacaaaatgctttataaagatgggatcataatgcttttcaagtacaaataaaacctaaccaactagaaacaaccgctcaagctagcccactatacggccagtccacttttacctaaagtaggatacttgttgagtgcgaaagtactcactcttgccttctccacctctattctacgcacttactcagatggaggagaacaggtgtcccggactcaggaatttcaagactatgacgagttctaggcccgcgatcaaccagtcgactattgaattcactagattttataaataatatcaaggttatgtaataaatactcgattcaatgtaataaagtattgt

SEQ ID NO: 99817 - DNA, 467 bp, Zea Mays
aattctttacactccgaagacctcgacggtggatggcgacgcgcagagctccgacgagctcgtgtaccgaccaaattgctcaaagaatggtgtccttctttggccgaggccaaattcaagacctaaggatcgtttcccctaaatcaatttcactaatggcgcactaaaacggcctgcccacggtgaccgtatgggcaacggaaaaacacgggcgttcacgacaacccagggcggtctagttcaatcaaaggagtcgtgaagcttgaggaggacctaaggacactagaacaatcgaccagagcgcttgaacgaacctggggcaagctggccacgacgagggcaaaccgtgcggtgttcttgagtggattgggggaaatgcgaaattgaagctctctggtggaggatttgaggtgcggacgggtgcgctagctgcttgaatacataacgaagtcgatggtgcactcgat

SEQ ID NO: 99818 - DNA, 517 bp, Zea Mays
attttgtggccttggatgtggctgcggcggaggcttctccgcgtgtgatggatgctgaagttcttcctggtctgagtgctgggcgtagacggcgaagggcggtggcgaagcggagagttagtgaggtgtcgcggagtgatgggcgtcattgtggtgaggtggagggtggtcgtcttcgtgtggacggggctggtaaacgggaattgttgtcctcgccggctggggcgagtgtaggagagggggagctgcggaatctttttgagggtgaagagctaaggataatgctgtttaactacagggagatgggcatcatcccgaaggttgaaccattgtaaggtgtgatgccctcgctgcatgtatgtaactataatttgtatgatgaggctgtgtgccttcgctgacccggccgtgcccgtaggggacttgtgcacttgatctagcgcatttattgtgttggtctggttgcatccttagtcggtttttgcacggagggtccggttgcacccttaggtgactt

SEQ ID NO: 99819 - DNA, 458 bp, Zea Mays
gaaactgttccaattatgcaaagcactgtagagccgagcgtagtaccgaagataactacagttgagctagccaaggctgaagataataaggccaaagagccataggtggaaagagtgacaaaaatgccagaaatcctaagtcctctaatagaggcaaccctgccgaaggtgcaaaaggcttctgccgtgactcctaagaggagaagatggcgaatgtgctggatgttgtattggagactacaaaggcgctgagccctgctcctgcaaagaaagtcgctccaactgaagccaaatcacaggccgaaaccgaaactaggcgagcagaagccgaagctacacaagttcaagctgaaaccgaagctgggccttcagtgcccaccgagacagagcctgccgcacctgaagaaaaggcgacagagcaaactgctccggaaaagattgagattcctgcccccgaa

SEQ ID NO: 99820 - DNA, 600 bp, Zea Mays
tttttttctggatcaatctcaaattaggatcgcgggcggttcatatcgtgggtggttccagacgtgggcaccgggcgtgagatttttaatgcctactgctcgctccacatgatcatttatcactggctccagcatgtcatgctgctcatgctgctgcaaggtaggattgtgctctaaacctatattgatttcaccttttgatgattgtagttgtccaaccctgactcaagatcatccgccctcttcccgtttgatggaatgcgtaacccatacctttttatatacataaaactgatcagactaatatggaatctgtctttcctcttgggtagcatccgtcctcttccgcttgtgcccaaggacggttacaccatttgttgctaggaactggagctaccaaatggcttatcctcgtttctatttcccaaagaatctggaatttgtcactatgcgagtgtttcaggatcaggtcagtaatagtgattacttccttatatactcttgacttaaattaactttggcaaagttacctgtaaatcttccttctgctcattccagcttctactatgtcaaggccttgcctgcagcacgtaaatgaaa

SEQ ID NO: 99821 - DNA, 472 bp, Zea Mays
tatcttgtattgggcttgcgaacacgacggcccagtctgataattccagcttcgacatcgtcttggcccatttccgcagcctttacatcttccatcagaactccatccggctgctgcacctcgtcaacatgtctgctcacatgttgtctgctgacattccccctgtcttgaaaggacgcttgcccccaagcgaccgcacatggaaagcgacgacggacatcacattcatcttcccaagaatccatagcagcatcacaccccgaccacctgatcaaaacctgatcgatagaagcacctccgcgggaaaccactcgacgctgcagcacttggacaggaacacgaagagcgtcaggcactgagggaagagatgcactcaccaacacatgttgtttgacagaaggtttcaactgggacacatggaacaccggatgcacatgagaagaatccggtagcttcagtttataagcaacag

SEQ ID NO: 99822 - DNA, 842 bp, Zea Mays
gctgtcctaaccacatgcaccatacctctttaaaaccccagcctaatgtgcatcctccagtccaaggccactaggagtttgtaatggagaacaatacccctccaaagactgggacgggcttcttaaaaacttgcttcaatggagttaatgctctctcaggttcttagtttcttccatcctgcctctgttttctatatgcttgagatgcaacgaagtgatgctatagcagttttacatatggttgtccatgtgtccttattgaactagcgaattctctgtatgtgtctttttttcaggcgttggaatattatctattccatatgcattgtctcaaggaggatggctgagcttacttatcttcttaaccatagcaatcatctgtttctacactggtattctcctacagagatgtatagactcgagttcgcttgttaagacctatcctgatatcggtgagctagcttttgggcggaaaggaaaaatcatagtagcaatattcttgtacctagagctgtatcttgtggctattgatttcttgatattagaaggtgacaacttggagaaattatttccaaatgctaacttccatgctgccgggctgaaggttggaagcaagcaagggtttgtgttgatgttcagtctacttgttttaccaacaacatggcttcagagcttgaacatgcttgcatatgtcgcccttggtggagtcatggcttctgtcattttaatcgcctctgttctgtgggttgggacatttgatggggttggttttcataagaaaggtgtgcctgtggactggtctggtatgccaactgccatgagcttatatgcgttctgcttca

SEQ ID NO: 99823 - DNA, 1167 bp, Zea Mays
tctacctcgttgagggcgacaacgactacttcctgccgctcggggatgggaggtggcctatcgtagagccagacatcggagcgctcgtcgccaacctcagcaacctcaaggagcttcacctcggcaacgtcgacttgtctggcaacggggcagcgtggtgcagtgccttcgctaactccactccccagctccaggttctcagcctacagaacacccacatcgacgctccgatttgtgagtcgctgtcagccattcgctcgctgaccaagatcaacctgaactacaacaaagtgtacggccggattccagagtccttcgctgacatgccttccctcagtgttcttcgtcttgcctataatcgcctcgaaggacggttccccatgaggatcttccagaacagaaacttgacggttgttgatgtcagttataattctaaagtatccggtctactgcccaacttctcatctgccagtattatgacggaactgctttgtagcaacactaacttctctggtcccattcctagttcaataagtaatctcaaagccctcaagaaattaggtattgcagcagctgacgacctacaccaggagcacctccccacttcgatcggtgagctcagatcgttgacatcattacaggtttctggggctggtgtggtaggagaaataccatcttgggtcgcaaatttaacttctctggagactctacagttctcgagctgtggcttatctggccaaataccttcattcataggtaacctcaagaacctgagtacattgaaattgtatgcatgcaacttttctggccaggttcctccacatctatttaatctgactcaactacagatcataaatttgcattccaacagtttcagtggtaccatcgagctcagctcgttcttcaaaatgcccaacatagccagattgaatctttcaaacaacaagctttctgtagtagacggagaatacaatgcttcatgggcatccatcgcagattttgatactctatgtctagcatcttgtaacatatccaagctccctgaagccttgaggcacatggattcctttgcagttcttgacctttcaaacaaccacatccatggcactctacctcagtgggcatgggataattggatcaactctctcatcttgatgaacatatcac

SEQ ID NO: 99824 - DNA, 651 bp, Zea Mays
cttcaatttcatttccaagagcagtggctggccttctaatactgaagcgggaccaaatagggcgttggatgatcccctttatatcttctctttcaattaagttgttctttacataaaaccattcttccatccaggctcctagccacctcttccaaaacgttggaactagatagctcacatcagaacgaggcacgaagccataacaaccaaaattattatgatattccatccgaggagtgatgtcgagggatcaacatcttgttccaagcctcatgaccgtcaaagtcttttctttcttttcttcccctcggcaggcacggctggatggatcgtccgacgcgatcacttgcgacgaacactttcaggactctgaactccttcatcctcaccaagttcctgtccaattgcaacattcatcgactcagtacgggcagagtcagatggttctccagccaacatactgagaacagtgttcacctcagcctcatcagcgctagtcggcatctggaaatgggtctatctctctgcttcaggaagattccagaatggagcaatgaaaacctcgatgtcctctaaggagggtcgcactctatgacccggactaccatcttgaacaggagggttggaagtgaattcagaaaaaggactctg

SEQ ID NO: 99825 - DNA, 440 bp, Zea Mays
atagcagtgaagcagatccactcgagattatcatggttgtgtccaaatttccagatgtgttcccggaagatttaccaggtatgccaccagagcggaaagttgagtttgctatagagcttcttcctggcaccgcccccatttctaaaagagcctatatagtgtctggactagagttggttgaacttaagaagcagattgatgagctgtcagagaaaggttatataaggccaagcacctcgccttggccgcccatgtcctgttcgtggagaagaaagatggcaccagaaggatgtgcatcgattatcgagctctaaatgaggtcatgattaagaccaaataccccttgcccagaatagaagatctgttcgaccagttgagaggagccagcgtgttctcaaagatagatctgaggtcaggttatctccagctcaggatccgac

SEQ ID NO: 99826 - DNA, 933 bp, Zea Mays
gttttgtgggggttttctttggattgtaggtaaaacaaaggatgaataaatactctcatggatcaaccttgagctttgataccacctaatgggacaatgggttcctgacctttcgatgagagtgggggataactcgatttggatatgttgctattcttgtcgttccaagaacaaccccaaacctgcaagcaaaccgaagaacaagcaagatcgagtggacaagcaaacaacatatagaccttgctaaaatatgaatctcataatcacaaagttgggttctaaattgagtaaaatgggtgctctagccgagtcatgcgattacaaaagagtagcagtagctaaatgttgaggaaatttcggtagtgaatttatagggcagatcacgagaccgagaactaaaggtgaatgcacaaaggacatgaggatttagacggatttggcctctcaatgcgagataataccctacattctgtgtattgtggtgtctgttgcctatgcgatatgatcgaattatctgccctggatgggtgctattgtcctctttttatagtacaaggaggtgtgatttgttacaaaaaagcttatctatccgctagctagataaggatggagatcagcctaaccgacccctattaaaagaaagggtacctatctctatatttacatgttgactcccttataaattgagatatgctacctttacatagatacatttcttataacgaatcatcatcttccggtcttcccttatctatatcacataggcaaattctattctaacatgtgggctgagtcccctggtgtccgagtccctcgactgagtgtaaggaaaatggaccccgacccatttgtctaagtgattttggtgtttaatgataaacatagcggtgaactaatggtttgcaagtgtttgtgttttgtagttcacatgat

SEQ ID NO: 99827 - DNA, 327 bp, Zea Mays
cctttttgtgccttcggcactttcacttctgccgaagggcttgtaacttctaatatctttgttccttcgacccctatctcttcaatattatcggccttcggctcagctaatttggctgaggatgtcttcggcattgcagccggctcttcaatcttctgcgtaagcgcaggttctttggcttcagtagccgaagaggtctcaccgccaaattcgggcactatggccggttcaatatagcgcggtcggtgagtaagaaccttcacctttctcctcttcggcgcgggctcactcggacaagccgaagtaacatccttcctagaagtgcac

SEQ ID NO: 99828 - DNA, 349 bp, Zea Mays
ctttacttgcctggttgcttgctatattacccttaccctaagaagcattcccagaattcttttgaaagttatgcttatttttcataggataggggcattccttaatgaaatggctaggctttccgcaattgaaacatgtattagactggccaggtaatgtgggaaaacaagtgccagtggtactcggttgagtggtttgagtaggggcagcagctagacgaatgaaaacaggctgcttaaacgggtaggagggtgggtgaggaaaacacaatttgggctgaaggaatggataactagccttgatcacttctcggatccttgggaggatccctcaccgccttcacagccg

SEQ ID NO: 99829 - DNA, 387 bp, Zea Mays
atcgtggtacattttggtgctccctggatgcatggagaatttggagagatgggcctcatccaagattctcttcttgagatcctcatttttaggaaccaccaatctgttttcaaaccataatataccctttccatcttggcggaaacatttatacttctcggtcttctgacggagattctccttgacaatctgcactcccttgtcactaagctgggccatgatgatctggtcttgcaaagctggctcaacagaaatgtgagacaaagcaccagaaagaattacttcaatcttcatcttgctcaactcatcacacaagttgttaatgcgagaatccatcataacacagttacattgcaacttccgtctcaatgcatctgctaccacatt

SEQ ID NO: 99830 - DNA, 563 bp, Zea Mays
ttccagagaaaagtgctacaaagtatccatggattgtgcgaagaaactaaaagatagctttgcaaaggtgggtgcatactcatcagagcaaaaatttatccgaggcaatcccgaaggagttattcaatggatcggcgaagaggtcaaagcttttgaagaaatactcagcgaccgtggggatttttgtgccttcgcgggtgcccgaggggttgtagtagttttggagaaaaccggctgtgaacatgttaaggctgcatcccagtcagatgccatcttctctgtagacgatacgaaggaaccttcaaccgaagctactttgatgagcgggaagttctattccgatgtttggatgaagggctgccgtgagatggccgatgaagctataaaaaagagtgaaaaagaatctcacgatgcccgagtggaggcaaaggaagctgaagaagctgttgaacaagcaatgattataggcatccttttaaaaacttttttgtattgttgtttgtttatagcatcgaaattcattattatgctctttattacaaccgacctttcgccaccaccgg

SEQ ID NO: 99831 - DNA, 400 bp, Zea Mays
gtactagtcaatcgatcgatcggtcgtgcgtgcgtgactttcagggtctccaggctccagctgctgcctaaagacgccatcgcactgacggccgccagcatcacagtgctcagccttttagtactaactcagtggtggcggcaaattataagcgagagagcataataatataatcggacgatagtgctggcgtggcaagacatttgtccgatctgcatttgcgtcttctttatttgctacctcttgcgccatgccaaaacgtacgagattaccccgacaattgaatatcaataatgccgttaaccgggtcttgtttaatttaaccttgttattgctactaatctctttttagctcgctcgcatgccacacgtgcccaggaaaaaaaaacagaaaactttt

SEQ ID NO: 99832 - DNA, 562 bp, Zea Mays
cctctctggatcactccaggcctccagggcgccctaaagctgcattttttttctttactaggtgagtgcccatgcgttgcaagtgttgtttcaagatggtcatttggttgacgaggcaatgtcgagcgcttacaccacaactacatacattctagtggccaacatcatgaacccgagtcgggtcgtggcgaaggtttgctctcgaggatagcgagtgtctagagtgcgaggtgatgggtgtgctgattgacaagaccaagcacgtgtcgctcaacaggtgggccaaacttttatcggataaagtaggcccagtacaccgctatcgacgtctacatgtcctacgagactggtcggctgctgctcatcagggagcgcgtggaagatgcggtcaccgtcggtgcaacaatctcgttgtgtcatgttctatgttatcttagtgggactatttcttgttgcctattgtttactctctctagctccttacaacttcatgtctaatgtgatgcgatgtgaattggactagtgatttctgtcacacccggattaaaggggcaaacccagg

SEQ ID NO: 99833 - DNA, 485 bp, Zea Mays
tgattttgatgctcaacacaaatttccaactccagttcaatctgctgagatgttttctgactctgctcctcttgaggttcctccaccagaagacactagcttgacactattgattgacggctgtgcagctatggttgcacgttgtgggaaacatattgaagatttctacaaggagaaaagtaagacaaacccgcagttccttttcctaagtggaggagctggctgtaactattacatgagaaagttatgggagcatcagcaaaaacatattggtcagcgatggcatgattctgcaaaatcaaagacttcttctgataagttgacagcagagaatcgtgggaaaattcttggtgaaaggccccttgacagaactactaaagtacatagcccatctctttctgcaaaggaagctgttcaactgcaatctaatcttactgagacatttgtcaagccaatatcccttgtaagttatttctattacattg

SEQ ID NO: 99834 - DNA, 363 bp, Zea Mays
gaatacagtcaatgaatccctgcatgaaaaagttctcaagacatttattagggccaaaagattggacaacatccaagacagaaccaccatatcctccaaaatcaatgatagacctgaaaaaattgcaacttgaaattcaaataacaaatgatacttaattgaaggtagaataatgaaagcatacatgctcgggtctagttgtcctgaacaaatgaacttaaataattggcgagcacattcttcacgtgatacatggggaggttcagcaactgcagatttagtggaaatattccttgcaaccagttcaggagttgcctaatatatatatttgttagtaatcaatggcataaatgattatgtatt

SEQ ID NO: 99835 - DNA, 404 bp, Zea Mays
atctttgcaaatagttggtgaggcgtcatttcctcatagtcgtcacggtctcttatcatccttgctagactcttgtccttttctttgtatgctctcatgaatagtctagtgactttggagtcactccaatcttcacttccaagcactcttattttgtttaccaacaccattaaccgataaaagagtgattgaagtgaatcacccttagtccaatcatatctagcaagctcactctccaaagcttcaattctatgtctcttagctttggggtctccttcatgtgacattttaagaatgttccaaatgtcacgagcatcttctcttccttggacttttcggtattcttccggacaaagacttccttttattatgctcattgcttgagcattgtggtgaacttcttg

SEQ ID NO: 99836 - DNA, 343 bp, Zea Mays
aaataagccgggtatgctctatcctttagtggctgaatgttcttgaaaatgaaatcggagaccacagcttctgcagtcagacccctctctttcaataatccaacctcagcaagtagagccccagcctcagccacctccaggtctgtgggggattcggtccaactcggagtacgaacatctggctgtctccctgaccgtgggggggagggaattcccatgattctccacgataaaccattccaggcgccatcctttgatgttgtccttgagtgggatgtcgaggtagtcgatcttcctcccacgacgcatctccaaactcgcgccccccacaagctgatgctgc

SEQ ID NO: 99837 - DNA, 554 bp, Zea Mays
ttttggtctagagtgagacgacttcgcttcctcaacctttttcctctttgcctttgtagccaactctttcttcttcctcttctcttcaacggaccttatttcttgtctcttcataacactaacaatccttttccttttcacacaattagcttcttcttctaaaatctttgggtagtctagatagtcaaactgtagggcatctataactctattcaaccttcatttctctcgattagtgaagaccacggtcattagttggtctcctttcttcatgaaatcttccaaaatttattacacatcgtatctatcatcttcagttattcggtgcatggttccttgaatacatcttgaaacttgaactaatacgacaatcttacaagctttcctttatccactccctcctttggcttcagcattccctaaccgttcaatgttgggaacacttcgttggcaagaaattcttgaaccaagtcttgagtgctgatgtgctcaatcacaatgttgaaagtgacttgggtcacttgctgtggcgagcctagagccatatgacagac

SEQ ID NO: 99838 - DNA, 618 bp, Zea Mays
ccaactagaagccattgactttgtttatggcatatttatcttaatactgccaaaaacatctcagtcatggccttcgctaagatcgccatcacactgctacgacaaaaatggagctcaggtccgatcaggaattagtcagtccagcatgtttgcgttgaaaggaaaatataaatggcttgtttgcttgtctacggcggcctagaaacgtcggcttcttctaatattaaaattagcgtggccagccaatccaaaaggttgctttgagattaataaacgaacatatgtcattacacgatccacgggtacaaaattgtgaccaaacccgtcccttgatggagtaattaaccgtcgggtaatatgacccactgtcatctctatctttatgactattccccttatttagctcttcatatactacattttaactcagctattgatatttttacattagtttttaaagttaaaaaatacaatacctgtattatcttaatacatatggttataggtaaaaaaaaaacccgtaataataagatgattctagcctctccaatcttttctgattttgtggcttccaaactagccctaaaaatactccgtaggagaggggccatgcagcgt

SEQ ID NO: 99839 - DNA, 392 bp, Zea Mays
ttgcaccactgggggaaaagcctttcatgcgcaaagcttgttggagaaaggaccaattgaccttgtcataggccttctcaaagtcgagttttagtacgacgccatcaagcttcttcctgtgtaactcgtggatcgtctcgtgtaaaataatgactccctccataatgtttcttcctgacatgaaagcagtttgagaaggcttaatgactttctgtgctactagagccacacggttcgtcattaccttggtgaaaatcttaaagctcacattaagcaggcatataggtctaaattgttgaatttgtttggcctctttttgcttggggagtaaagtaattataccaaagttgagatagtacaggggcagatttcccttatggaactcaagaaag

SEQ ID NO: 99840 - DNA, 451 bp, Zea Mays
atggatagatacatcaccacaaacgagtaggctcatgacctcatcgagcaatggaaggtcaaactcgagaaaaagaagatgccccatgacaagagtgccactggacaaaaggttgagggaagaagtcaacatcaccagaccatcgccagcgcgcctacaaggcgcccctcgtggcaacaacatgtgattgttggatgacatcctcgacggcccatgcatatccttatcacaaagagatgcaccacacctacacaattgtagggacttcaagaactcaatcgactacggtcgacacttccaggaactctcgctgccacctctgtgatggggtcagcatcctccaccaacaccagaagagcagaatgaccaattgttccccattgttgataaggaggtcatcatcaactttggggacatggttcctaggaaagcaaaataatccacacagcaa

SEQ ID NO: 99841 - DNA, 350 bp, Zea Mays
cattgagcacaacacacaatttgaacttgttgctttgagttgcttgtactgacttgcctgtgaaaaaactttgcgttggtctgaagaacactgaaaaaactatgctttggtctgctcttaatctagatgataatttctttgattctgattctgaaatgatggttgagtatgcttgaataaattctttgtatgtactggtcgtactgcttgaacaagcaggcatactagatacacacggggccaaacacaattgtgctaaggattaaccgaatggattcttgagagaaggattaaatccagagagggattaaacccccaaggggattgaatgaaagagagggatccactca

SEQ ID NO: 99842 - DNA, 478 bp, Zea Mays
cccaccttagagcctcccacaacttccaccacacttgcagcctccgccactcctaccactgctacaaccactccctcagtcacaccacttattccacccccctcgctcccaaggacgcgacgaggatgatgttgcatcgttagagggacacacgagattgattaacctttgttgtgctactacaactagggtacaaaggttcaaacatgtgcttgctaagagtgggtttccagcatagcgagaccctgcagcaaacccgtgtttcagctcattgacccagaagtcattttgttgatgctgagatgcttgctcacatctctttgaggcctcatcaactcttggatatccaggcacttaagaaagcatatggtctagctcttgaggctcatatcacttacctgcctggtttgtctgcactgcttagtctgggtggtaagcatgtgcagcagtgggtcaaagttttctatgccacagtctg

SEQ ID NO: 99843 - DNA, 555 bp, Zea Mays
gcgaatatggacttaagcccgggatgtcgatgagaatggtaatctcgatatcctgattatttttgcctctcacaattttgatatcgtcctcatctctgcccatttgggttaatataaatggttttcgaaattcggaacgtagttattatatgagctatcgagtcttgctcctatttaaaatcaatctgttaaacaaatgtgaaattggaagctcgacccacagttgtaattttgtcccaaataaatttattagaagtcgacgactaaagtgtttgggtttaaaatttatcgattaagacgaattggaaatgtcacctaattatttcgctcttgttcgagcgatctctacaaactctgtagcgataatattaagggtggactgtttaaaagaaaaaccgaacccaaactaaccgaaatcggaacacttgttagccaattcggtgtcctatttcaaaatccaagtaaataatatgtgttacccaagtgtcgttttaatccaattgatttacatcttgtctggacccaaattctaatattctgaaatttctttttgct

SEQ ID NO: 99844 - DNA, 987 bp, Zea Mays
accattggctcttgggtgtgctactgatgcgtacttgatctagatactccgttgttcgcagaaatcaaagaattcaaaactagtgaagttggatcctaggtcagttatgatgctattcggtatcccaaacctaaatattatgtcttgtatgaactctactgccttagctgaggttaaagaagcaataggtttgtactctatcgatttggtgaatttgtcgatggcgaccagcacgtgagtatagccaccctgagctttcttgaagggtccaatcatgtccaatccccagcacgcaaatgaccatgttataggtatggtctgcagctgctgtgctagcaaatgttgttgctttgataagaattatcaagcttcacatctctagactaactcggccgcgtcactctttgctgttcgccaaaagaaaccagacctgaaaactttcccaaccagagttctggatgctgcgtgtattccacactgccaagcgtggatctcatctaataactgtttcccagtagccaaggaaatgcacttcatgaggactcctgtcgcaccccttctatacagtgcgccccctatgagggtgtagtgggccgagtgcctcgcgatgcgttatgctgtggccttatcatccggttcttcttcattccttatgtacctgatgataggctctctccaggcattagggtctggttctggttggctcagggtgttgcactcttccgcctgatctgagggaatacttgggcgtggcacttcctggacgaagactccaggtgggacctgggcctgactggatcctagcttcgtcaacgcgtctgctgctgcgttgcggtctctttccatgtgatggaattccaaaccttcaaacttgtcttccaatttttggacggccgtacagtatttgcccatggaatcagtcgagcaatcgcaatctttatttatctggcttatgaccactagagaatcttcgtataccatcaacct

SEQ ID NO: 99845 - DNA, 634 bp, Zea Mays
ccgtgtttgtgtctgtaactggtaggaccatgtgtgtttatgattttgttgccccaatgacataccggcgaagcccacaatgataatggcaaaattgcaaatgtctcgatcagggttgtttttgcaaatagttcttcatagatctatttttctgttcacgttcgaatgaatgataataaatatagacatgcctacaaaccacattcataaattgattaatgaatgtgtatttaacaaaaaagaattatatcttaaaatggatgatgtactaagagcatgcttccgaaaccttatccgacaaagatccggatagtagccaataagatttctagggagcgtctccatgtgactactcgttaaacaactatatcatctacttcctagcgaccatttgaggggttgcacatcatcaactcttcaatcaatctgtacagctacacgaactgaggtaatggctctacttcggtatacttctttgagtcttctttatttttatattgttcataattaaaatgatgttaaacatgaacatgtgtagaaatcatgttgtcactgctccactgacaatatgcatggcaatgatttatttacataattttggaattaaaatatattatacaatgccatatttatc

SEQ ID NO: 99846 - DNA, 380 bp, Zea Mays
ggagctagcagccatagtgtatgccctaaaaatatggaggcactacctaatcggaaacaagtgcgatgtattcacggaccacaaaagtctgaagtacatcttcactcagctagatctcaacctccgttagcgaagatggttagagctgatcaaagactacaacctcgaagtgcattatcacccagaaaaagcaaatgtagtggtcgatgccctcagcaggaagcctttcgggataaaagcaataggttttcttgaagactggaagcaagaatccgctcagcttaatgcatgcttaggagaaagtagcagtttggaagtccaacccttgctagaagactgcatctgcaaagctcagctactagatgcagaagtgataaagc

SEQ ID NO: 99847 - DNA, 532 bp, Zea Mays
ctttgtttaagatctgtcgctatgtatatatagcagtcctgcagatgtgtgtaattgcgttgtaaaagttgacagataaatttgcagtccatcattgttttaggtttgtcgttatctaataatctaccactgtagaaaatgagatgacatgcatgccaatcagtctgtcctttcttttagatttatcgtcgttgtctaccagtactatctcactgctagttgtcacaacaagcttaccacacaattaaatattcgcgcgggtcaccagtatagattacaccaaacatttgcaaaagaaaagaaaaaaaaccgtcttgatctcaaaccggccgggcgatcgagatggcgatgatgtggacgctcgaccacaaatgacgaagacgcaggttgcctcctcagaacgtgtttcatacaactcatcacatccgttctttaatttgcatgtgtttcaaatccttttggcggagggaattcggcactaatttgactgtatgcgccacgtacgtaatcaatcagatggtacatgcggcgc

SEQ ID NO: 99848 - DNA, 425 bp, Zea Mays
attcattaggggttcttatgtaaaacttacgtagccgaaggggtatcggcaatccgcaaccgtccgatctggaatggccggctcggattagatgtgtgcgcaccccaaaccccccatttactccgatcgtccgatcatgatcggacacccatgatttattatacacctgatccaatcctggctgctagatcgccatccaacggtccacgaccgatccgcggtttggaacgcagggccggatccaaccgtctgttcccaacggacggtcccgattcgaggaaatccactcgctggccaactctaattccgatcgtcaaaacaggatccaacgatccaggcacttcacctaccttccgctaataacacacccagagagccctggccgcgacgcctgtgcacagtcggtggagtgcccgacggcggac

SEQ ID NO: 99849 - DNA, 446 bp, Zea Mays
ctggaacattgataatctccgcaaattttttgtttgactcatcagggccagctcgcccttgtaattcgcaaaaaacaattttattctggcccgcactcttttcctcccggggggtgaggtttttaacgaggcggagtcatgtaatatacaagtgaaaaacccccgcaaaaatctacgtcaaaaaaagacagcgccgacggtcttcgacattcgaccaatacaaagtcaccgtgaggtccagcgctagctaccctcgcgtgcgacactccgcgcaaaagtcgcctaagggtgcagccggactagcacaacaagtgcgaaaatcgaagtcttcctcaaaaagactactccaaactgtccgcgcaaagaccgactacatgcgcgccggaccgacataacaaatacaccagaccaagtgtgcaacgcctttgtgagcatagccgaatgtg

SEQ ID NO: 99850 - DNA, 476 bp, Zea Mays
aatttctactgcctacttaaacacttcagtttatatgtccatgaattttttgtcttctgaaatcccttcttattccgttgttaagtcgttatcctttggctttttctattcccttgtcttggtatgcccgtatccttgggatattgcatactctcatctttttatatttgcttatctttatacactaatgtttgtttataaacatttcagttacatgcccttgaccacccttgtttcttgacgatccatgagcaatcatttcattttgcatatccttggtgatctcgttgttttcttataacttccctaggtaataatttcttttacttcaaccattctgttgggaccttacctatctcacccttgattgtcttatccacttcgccacttcgggagtcttgccttaactctatccttggttacgctttcacgattatcatctttacccttatcgcctctatatcttactttgatgc

SEQ ID NO: 99851 - DNA, 1057 bp, Zea Mays
gcggtgcaagatgcctccccgatctgtgatgcaggagatggatccgaagtggaagatctctccagcattgaaggtgatcatggtgttgaaggtgattgccatggagtcgtcgtctatcaacgttgcacccccctacctggcgcgccagttgtctgtgtttgtgactcgactgtgcagcatggggttacccacatgatgcttttgggtaggacggtgttgttgatcgcgactcgatggttcgtgcagagacccgctggaatcactcatagagttatacaggtttagcccacttagaattgtgtaataccctacttcatgttgggtttttatattgatcttaggagtacgaggattacaagatgaggattgtggatgaagatgagctggaatggtaggttatgagatgaaatgatagggggggccctcggccttatatacacgaccagagagagttatcccattacaagttgtgattaatatccacttgcttatctccttctttgccgcagattttgtccctgcatatctagatccttcatcgcctagccgcacgagttatcgctaggtgcgtagccctttgggtgtttgtaagttcatcacccgatacattcgtgctttaacggcgcttaactcggacgtcggtcttcatctgcttggatcgggctcgcctgagttggctatgtcctgctggcccatccaatagggcgacacagcaagaagcccgtcaacaggcccatgatatgttttagtgtccatgaggacccgggggatatttgtcccccacagtccgcatagccagaattatggtgcctaagaccatcgtcgcccccgtgataaatacatggcagccaggttgccccggccccacgagtacgcatggattcacacctagagatgccaccactggccaaccctagtcttggcctataaaagggagaagctagcctcaaggcgaggaggatcgatagatgaaccaacatacgaagacgtgcccacaaggatgaagaggaagaagagcaccgacgaggaccaggaggtcggagccccgccaagccaa

SEQ ID NO: 99852 - DNA, 287 bp, Zea Mays
tagctaatggtgacatgatgattacttataatatggtgttcgaagtggattggagggttgttggccatgcttttgtcacgctaataaggatgctatacaatggggtttatgatgcaatactagggtatgactggatatgagcacatagtcccatggaatgcgattagataaataaggtgttgacatttcaggatcaaggaagttgggtgcagttgagaggagattatgttccaatggaagaaatcacacaggtgatagttattctagttgagaagacgatgagaggg

SEQ ID NO: 99853 - DNA, 299 bp, Zea Mays
ggggaatgtactttttggatcagatggctctaaataagatgaggatggatggagacgtggaatttgagatgaacatatgaaaccagctttattgtggctttgccaacgtgtcaccactcaccaccctttcctatcacgttataactgattccagaatcaatcataaggatcaatgttaatcaactgtaaggcacaatcgcagtcgcagcgtcaaatttggaagcacttatagcaaacatttccttttcaacaacagaaaggagaggattatgaaagtacctggatgaagaatttatctg

SEQ ID NO: 99854 - DNA, 336 bp, Zea Mays
cacatctcacatgcatctggcaaatttggccatgtcttcaccagcaagctttagtttcaaactcaatgcaggaaaataaagttcaccacaactctcagctttgttctggagaatatgttcagaacatgagactttaatgtttaacaaattatcaacagaagctggcaaaagatgtatgccatttaattagttaacttctagcagatagaagcaatttagacgagagatctacagaactgatccacaggggcagaggctcatggaggggaaactgccaccaccccctcctctggaacaatagtaactctaatagcatacaatcctcatggatgcttt

SEQ ID NO: 99855 - DNA, 302 bp, Zea Mays
tggttatatatacataaaagcatttgtgctccaaaagtgacgatgttcgtcatcctacctgtacggaaaaggtgagcgtcagtagttaaagagtctttaagctgttgtgtctttttggtatggctataagaagaatactcagatgatattgattacaaattatgtacacgacatgagagtatggcaggagagtagatggtgtagtactttcatgagaacatcatgagatcgttgatgatctaatgatcaaggctgtcagggtatgtagaacctagctgtgtagtcttgatcctatgtgtttg

SEQ ID NO: 99856 - DNA, 350 bp, Zea Mays
ttccttaaacaattagtccaaggtagaagttcttgtgttaattaagaccaataatggacccatgttttgaatggtggtgctatatggggtaccttggatgttttggttagagtggttgaattcgaggacgaattctttttaagggggatagagtgtaatatcccaaaaaaatgttgacccaaaagttgatcttcggtgagtggatatgggaaaaagggttgtgggccgttggatgctgcatcagaagtcatctgaggcgtcacttcttttctcccacaaaataaaccctaggtggccaccctcttccccttcttggccgccaccccctcccctttcttggccgcctcact

SEQ ID NO: 99857 - DNA, 358 bp, Zea Mays
catggtatggaaatcgatgtatctgtttctaatgcactgatgacacattattccaaagtgcttgaaatgaaggatgtagaatcaatatttactagtatggatgtgagggatatcgtatcatggaacaccattattgcaggatatgtgatgaacgggtatcaccatagagcattgggcctgtttcaggggcttctgtctacaggaattgctcctgattctgtttcttttatcagtctgctcactgcctgtgctcaagtaggtgatgtcaagacagggatggaggttcatggttatatttttcaaaggccagtacttcaagaaacatccttaatgaatgctcttgtcactttttatagcc

SEQ ID NO: 99858 - DNA, 391 bp, Zea Mays
caactttgagtacattagtgactccaatacttctttctcctatacggtcctctttgtatggatctctacaagaattggtgacattaacagtagcaccaaagtcactccaccaagtatcggttggcaaatctaagtacaaagattcatctatgaatgtatttttatcattattgttattgttcgaccatttaagaaattgaacgcattcctttatatgatgtcctttctggtgatagcatctacaaatgtcatcatccacctctcctaactgagctacaaagaatgagctttctccactagaacttacttgttatgtggttttggaaaatgcctttctccacttaagcttgagactccataatgagacatgaatttcttgccctgaatcata

SEQ ID NO: 99859 - DNA, 539 bp, Zea Mays
caaaatcccatatcttctattcaaaagtcattcattgtgccaaaccttgtcttcctaatcaccttgtgcctctctttttgaatatctcttatgtgtgtggtttagttcacatttcatgattatatgatcatgtgactgactcgtgcttagttcttctgtcattttagtgtgccgacacgcccgcttgagcgattccttgcccctatacttggatttcctcgagtgacatgccttaggtagcaaagtcgttctctctctcactcactgcttcgtatctaatgctttaatattaatgactcacttatctatagtcgctcaccctctctattcaccgtgcagcgcgctaatgggcagtgtgtgggcagtcagtcgttggcagttttaaagtcggactcagctcaatgtcagtatggcccgggtcaagaatttgagtctatcaagtggaggagatgaccatgaccatcctcgccctcctaggaaggataagggcaaggcaatttagagcagtagagaggcaagaagaagcgcaaaatggatag

SEQ ID NO: 99860 - DNA, 369 bp, Zea Mays
ctgagccaaagactgataatattgaggagacaagagtcgaagggacaaaaacattagaagttttaagcccttcggcagaagtgacaatgccgaaggcacaaaaaggtcttgcggcgacccccaagagaaaaaggatggccagtgtgctagatgtgctggagacggtaaaggcttcaagttctattccttcatggaaaattgccgaggcttcgaaaatacaaatcgaagctgaaacaaggccgaccgaagttgaaggtgcagtgagccaagctagtgccgaagccgggccttcagagcctattgataaacaaccttcagaatttgataaaaaggcagcagaggaagaggctacagagcagagtttgcctg

SEQ ID NO: 99861 - DNA, 1473 bp, Zea Mays
gtcgccgacttaagtcgattgctccgtttgtagggtatagtggtcaccctgagttacgtgagcgtgagcatgtcacaccgccttaagtcgtcaccgacttaagtcgattgctccgtttgtagggtatagtggtcaccctaagtcgagtgagcgtgcagattgacaataaacagttcgagtgcccttgagaatgaagtctttttattgatggtgtacttcccaattacagaatacaatgctgtcccaatagcttttgaaatctggctaggggtaaaatttcctgagatgctctatattccatgagtttcctatttccgtgccatccatttgagtaagacgatatgatccaggccgagtgacttctgctactatgaatggtccttcccatagcggcgacaatttgtgacgtccctcccccgctagaatttggcggaggacaagatctcccactgcaaaggatcgatgccgtatggccttatcatgatagcgcctcagagtttgctgatacctggctgactgaatcactgtattcaatcgttcttcttctagtatatcaacatcctccagtctagtagcctcagccttagcttcagctatgttttcgaagatcaatcttggcgccccaaacttgagatcagcaggtagcacttcctccgaaccataaaccataaagaaaggagtgtttccatgcaaagctcggctgggttgagttcttaggctccaaatcacatacgacaactctctgatccactttcctgcgaacctttcattcttgtcgaagactttctttctgagtgcttccaatatcattccattggctctttctacctgctcgttggctcttgggtgtgccactgatgcatatttgatctagatgtttttttgttcgcagaaatcaaggaactccgaactagtgaaattggatcccaggtcggttatgatgttgttcggtattccgaacctgaatattatgtcctgtatgaattccattgccttagctgaagttagagaagcaatgggcttgtactctatccacttagtgaatttgtcaatagcaaccagtacatgagtgtatcctccttgagctttcttgaagggtccaatcatatccagtccccagcacgcgaatggccatgttacaggtatggtttgcagttgctgtgctggtagatgctgctgttttgataagtattgacaagcttcacatctctggactaactcggctgcgtcgctctttgccgttggccagtagaaaccagacctgaagaccttcccaaccagagtcctggatgctgcgtgtatcctgcattgtccagcgtgaacctcttctaggagttgcatcccagtagccgaaagaatgcatttcatgaggactcctgtcgtgccccttctgtatagtgtttccccaatgagagtgtagtgagctgactgccttgcaatgcgctctgttgcatttttgtcatccgactcctc

SEQ ID NO: 99862 - DNA, 388 bp, Zea Mays
aagatgagtaccggagatagcctaaggtatcgtaccaaatgaaacgcgcattttggcacataagacaacaaatggggccttctagttgtagctacaagcctagagctagtaatttgaatctgatacttgaactttgtggaagatttctagacaccgcaattactgttcgatgctcatggaataatgggaatcaggttcgaaaaagaactaagggaaacaatgttgctttgccttctgtacgctcaccttcagcattgaaaccactgtccactcataatcaaatccctactccattcctaatcgaacgttacacctaaagcaaaatcacactaaggaaacctctcctctctgagctcagctttaactttaagcaccgattcaattcaag

SEQ ID NO: 99863 - DNA, 426 bp, Zea Mays
ggcacataatagagaggcggagcagggagagtcttcaatttaaagggatcggcctagctacttgtgaatttcggacaaaagtgtggatgccgacgacgagatatttctctgggacttgatcatcatggcgcgaggcagtagaaagcctcaggggcagtaactgactaccccgccacgaccacagcgacgtggtaaaaccaataatcgcgtggcatggcagtagtgaacgatgacccccagcgatgatagctcggtcggtcgcggagcaagcgggtacggtggggccaatgcatgaactcatcccctgcatgatattttcacccctccggtaatatccacttagagccatgcacgaatcttcacggtgagctcgaatcactgtgctcgatcagcgatggtgaggtgcactgcacctgtaatctagtt

SEQ ID NO: 99864 - DNA, 375 bp, Zea Mays
ggagtagctggagaggcagctagagaacataggcccttcgccccagctatttcccaacaatttctctcctcatctgccaaagcaaggatagaggtaaggcatggagacaatccgtcgaagacacatctattccgatgattccaaatagtcatctcttcctatttcaaacttctctataaacaatatagtctacagtgtaaaacaatgttttgcacaactatatagacgctctgttaagcatggccatatacacgtcctgctgaccatgatacagaacaagcatcaaaacaggtccttagaaaattcaagaaaaatgaacgatctgattgttttatcattttttatctacattgagacattggattgaagcattgg

SEQ ID NO: 99865 - DNA, 719 bp, Zea Mays
cattcataaaacgatgcggccaagggttatcgattactctcagccgctcgatctattccggacggccctgatcagatctcaccctcgcgtgaaccggtgtgttattacggtcgtaggataaaaatcgtgtgctcacaattaactcgaaacccgtatgaatcggtacgcaattacgactgttcgatccgagatctatggttgccaacgcgaccctctagatctaatccgagtcacacatagccgatcgaatggccagggggcttcttccctgcgcaacagccgagcatggtgacgcatcctggcacacggcggagcctcaccagatttgtttccccccgatgcacaggtgcactaccaccaacattggcaggcacaaatcgaagggatggataacgcgagacaattggcaaagaatttaccaccgattaggtagcacagaaccctgcccatagctaagtgtgggtccacggcgacccgcgacttcgtcgagaaattcccagtgtgacgcatgctaatcgagtccggcgaggccacgagcaccatcccggtgacgagttgaagctcctagacccgacaccgggaccccgtagatggtgtacacacgtgtccacagtggcggcttcccctctcaatccttctcccctctagctctgatgagttgcgcccaggatgggacatgctcctgctcttgtgagcgaggcacgcccgcgttccgcgag

SEQ ID NO: 99866 - DNA, 380 bp, Zea Mays
gaagctggaggcaatactcatccagtagtagcataaaggaggaaattggcaatgcaagctcagaagagatgcaggagacgaaaaggacaaactcccatggctacaaggcatacagtggtagcatccccgcatagatttcgctggcgcactctagcaaagtccacccaagcatacaacacatcttgtcaaggttgccttgggtttggagccggcgaggatgaacgagggaagccatggcactggtggcgccgcaagcaaagggcgaagaggcacgattgtttggagatgaagcaaatgcggggaaggtaaccgcagtgcacagtgtgggcccttatctaggtagactctcccgcacacaccctcggatcaccgcgcaaaat

SEQ ID NO: 99867 - DNA, 708 bp, Zea Mays
ccatataagtagtgtctcttggagcttgattttggcctcgacctccttgttgttgaatctgatttcctgccatctcacggagaaaccgagtattgtcagtagtagcattaagcagggcaggaatggcctcctccagggttggaggtataggcggtgggattggggtctcctccccactaccccgagaagtccctgccccatcataaccacatgtcatggttggcatctgaagaagaaaacatgctttattattacacaatatagttacaccacgtttgttacattattccaagctcctacttaatacacatactaagttcatacaaacccacttcccttattaaggctaagcaaaagaaacaacccactactacactagtctagtcctccacattcttggttgctctagatccgctactagcttcaggagggcgatcatccacgatgttcatagaaggaggggccctaaagatatctagctctccatagggtcctccttcacctgctcccgttgcgctagcacccatctcttcatcttcacgtggtacatttgggtgtaactggtcatacaacacatgcacatcctcatgtaggatattgttgtatgcttgtaggttttccaaggccaggctcatctcttccactcgggctcgggcagtcgcctcacaatcccaggctatggatcacgaattcacagcccagtccata

SEQ ID NO: 99868 - DNA, 360 bp, Zea Mays
taggaatatagaatcgcacacgcatgccctgataggctgatagcagcactaggaatatcgcatctcggatactacataaataaagctggattaggtgggcggacacagccatgcacgcggatactatcttaagcatcccggcgatcgaatcgggtcttttagctagctctgctccctttctccacccatcgtctgccatatcttccttccgtctctcgatcgatcgcaaccgcggcagcaagaatccaagcggccaaggacggagccaaaaacctcagatagatccatagccattagctagccacagcgacagcgggcaggatatatagccgattgtataataaagaggggagaaaggat

SEQ ID NO: 99869 - DNA, 434 bp, Zea Mays
ccggttacaaaatccatgcctatttcctcccacttccattcgggcactgggaggggttgcaataggcctgcaggtttctggtgctcggcttttgttcgttggcaagtgtcacaccgggccacatactgtgctatttctttcttcatccctctccaccagtatctggttttgaggtctaggtacatcttggtggttcctgggtggatggagtaggctgagttgtgagcttcattgagcaggacttcccgtgcctctcctttcggtacacacagacggttcttgaaccaaaggactccttgttcatctgttctgaggtccggaagttgttctttgagagctttttgccataagtcttgctgtctccgtgtccaggcgttgagctttgcgtatgaggtcttctagcattggcttgacttctaggctgtcattgtttc

SEQ ID NO: 99870 - DNA, 549 bp, Zea Mays
ggaaaactctgccaaacaaagacacttgtcccaatcccttccatagtgtagcgcacatgccctcaacatgtcttccaaaatctgattcaccctttcggtctggccatctgtttgaggatggtatgctgagcttcgtattacatgggtcccaagtgattcttgcaattgctcccaaaattgtgccacaaatggtgctcctctgtctgatactatagtccttggtattccatgcaaacgaactatctcgtcaatgtagatttccgcatacttctccgtcctgtgggtggtgtgtactggcaagaaatgagctgacttggtcaatctatccacaatgacccaaatgggatcatggtgcctggaggtattaggcaatcccacgataaagtccatgcaaatgtcctcccatttccaagatggtatgggaaggggttgcaaagggcctgctgccttcaaatgactggctttgatcctctggcaggtgtcacactcggatatgtacttggcaatctccctcttcattctggtccaccagtataaggatctgagatc

SEQ ID NO: 99871 - DNA, 290 bp, Zea Mays
gttggtgtccccactaggagaagaagtggtagtcgagttaatctcacctgagccaaggaaaggaggttttcatcagatggctatgatagcaaggagccagattcactcaagattatcaaggttgtgtccgaattctcagatgtgttcctggaagacttaccaggtatgccacctgagcggaaagttgagtttgccatagagcttcttcctagcactgcgcccatttctaaaagagcctacagagtatctggaccagaattggttgaactcaagaagcagatcgacgagct

SEQ ID NO: 99872 - DNA, 727 bp, Zea Mays
caacggcgaagtgcagttctcctcccgcgaaacggcaagggtggcactgctcctcgccgcctccatgacggcgctcctcccacgaccggctgctttggccacccaaccaacattgtgcatgccaagaaaacaatggtgtggttgatgtcataataaacacatattggtttgagctctcacataaaacaatttttgtaacattcactagtgatggacagagaatagacaaaaaaatacaaggaacaacagccaatgatgtataggcctgtggcattgggctggctggttaagcatatggccaacagtcatttgttgtcatgtggccaaatgtgaataggtgagggtagtaaaatgaaccttttcccttcaaagaaatcaaacttttagccttttattttaccgttcccatcgtcttctccagccattctacaagcagaagcgctcctcttcagttctgcctgcgcagatctatcttggttgtgccctcccccccccccccccaccccaccatagccacagtcctcatactcccctgctttcttcccccctctctggcttctttttaacgaggttgttcccgcattcccggaacgtcctggtttctacgtttgggaccaaaccaaacatttagctcaatatcgccacacttaggctttaaacccaaaaagggcaagctagatgtggcggtgagagctgtctcacttgagtcatcatgttggtgagagcc

SEQ ID NO: 99873 - DNA, 534 bp, Zea Mays
tgatattatttatatggttttctttattaactggaccgcgcatcaatttttagagagcacagggtccgtggtgtaaaattgtccaagacacagggcattgctaactggactgcgggttcaatttgtaaaaacagagggtctcttttgtgaatttgcaacgacgaaggggtatctacggatctgggccgctagatcaagcacggacagccgtgattaaatcgacccaagtaaaccccagctctcacacgccactgttggatcctagctcaaggatccaaattttatgaaagttccctacacaccgaaccgtccgattaaacctacgacccagattgaatcacccaggaggtatctccgattaaatctgcaccgcatatctaccatcccacgaccatcttccgcccaacactacctctaatcccgtccggtcatctctgaatccacggcggcggcatcgtcttcatcctctttcctgggcgcggtcagagaggtggaggcgcgccgggtagcgccgtcataggcatttgcctcgcc

SEQ ID NO: 99874 - DNA, 291 bp, Zea Mays
tcttatgtccagtgatcatttgacctgatctcttgctgaaatttccatcacaacataaataataagtaagtcagacatatccatgtgaaggtttgatagtttgagtatgttatatgaattcaactgctgactttgcaataggcatttgcagccttctacctcacatgcttgggtgatggttgtcttataactttctttatccatgactccatgccttgcaaatatcattcctttgactaaataattctttgatggttacttggttttgatggcatttcttctgcttctatt

SEQ ID NO: 99875 - DNA, 290 bp, Zea Mays
tgacatcacattatgtcaagaaatggagaagttaaacctgggaatgatacaacatggaactttgacccaattaaagcttgagtcagttcttctgcaaaagattattgaggcccaaagaagtgacaagggtatgaagcatattcatgagaaaatagaagccagcaaagctaattgttttagaaaggatgaccaagggatagtatggtttaatgatcgcatagttgtgcataaggatgcgggagtccgccaacaaattttggatgaagctcatcttagtcgatattccattc

SEQ ID NO: 99876 - DNA, 824 bp, Zea Mays
ttgcaatgttgcctagctaccttcgaaagcatccccttgcttggaggtcaaccttcccttttatagaccggcagaggggtcggccagcggtgtcttccttgggaaggggtcataaggcaagggtaaatccaatattctacccggggtaaaaccatgcgtactcatggggcccaggattgcctggttgtcttgtatttaccatggcggacgacgcggggctgtgatggtcccaggtgccatcatttaggctacgccgacccttggccttcatagcctaggactcggtgtggcccgtcatgttgtgcgctgctggaggtctatgcactcaagcctaatccggtaggccatgagtgcgtcgtaggatgaggggcacacataccataaatgtgtcacagtccgagggggctcataggtcatgagttctatgcgacctgagggattcgtaggtcatgagtgggaagtgtactggcacccgcgctatggctcggtgtcaggagaggttaatgcggccagatatttacggcgggttagcctggggtcaggtgcgggatccactcgagtggttcccttccgatacatccagccacctatcaggttctgccattcctgaccccgggctcggtgccgcaaggttcaacgggggcgggttcttttagggttgacatatccacctcttccagttgaccaacgggcccaacgaccaggggttctttcctaagtgtgctctttggccggagggtcatagggactaaagatcatttcctcgatagtagctcctaacaggagagtatctcccttcgggggctaatgaagggtcagacgat

SEQ ID NO: 99877 - DNA, 273 bp, Zea Mays
tagaattttagtttctcatttggttttgggaatcaaagttttgttcaagtttttacctaacagttagtagatgatttagaaaatatgaatattgtatgtctagccatttattgggtcagatgaggtacggttatggccagtagaggttgtggcaagggtatgataaggagagacttcatcctgaactctggatcttggttcctctggcgatccaacttgatctttgaagacttgagttgatgtttatcctcctttgacgtggttggtcttctt

SEQ ID NO: 99878 - DNA, 616 bp, Zea Mays
gtcatctattttggggggaggtagggctagaggggccttcttcttcttctctgtctggcatccttggttggtggtcttcttatggatcttctttttgggggcgagtttctttagcttcttgtcatagtccatcttcaaggtccgataggtttcacgggtgttggcttcctcgccttctgctatgttgagactctcctggagggatgccttctcttgcttaagctctttgacttgccgctctaggctttccactcgggagtttaggtgggtgcagtgggaggagagctcgtcgtagtggttgtcgagggtgtggaggtatccgaccatgtatacgatagtggggtcatcttctgtgggatctcctcctgacagagcctggagtcttttcctccaggtgggggtgtttttgttgctgggtgggaaatatcggaggggggtctcagagatctctcggctatagttttggcacagttgtttgagggcttttcgagcaacgctctggcaagtgtctgggaagcggtgcccgatgaaggtaatttggaagggagggtggtttgggtagttctggctttctcccaagtagactgccatagagcacttttctattccattttca

SEQ ID NO: 99879 - DNA, 295 bp, Zea Mays
ttgcggaaagtccacactcgatcttcagctaacctatgttattcatcatcacgcggcacacatcaatctctctactgtctggaagatagtagaggcattcatcttcatcatttccgtcgtaaatgagcgtgtctgtccgatattgtaaatcttcagcataatcttgtactttgacgatctgctcagcagtcaactcccctccagaggcgtgtcggatggtgtattcaggctgcacagttgattcctcttcagctatcgtagttgcctcctcttccaaatcttcaacttgttcttc

SEQ ID NO: 99880 - DNA, 842 bp, Zea Mays
aagattgaaggcaccttcgcgtcatgatgatgatgtatcaaaagatatggagcgggtttaggcaacttggggctaggggtttcttttgaggacatttgttgtgaggttcagggaaatgatactgacaaacttcctggatgcctacaggtttcgaagtctgggcatgagcgggaggttattgttatttctaacactttgaaaagtgaagatgttgtctttgtttctcgtcttggttgttgtagtccttcggtgaactccaaggatctatgcaaggtttttagctccgaggagtcttcgaatatcgaagacgatttggaattttttgcgcttttagacgaagagtcatcagctccccttattttagatgagggggagctcgctagctggccgaggtgatgaagacgtagtgccgctcaggcgtgggaaaaggaaataaaaaaactcctcgaaagcgtttgaggcctggttcgagggcaaccttatcattaatgacgacaagcagtccgtcaaagagcgatgcattagtgggatcgagaccgatgaggcgtgtctttgggaagacgagattaggcttttgtttctttggtgaagagcttgaactgctcttgttcgattatagggagcttggtctgctttcgaaaagggagcgccgagacagctgagggataaactcgtgtttcttatatgtgttgtgccgcttgtgggtggttgtgttggttttgcttgctttcttcgcatgttgccgattgacaatatagtacgtgaaatgctgcctacgccccatttagtgaccagcgaagaatgcgaaggtatggttcaggatactgtcttcgcatttttgt

SEQ ID NO: 99881 - DNA, 520 bp, Zea Mays
gcaagtttgaggattcagccaaacagttcatgatattgttgtctcatgaagtcgtctctgctaaagtggtgttcaaaacttttagattgatagagtacctccaaggggtcgagttactaatgcttgtggactcaggaaactcacattgttttcttaactccgctcttggtactttaggtattgctattatgccctctccattgttagtcaaggtagccaacggtaatactatccactgctctcaagaactttccaacgtttcctgatcagtccaaggctttacctgttgcacatccttcaaggtcttacctcttccatcgtatgatgtcgtgctgggtatggactggttaacacagtacaaccctatctttgttgattggaaacatgagtgcttgtccttctcttcaggcaaccaacttgtcacacttcatggaattactccaatgcttccttcaagctctctattgcagatgtggccatagttacagtcatcttcaaattctagtcatttgtgctcctt

SEQ ID NO: 99882 - DNA, 466 bp, Zea Mays
agttgatataacgttgatgcaggataggttgatgcttcttggggagaatgacggaattataaaagtccacatgatgaagcgtccaaaagcagtttccatcaatcctggcatcgcgaatgcgcaatgcaggattttggaaacgaagatcctgaaggagagcagagcctccactggcagtgaaataagttactggctcattgccagcacgccgagcctctgcccggtggagaaccaacccacgaatcacaggggtgtgggccgggggaagatcaacttcatcatccttcccgccttcatcatcactcgtagcctcccacgcctgcggattcgtcgcgggtcaggaccgaccggaaggattccgagttgtccgaccgcgagcactttgagacccggaggcctcagcaccttgcatgacatttccgcttcctcgcccacgcttggatcgagagcgtgggggagtatctcc

SEQ ID NO: 99883 - DNA, 515 bp, Zea Mays
ggaacagaaaatatcataattggttagcattcaagtcccacttgtctttgcttttatctgacaaagttaaaagttcacttcatttacagtgcaagtttcctaaatttcaatctgccgaatcgcatgttacggttcttcatactttactggcagaattgaaacaggattttcagcatctgcaggacttgcttccaaaagtttcaagctaactcgtattccctctggttggtaatacactgtgtcagactggaggcttgaacaagcagcaagcaatcctggcagttgccatggcgaagcacgagataagcgaaactaaaagattaagggtacaaaacaatgtattaccaaccagttttacaaaggtgggagcatattcctccaagcagaaattcttctatggtgaccctgatggtgtcgtccagtggatcagcagagaagtcgaagcttttgacgaaatcttaagtgatcggggagacttctgcacgttcgctggcgctccaggggtcgcagcgacc

SEQ ID NO: 99884 - DNA, 369 bp, Zea Mays
ctgagttatgacattggttgagcattggttgtgtccgtacgaacttggttgcgtcatatgattgctatgtcgcactctcgcttaatcggaccgcccccgtcgggccggaccaccatcgtcgagtcacgtattttcgcatgccatgtaggcactgtttgtctgtcgtgatcatcgaaccacaattgcgctcattccgcatgttgcatggacttaccatgtaactagactatcgatccacaactacgctcgttgtgcttattacgaagacttgttgtgttgtcgtagccctaatagtcgcacacactttgataccagatacgctggagcttgtactcgtgtacaacatggtgaattattcgtgcccttaaa

SEQ ID NO: 99885 - DNA, 388 bp, Zea Mays
tgaagacgagcatactgagcatctacacatcgtgcttcagcgactgcgcgatcatcgtctttatgctaagttgtctaagtgtgaattctggctaagggaaattaaattcttgggtcacacaatttctcaggatgggatatcagttgatcctgagaaggtacaagaagtaatggattggaaacctcctaccacagtgagacagattcagagttttctgggattggcagggtattatcgacgattcattccggatttctccagaattgccaaaccaatgactgaactgttgaagaagggagtcaagtataattggagccagaagtgtgaggatgcttttcatacactaaggcaacacttgacaacagccccagtgctagctcaacctgac

SEQ ID NO: 99886 - DNA, 316 bp, Zea Mays
tgaatttaggcgaagaaaaagagatttgggcactcggctcggaaacgatcgttcgaaacggagaattgagtgaaattgaagcctggaatatcggattggcgtgaactttggcaaatatgttactggaggtgttgtgaggtgcctgaaaaatttgggttcaatcggggcaattttggctggtttgggcatttcaccgaacacgtggggggcggagtgttagggtttcggggaaatggccatttgaggagtgaaaaccctcccgaaggagctaggaacctgcaaggacactcaatggccacaaaggaacacattgcac

SEQ ID NO: 99887 - DNA, 508 bp, Zea Mays
gtggaagtgtagcggtgaatgtcaatgatgatgttggacactacttccaaacaaaaaaagggctcagacaaggagaccctttgtcccctctattattcaatgtaatggtggatttgctaaaagttatcatcagtagggctaaattggatgggcagtttgatcgagtaattccgcaccttgtggatggtggactctcgattctctagtatgcagatgacactatactctatggatcacgacatagaaaaagcgtgcaatatgaagttgcttctatttgcatttgaacaagcttcaggtctaaagatcaatttccataacagtgaggtgttttatttcggggctgctcatgaggagctaaaacaatatatagaactctttggatgtaagctagggaaaatccccatctactaccttggtatcccaatccacttcggaaaattaagaattagggattcgactaaagttgaatagcgctttgaaaagaggcttagcaattggaaagggaaac

SEQ ID NO: 99888 - DNA, 300 bp, Zea Mays
gtccgatgaatcaagagttccatcagaatggtcggttattatcggtgtttcattgaaggtttcttcaagattgctaggccaatgacagctttgttggcaaagaaggttgagttcaagtggaccccagcatgccagaagtcctttgagacattgaaggagaagttgacaacgacaccagtactaattttgccagatattcacaagcccttctcagtatattgtgacgctttgtataccggactaggatgtgtgttaatgcaggaagggagagtagtggcatactcgtcccgatagttgaag

SEQ ID NO: 99889 - DNA, 397 bp, Zea Mays
aagggatactgttagtgactactgctcagaaactgacactgaaggtggttgcacatctgataacacgcttgatgctgagaatgaccatggagaggctacaaataactacgaggaacctgatgatgatgttacgcttgcttcactcgttcagaggagtgggagctcatccaaaattaaggtgcgagatatgtgttttctaaatttacaagaatgtctgaaatccaacattcaccatcccataagtaacataaatactaaagtaggtaataacaagggttttaatgattcagttgcaacaatgttacatgtttggttcctcagctaaaactgcagttcgtttagctgacataaacaggttgtgaagcagaatctgaagtttagcttgtgtcaaacaatt

SEQ ID NO: 99890 - DNA, 401 bp, Zea Mays
ctgatgggttgaactgggttggatgaagcgagctcttggatccacagggctctacgttggttatgggttaccaagcaggcctccatcaacttctggacatgctcatccttggcttgctttagggcttcaactgcaatggcttcacgactttccaaggcagctacacgggcttgagttgtggtgagatccacatggagcttacggttgagcttctctgcatcttctgctcgggcaatcatctgacggtggtgctgagccatgaaatcatactaggcatctagggtgagcaggtatgcagtgaggtacacgactgaggggtcgtcctcaagcagctgctgcccttccaatgcacgcattctggccatccaaacgggacggtctctctgaaagggcagaaagaa

SEQ ID NO: 99891 - DNA, 326 bp, Zea Mays
gcgaaacggagagtgagtgaattgtcgcgaagtaataggcatcattgtggtgagatggagagtggtcgtcttcgtgtggacgggactggtaagtgggaattgttgtcctcgccggctggggctagtgtgggtgaaggggagctgcgaaatctttttgagggtgaggaattgaggataatgctgttcaactatagggagatgggtatcatcccgaaggttgagccaatgtaatatgtgatgccctcgctgtgtgtatgtaaccataatttgtatgataaggctgcgcgccttcgttgatatagccgcgtccataggccactgctgcg

SEQ ID NO: 99892 - DNA, 484 bp, Zea Mays
actctagcctattaatacaactacaaccctggttagggttaggttttctcacattccaacgaggacttgtatcctgatgaaatttatgtgacattggcatattcgaacgatatgattgaattaataagaggcataatatgtggggatttttttgtttacattaggaatgtaagtgttggttcagctgttcattttgaatgatggatattcgttaatcatttctcagagctgcacacaggtgtaactctgcacaacacttgctctagtcagtttatagaccaagccatcttaaacggccgtgcaaagtatcgtttcgcactatagattgcactgtttcagggtagagattgaaatagggagtaaaatatgaagtgggatagggagtctgctggagataagatttcacacatttttaaggggaatctggatggttaattttgacatcatatttattttcaattttcaaacttatagatcattttcc

SEQ ID NO: 99893 - DNA, 765 bp, Zea Mays
gagcttgactccgacgagcaagaccggccggaaggggccaagaccggtgctccacgttggtctaaaccaaattcagggccgagtgaaggttttccccaagttaatttcataaacaactacaccaatgtctcaggccacggtgagcgcggacatcacggcaatacagttgtgttccgagcgattggcgggttcctagttcaaattggcgacaccataagcatcacaaagttatgagagtgctccaacgaagaagcaaggagcgtggactgaccggaaaaagggctggccgcagtgaggtgttcttcgcggcggaaaaccaatttgggggaaacgagaaatttgcgagctctagggggtgattcgaagcacgagttgcttcactggttgcgtaactacctaaaggagcgaatggtggcagcaatttatagcctctaacggcggtggcgcccaattttaccgggatgtgctggcggtcggagagaacaatggtactggcgcgtggaagatatggctttcacggtggcggctcctccggcgatcaccggccaggtataggatggttagctgtgacgtggtaaggcgtttggacacgcggcggacggtagggatgactcaacagcggtgaaacctcatccgcgtgatcggtgaacaaggagaggagtaccacggctggccgaggtggtacccagctcaccggcggcaatgatccatttccccgcggcgttatccacttacccgggcgtgaatcttgacgccggtcggcac

SEQ ID NO: 99894 - DNA, 665 bp, Zea Mays
cttctttacaaaatttgttgtgtgctttacaaacaaaatatgttgacacattcagttcatggaaatgtgtggggacgcagaccatataaagatgttgtgtgcttctttataaacgaaatatatgtgcttctttactgaaaccgtgtgtgcaaactatgtgcccctttatagatttccttgctgctttgtcaggaactgctatgtgcttctttacaaaggaaatctctccacactccacacacacgaactgtttacagtagctctcgaaggaagaagcaacgtcattattatagatattaatctctctttcttcttccccctccacctacttcgactttgtcttgttcattcctggcatgctacactggagattattaaccattttctaccatgagttagccccattttttcaaatatatcatctgtcagttagacccttgttgttgtagtgtcaatgtttgttcacggtccagagctgatttaatttgggtattacctataaatctactatccttggagttcacggtccagacctcatttgggtactgcaaacaaaggcagagacatataagtggagataacagtgtggggtttgtggcaatgaaatctaattgcaatgtaaaaagttgtatgtttttgctctgctctccaggtgctagcttctg

SEQ ID NO: 99895 - DNA, 666 bp, Zea Mays
aaaagattgaacagggtatttgatgcgattggctttgtataccctgattatcactacccgctacgagggcaagggaaaaagaggaagattgccgcttcggtcaccacagctgtgccgaagggcaaaaaggtgaaggttctgacccaccgaccgcgatatattgaaccagccgtagtgcctgaatttggggaaggaacctcttcaactgccgaaacaaaacaagctgctccgattgtgaagagcgccgaagagccgattgtagtgccgaaggcgcctacagtcgggccagccgaagccaaagatggtgcggccgaagagccgatagtggaaaaggcagtgaaatgccagaaattctgagcccatcaccaggggcaaagttgccgaaggtacaaaaagctgctgctgcaactcccaagaggaggaggatggccagcgtactagacgctgtcatagagaccacgaaggccttgacccctgctcctaccaagaaagctgccgaagttatcaaagtccaggccagggccgaagctggatcttcagtgcctattgagatgaaggctatcgcgcctgagtaagaaactaagcaacaaacttcagataccgacatggtggcgggacaaggtataacagaaaaagcaaaatctcgtgcccccgaagcttcgtcca

SEQ ID NO: 99896 - DNA, 327 bp, Zea Mays
atctgaacaacacaagctcaattatccttatagataattgtcggtggttcaattgaaccatggtacgacattgttctccaatggacctctagcccaaagaacaataatatgtctatagccatcatctcaaaaacccccatggggaaaataaatgatgagacatataactcaggctaatatttctccaagataatctaattagaaaatctgagaaatcaacatattagccgagtctccttaaaaacccaataggaaaataaggagagtagtcatactctattgttgatccatttgaactctaaggagataaactcgtcacctagttca

SEQ ID NO: 99897 - DNA, 663 bp, Zea Mays
aaagaatttgcagtcttgggagtgttcgtcgcaagcgagcatgccgagcaaactcctaggctgagtctaccaaagcgaaaaagaaaaggagaaaacttcggcgctcatctgacttggaattggaggctgactctgcttccccaaaccctggtgatgacgcggcagatgccgatcttgaggatgatgtggagagttatggtggtgtgagggtcagcagatatgttgtggaagaggaggaggatgatggtgatgaagaggatgtgctccccctgttgaatagggatcatcgtagtaaggctagcattgacattccagaccttgctctctcagggttggttagcctccaagggatgactatgtccgccatcgacagcgcgctggagaaggttattcttgaggacctttttctggagcattctgaggttgggggcatcgacgtccgtgtagaatgcccggacaacataccctctactagtcttctagctgggcaagaggcaaccacaccaattggccatgtgtctctagcccctgagggtgcttcggtccatgaggatgctttagcccccgagggtgccgttgaaagtgatctagccccgagggtcctaggaccgtctccccctctgctgcctccatggatgtccacgtgggatcagcgaatgttcg

SEQ ID NO: 99898 - DNA, 860 bp, Zea Mays
ccttgcaatcgcggtgtcactacctcttggtaagtatcacgaactagcctccgattgtaccgtcctttgcattgtgttttcattagatactagtaagaacttggtaagacacggtagtgtgtgttcctattcacccagagagcgcgtagttgcttattagggataacctttactgttttgttcctagtttggtgtttctaatggcaggatccgatgacgagattgaggtagtcattcccacacaattttctgattgtgtcagattcggcggcgccttccagtggatgcacttcgaacattcagtgccaccgctgccatgggcttggtcacgtgaagaaggattgtcctagccaacggacgtacattgctacggacgatgggtacattagtgcgtcggatgtggaggatgatggtgttacaagtgatgatgctagagatgatgatgtcgttgatggtgatgctgccacagcaaatttccagaacatcattgtgtagtgtgtcctcagtgctcagccagagaccttcgggcagcagcagcgccataatttgttctagactttcttcgtcatcaaggatcgacgtgctcgtgttattattgatggaggaagctgtaacaatttggtgagtttagatttggtcaagaagcttagcttgcccacacgcccacgtccgcatccataccacattcaatggtttaatgataccagcaaggttaaggtaacacaaacggtacgcgtgcatttttccattggtatatattctgattatgcggattgtgatggtgtacctatggaagcatgctctcttttgttgggtagaccttgggaatatgataatgatgcacgtcacaatggtcggag

SEQ ID NO: 99899 - DNA, 395 bp, Zea Mays
aagacttgggggcctggtggcttaggagaaggacttcagtcctcctagctatcgtagcgtctgcctcgctaaggctggtagccaaatgtttcacgctgccaggtgtgtccaccaagacggtcatggaccgcatgtggttggcgattgtctcggagacagtcatgcatcgtgggtgccctctgcatggtatgcgcagaatgcaccgaggcttccttctcgaagcgagagggccctggctggaggctcgaagcgggtccctagagccaagaggccaaactctcggcctactggaccgtagcgcattctagaagccccagaagttcgtcgtggatgaagtgtccctcggtggtggagggctccaacatggtgcagagtaggagcgcagccgctgctag

SEQ ID NO: 99900 - DNA, 559 bp, Zea Mays
gataaaatattcgttgaatgaccaatagatgcatgaaatgtcaaacctaattcgctcgcagatgttgatatctgaatctcacccctttatgattcatcatatcgtcttgctagacagctgtcgattgccactggccatttgacttgcctttgccatccacaaccaaagtccaaagaaagtgatcacacaaagcagcggaatgagcgtcagcaacttatatacatactacattggatctcgtgcataataaaatctacaaatttcaactaaagttgtcaattgatagttagtgtgtatacggcaattttgacatgtacatgcgaaggttgacatatttatcctcgaggctagttggatttttgaattttctcaaaaaaatgttagttatctcatgaataatatagtccttatataaaagttgaatatcatcagtcgtatattcatcattatgtcgtctttattattttggtattgttcttgtgtcacaactttagttcaatatattagttagctagaaaatagactcatggactaatataatttataaagatctagaatt

SEQ ID NO: 99901 - DNA, 410 bp, Zea Mays
ttaaaactaaactagtgccttaaaccaacttagccacatccatgagatctgatccaaccaatagagtcatgaagaattgcatagtctgtctatccccacctaacatcaaacaaacctttgacctacatcatgtagcccatctcacccataacttttctaaccatatttccccaattatacactaacctcaaatcaatgagctcaagaccggagaagaaaagatcaacctcgtcaaggaaggagaaaagccaaactcaaccttcagaggcattatcacccagcacggagttcttcctcaccataaactttcttaccctaggctattcttgacctaacctaacctacccatcttttatcctacataataaaatgactatacatatagatacctatgctctctcaatcaccca

SEQ ID NO: 99902 - DNA, 377 bp, Zea Mays
ggcgacctaatttcattatgtggcttcgggaccatgtaagtctcaattatgtggctcctagacctaattttagttaactaatattacataatttgctaatgctttgtggcataattgacagtttggggaggaaatgaatttgaatgatgacttacgttagttatctattggaagtgtaactgccaaaagctatggacgttacgacgtcaatggatatcgatttcgttcaagcattttcgaatctagtcatcctatggccgccactcaaaatagtggagtcgttactagggcaactgacatggaaggacacgaagcctgctattacgggaaaatcaaaaatattatcgagattacatttgctggaaataagcctttag

SEQ ID NO: 99903 - DNA, 474 bp, Zea Mays
acgccgcctaacgatagcgttaggactcagctgatgaagatatagttcaaaattctttagtacctcccctatcatctcattcagaggaaatcgcagtcctgctctgaagaagctcttaaaaaacactacttcatcattgttcggtgcaggagtagtctcttctccggcaaatcggacaagttttctttcagtttccccaaagtagccaagcttcatcatcatgggcatgtcgtcttcggacacagtaaatttctcaaaatctagatggctgggttttgtggggatcagaatactgtaatcttcctcaacttcatcaacattttcttcttcagcaacaacctgttcagcttcggcatcaggagtaccttcgttaatagttccctctgtcacaactagtcctgatcattccatgacttctgaaattggcgctgtctaagtgaccttggtcccttctccctcacgagacacccttgc

SEQ ID NO: 99904 - DNA, 533 bp, Zea Mays
aaggtttgggaattgctcactaagaggagaattattaagccatttatctttccagaatcttgttgcttgtccgttccccaccttaaaatatccccacttgaggaatttgtccttgacgttcattagaccggcccagaaatgagaatcacccggttttctgacagcttgtgttagggatttgtctctcaagtatttgtttcttaatagccgttgccacacaccatctccattgagtaatttaaaaagccatttgctgagtaaacaaatgttctttatgtcaagattgacgactcccagcccacctagctctttaggttgacaaatgatttcccatttggctagtctatatttctttttatgatgtcctccttgccaaaagaatctagaccgaatagcatctagcttctgtagcacaccagtcgggatttcaaagaaagacatcatgaaaatgggtaggctacttaagacagaattaatcaaaacaaaccgcccccctgaagacaggaatttggctttccaattactaagtctcg

SEQ ID NO: 99905 - DNA, 466 bp, Zea Mays
tgaggagatcagttaagggccgactgattaagccgaagttcttcatgaactttcggtaaaatcccgctaagcccaggaacccacgcagttctcttgcattaacaggtactgaccactgttgcaccacctgcacctttgccggatcggtggccacaccctcggcgctgattatatgtcccaggtaggcaatggtcgtctacgcaaaggcacacttggtcagattgactttccactggtctcgttgcagcagtcgcagaacagtggtaaggtgttgcaggtgctcctcccaagaatgactgtaaatcagaatgtcgtcaaagaaaacaagagcacatttgcgcagtactggggagagagtgtcatttatggcttctaaaaatgtgttgggtgcaccagtgagtccaaatgccatcaccagaaattcaaagtgacccatgtgtgtttgaaatgtcgtcttatgttcctc

SEQ ID NO: 99906 - DNA, 389 bp, Zea Mays
tgctttggcttcgtaacaacgtagcggagcaagctagggcatcaatttatagaaactttgagcgacaactccaaatttggaagggaaacgctggcggctggagagaaggggaagtcactggcgcaagctaccgtggcggtcattgaggcaatgcttcaagcgatggacaggcttcctatgccggttcactgtgtcgttgtaaagcttcgaggtacgtggcatcagagcggcaggtggcaaactccggcgaggtcactggatcggcagtagggcaagtgggtatggggccagctcacggtctcatccacagtgaagatcttttcactgccgatcataatccacacaccagagagcacgaatcatggtgactggcgcaaatccaggcgcaa

SEQ ID NO: 99907 - DNA, 447 bp, Zea Mays
ttgcacaaagctagtggaagaaatagctcaactctgcaagcgctagccagacatgctcagggacataacctcgaaccatcgtcggaagaattcgttcaatccatatgttgaagtcatgactcttcatccctaagacttgtagagtagataagttcaccctcctactcaggttagctgcatacccatcatggaacattaacatcttgatccattgtagtacttccttcctctaggccctgctcagggcgaaatcggccttacgccttctccatgtctttccaccactagacgacttcagctcttggtttggtctttcacataacgctgtcagatcaactattacctttacattatcttttgacttatcaggaatgtccataattgttgcccaaagagcctcgacgacattctttttagtgtgcatcacgtcgatgttgtgtggaagga

SEQ ID NO: 99908 - DNA, 316 bp, Zea Mays
cttcggcgcgggcttgctgagagcagatgaagcaacatccttcccagaagttgcaccctttcttttctgcccccgcggcgggtactgatagtcagggtacacaaatccaatagcgtcaaaaaccctactcagtcttttctttttttggctcccgaaggccgtggataatgcattatcttcagacttggagtatgctccaagtagttcatcactagtattttcaacacatttcagccagtcatcgtctggttcgataaattggtctctaaacctgaaggtatatttcaatcgaaccaaaccaccttcgccaaggttg

SEQ ID NO: 99909 - DNA, 440 bp, Zea Mays
cagttcaggcccaaagaactgcctttcaccagtttgatcccaatacagtggactcctgcactttctgccatacaaagcctcaaacggtgacatcttcaaactggcctgatagctattattatatgagaactccgcatacggtagactcttatcccaactaccatcatgcttaagggcacaagctcttaacatatcttccagcacttggttagtcctctcagtctggggatggtaagccgaactaaaattcagtcttgtatccaaggactcatgcaacttcttccaataccgagaggtaaattgtgatccacggtctgatacaatcttctttggcacaccatgtaggcatacaatctatgccatgtacaactctgctaacttggctcctgaatatgtggtcttcactggaataaagtgggctactttagtcaatctatcca

SEQ ID NO: 99910 - DNA, 606 bp, Zea Mays
tcagttccactgcccactactgactgaaccgatgcagcaaaaagggcagcagcattgggatgaacttggacatccaagaaagcccacggctgctcaggttgtgttttcttcaaccataaccatctcatagtgagggaccagcccataacttcaagatttggaacacctaaaccacccaaagtcaatggtaaacacaccttctgccaacccactaaacagtgccctcctttgatatttttgcggcctttccagaggaaacctctcctaatcttgtcaatggctttgatgacccatttggggcattgaagtgcaataaggtggtaaactggaatagctgagaggacagatttgacaagagtagccctaccagctgggtgaataagagcagctttccaaccaggcaatcgatctgcaaccttctcaactagagggagaaggtccctcttggagagctttctaatagacaaaggcaggcccaagtacttgcaaggaaaattcaccaaattacaagatagcgtctcttggattgccaaaacctcctggtcattgcagcaaatcggagtaaacgagctctttgctaaattagtaacaagtcctgaggcttca

SEQ ID NO: 99911 - DNA, 690 bp, Zea Mays
tgcaagttcaggagttcggagaagcggcgccatgatggagtgccctcatcttgttgtatttggatgaaccacagctgggcgacgttgtcttggttgtaggaggccatccacatgcgttcctcgtcgatgatgcactgttgatggaagtaggactcacatcgattaaggaacacccatggatcagttttgccatcatactttgggaagtccaacttctggaaccgcggaggtcgatcctggtgatgatcgtcggtgtgctgtcccttcccgcccagggcagaggactcggttcggcggtcctgctggagttcggcgaccgaaagcttgagggattccaccgttgctgcaagggattggatgatggtgactaggttggatgtgttgggttgtttgggggggggactagactattagagagatctgggactaattcttcttcattgattgattcctccttaaggaggtaccgcccatctttatatatataggaagacttggcccccaagtaactaactcaatcttatctaatcgaatcccaagtaactaactcaatctaatctaatctttatccactaatcctaatcctgagtctatccctatgggcctccatgctctgggctgccgccccatgacacacccccactccacaatgggtgcatggtgatttccccaatacctttctataataat

SEQ ID NO: 99912 - DNA, 508 bp, Zea Mays
tcgcccttctagcccatattcatgaaagaactctccatcatatgtgtttgggtctaagttataatcttcatcgtgcggtgacaccttatacacaacttcccaacccttaagatgatatttcgtttggcacgcatatgggaggtaatacacttgtgtggcctattgtgccataatatagacatcgtctcctggtaagatggaatcctgtcgaattttgacaagctcaagattagaatttgtccgtctcgtcacttcagggtcaaaccaatgaaatctgaatatcactagagtaagaggtttggaaccatgaaaattgaaatcatatctttcttcaattcttccataatactcgaccttgtcaaggccagccataaaaactctagaacacatggtttttcgattgggccgactttggtcgtagcttgttgtgcgaaaatgatatccattaacgtcatacccagaaaatgtcctaaccccataggcaaagtcattggctacttgtctcaac

SEQ ID NO: 99913 - DNA, 714 bp, Zea Mays
tgagagcatgcatagttcgcctcagaatcagaagccagccagagtatgatggtcgtgaattcgtcgagcatgacacagagaagtgtgtcgtgactgtatacattggatccagtccacaccatgtggaatggagtgtcactgctgctgggcacagattcaaagacacctgtcaagtcgtcgctcgcaaggcattgagggccctgtgtcaaatttatgaagaagaagtggctgacaccccgctcagattctttccgccctttcagagagaccgtcccgcttggatggccaggatgcatgcattggaagagctgcagctgcttgaggatgaccccacagtcgtgtacctcactgcatacctgctcaccctggatgcgcagtatgatttcttggctcggcaccaccgtcagatgattgcccgagcagaagatgcagagaagctcaaccgtcagctccatgtggatctcaccacagctcaagcccatgtagctgccttggaaagtcatgaagtcattgttgttgaagccctgaagcaagccaaggatgagcatgtccagaagttgatggaggcctacttggtaacccataaccaacgtagagccctgcggatccaagagcccgcttcatccaacccagttcaacccaggagagttgaagatccccagattcttgaaggtcacccggtctctatcaaaggagagaagaagacttgggaac

SEQ ID NO: 99914 - DNA, 827 bp, Zea Mays
ctggatcggattggtgaactctggttcccatgatcccatcgaccttcaccttctgctagataatcacgctgactaggctcgagtttgcctcgacgctctcttggaccgtgtgggaagagctctcaaggacatctgcattctgcaagaatcagtgtatctgttttgtctgtccatgattcaattgggttgcatgacggagaagtggcccttgacgtggtcatggcgcgcagagtgcaatctcctgcatgcccatgattctacgcactattacaaatatgattaagccataaacaagctgcctccttagctctgcaaaacggatccttccgagtggttttgtcagtatatgccagctgttcttcagaactcacatgactgatttccagtctcccatcgctaacacactccttactcctctcatgataaactggatttttactcagctattgagcagatctgttgtcaattcggaggttgaatttcttcacttcagtgcccaacagatcccctataagtctgcacagccacactccctgacagcctgtcgttgctgctgctatatattctgattcacaagaggacaatgatactaccctctgcttttgagatgaccaggtgataatgtttttgcctagaaagaaaacaacacatgtggtgctctttcacttctcaaggtccccagcatgatcactatctgaaaacctagaagttcaatttcagctcccttgacatacttacagccatactagaatgtgccagctacaaatctgataattcatttgagatagcactccaatgttctacatttggattctccataaacctgc

SEQ ID NO: 99915 - DNA, 503 bp, Zea Mays
ccaagttgagtgacaagaagccgtgtgccattacagagacatttattttgattcaggttgcgcaacaacatcataatggcaccctttttaagctcgagtttgtgggcagggaaattgttcgcatcaattgagtttaagaattcggtagggtagaggacgtcgaagtctagtatgtgttccgatgattttgctataacgtcacaacttaggtattggatggtgtctccagggacaagcgagagaacgtagttattaacgtcatcgactgtggcattatttgggcaaacaatggcacgcgaggaaaggtatgtgggatctcggtaattcaacagaaaatctgggtatacttttgatacaagcgcaactaccttatcaccgtcaacccggagcaacaaatcttcagggaccgtaatccacgtagcctcatgctcgctcgctcttctttcagcaggcaagtaccatcaccaacagatagtacccatttgacaaacatgtcgagctcg

SEQ ID NO: 99916 - DNA, 366 bp, Zea Mays
tcctcttgggagttgcagcaggagccttttgcaccttcggtaaacttgcctcagctggtgtgggcttagaatttcaggcattttctctatttttccacaagtggctcttcggccttatcatctttagcttcgactgcctcaactataggcaccttcagcactacaatcggctcttcagcgctctacacaatcggagcagtttgtcttgcttcggcagctaaagaggtccctttgtcaaattcaggtactacgaccgtttcaatataacgcgaccggtaggtcagaaccttcacctttttgcccttcggctcagctgtaatggccgaagcggcagtctttctctttttcccttgccctcgtagcggg

SEQ ID NO: 99917 - DNA, 273 bp, Zea Mays
aaaaagggtgtgacaacgctgccgcagacgcactgtccaggtactcacatcagccggaccaattgctgcatatttctcactgtacgccaacttgggttcaggaaatcgtggagggttatcaacatgaccagcaggcacagagtttgttatcgcagttggcccttgatccgtcggcactagctgcaacatacactcttaaagatggcttgattcgacataagggacgtctatggttaggcaagaatgaggtgttacaacaaaaggtcatcgccg

SEQ ID NO: 99918 - DNA, 343 bp, Zea Mays
tgaggataagggtgttcaaatggttaaggaaatggtcaagcaaaaggcagagaaatacaagtgcttccgtcaggacaacaagggaattttatggtttggagaccgattagttgttccgaaggaccctgagctcaaaaagaaaatactggatgaagctcacctttccaaattctccatgcacccgggtagcaacaagatgtaccatgatctcagatctttatattggtggaccagaatgaagagagaaattgccaagtatgtatctgagtgtgatacctgccagagaatcaaagccagccacttgaaggcagcaggccctttgcaaccccttcccataccatct

SEQ ID NO: 99919 - DNA, 819 bp, Zea Mays
agaccgtcgatgcggtcttttttcgacgtaatttttgcgggggatttttcgcgtgtatattacatggctccgcctcgttaaaaacctcaccccccgggaggaaaagagtgcgggccggaataaaagctgtcttgcaaattacaagggcgagctggccctgaggagtcaaacaaaaaacttgcgaagattgtcaatgttccaagaatgctctaagtcttcgccggatggtgttgtgagcctgtacgcgctgggggacgccttcgtcttgacgatgaaagggccctcccactttggctctagcttgccccgggactctatccgagctgtccggacgaggacgaggtctccttcgctgaattccctcgggatgactgtgtggtcgcgccatgcttttgtttgagcttggtatttgtttagagcctgtagggcgaagacgcggtctccgtcgatgaggtccttcgaagtaggctcgtctacatcggggacggctgacgtgactatctgtggtgacccatgttttatttcttgcggagtcatggcctccgatccatatagaaggcggaaaggggtgaacccagtcgccctgcactcagtcgtgttcagtgcccagaccgcttcaggtaacaggtctgcccacttgccttttttgtcgtcgaggagcattttcttgacagttgtgaaaattttaccattggcgcattccacaactccgttggattgcgggtggtacactgaggcgaaggcaagcttggtgccgatggagaagcagaaatccttgaagtcttggctgtcaaattgcttgccattgtcaactgtgag

SEQ ID NO: 99920 - DNA, 629 bp, Zea Mays
aaatgaacttgcctctcatcattgggaagatcacaaagaggagcaaccagagcctcaatgtcttcaggagagggtcgcactctaagacccagaccactatcaccagcaggagggttggacacgaaattgaaaaaggacctaggaggtggtagattctaagcagagtaggcaacaagagcaccaacatttgatactttgcccctcaggatcatgtctagtcggctcaccagatcctcagtaggaattttcatgttggtaacccgagttgagtcagtaatgcgactgtacaagtaagctgggtatgtcatgtccttcaaaggctgaatgttcttaaaaacaaagtcagcaatcacaacctcggcaatcagacctctctccttcagcagacagatttcagcaagcagaaccctagcttctgttacctccaaggcagtgggagactcaacccaactcagagtgcgtacatctggctgtctccccgaccgagcggggagggacttgccatggttttccacaataaaccactcaaggtgccaccctttaatgctatccttgagaggaatgtcaaggtattatgtcttcctcccgcgacacatctccagacttgcaccacccacgagctggtgctg

SEQ ID NO: 99921 - DNA, 340 bp, Zea Mays
aagaaagcatgttgtgtaaattattgaaatctttatatggcctaaaacaagcatctaagcaatgacatgaaaagttcgatagaacttggacatctgccgactttgttgtgaacgaaacaaacaaatgtgtatactatcggttcggtgggggcaagagtgtatttttatgcctgtatgttgatgacattctaatcttggggatgagtcttgatgtgattaaagagacaaaagactttctgtctaataattttgaaatgaaagatttgggagaagctgatattattcttaacattaagctactaagagaaggcaatggtgggatcacacttgtgcaatccca

SEQ ID NO: 99922 - DNA, 535 bp, Zea Mays
tggagctcaaattaatgggtgtttaactaaaatgcctgtaacaaagttaaaactggtttgtagtagagtaactttaatgcagtcgacttgctagggtattatacaaaaattagaggattagtgcgacgaagttgagctgtcagaagcaggttatgcgaattggccaatactgaaaatctgattcagagtgttatggcttcagtgaaatgcagtcaatttgagaacaccagatctgagaatttatgcagaattgatccataaatcctatagtaaacttgaagactgttgtttggtgaacaatttttattaatgaaggtcaccctgttcttaacaagaattaagagaaaaagagggtgaaaggaggtaggttcagcaggggaatgcagatcagggatcaagaaatatctgaagaatgaaaagatctgaggcaatgtggatttggatgtgctcgagtgaattggagattggaacgaccgtgggaaggctatgagccgtgtcaccattccgcgaacttggccggagtctgaccggagat

SEQ ID NO: 99923 - DNA, 537 bp, Zea Mays
cactctccttagtgtgtggtaactatcaggtggcccgcttggctagctcccacccgcatgcacgtcatgtgccccctatcaccgccacatggggcccaccattcgggttccctcgggtaggtgcgaactcaagatgtttctctaacatgtggggcccgctccccagcatctcaccatgcatgtatcgcttccatctaacgtctccatgtgggtccgtgtggtcagcattatcttcttcccccgtaaccaaccttaggaggatctccaggaatagttgaaactacctccgccttcccgatggtcgtttcatcctagctcctgcctgccagttctagggtatttaaacttgtgcccctcgcccctctagcccatccagccatccttcgattgccaccaacatcgagcgaagcaaagccaggagggagaagtattcggcggagagcggtcgtagttggagtcaccacaaattcactctctattgtggaccgggcattggactgcgcgaccaacggtaatgaccttcccctcacttcgtcg

SEQ ID NO: 99924 - DNA, 295 bp, Zea Mays
ccagggtgctatgtataaatttcaagacctatgtgtaatactctttacacctatgttgatggcggggtagttcctatgtttcgtggggtctttcaaaaagtttgcacgacgaaggggtatggacagatatgagccgtaggatgtgaaatttgtggccttgattagattagaacttcattacacatgtatgcaatgttgactgccaatcctaagatctacggtttagattttatgatggcagatccaatcccatccgcccgatcagatcggacaacacatattgtatgggccgaag

SEQ ID NO: 99925 - DNA, 364 bp, Zea Mays
ggaatatcatcggtcgacctagcatcacctagcgtggggagctgctgcaacacgattgacatgtaatcaacgtttatttccctctcccggacggacttttggtggcaatctaccgtgaagtgcgagaggaaccacttctctgccaccttgagcacctaccttgagcacctgatcttgctgccgtttgatttcctcgtccatcatgtcatcttctaattttttatgctcagcatccgacaaattagtcagccttgtgttgttgtttggagaagcaccgttgagatctttagaatcggccatataagcctgattttgtagatctgcaaccttattcccagcggagtcgctaaaaagtgtgttggtg

SEQ ID NO: 99926 - DNA, 377 bp, Zea Mays
agaggaagcgattgctgctagccgattgctgctgcggatggctctgctgttaggcacttgggcatactactctctgctgttcggcactggtagttctaattcctaaactgaataactgatattgttagtctataagtaatagtcgtgatatgttggtctattgggcacttggtctgcaatttttcgtgttaccgattcccgatcgtaatcgactcgttcccgattgaaaatgttccgttcccgatatctcgtaatatcggtttcgtttgtccgtccaacatttccgttcccgtttccgatttcggcaaaaaatacagtaaaggtaatggtttgagcattttcccgaccgttcccgatcgttttcaagcctacgtgcg

SEQ ID NO: 99927 - DNA, 512 bp, Zea Mays
gttcctgcacgatccagatgttccctgtcagcttagtctgcagatcagaaaatgctctctgtctccagtgaattgcggtgggatagcgggataggaaaatggaaagaacaagtcgaacatgaaagtagcgacgtcgggtgagggatggcggcaaatcactgaactgcaccagttgcaaactgcacatggtttaaggctcactggttggaggctaaccttcagtttgggcctaatcaaattgactgaagtaactaaattaaaatatagggctcaattatgaggcttgtgattggagttgttcttaaatccctacaaaatcaccacacggaagatcaaacatgatgtcttctagtagttactctggagtctacgtcgtcactgcttcagtttggatctcatgcatagatgttactgcgttctcagtgcccagtggctcggtacgtcattggggaaaaaatataaataattcattatatcttctaatttgagataaaatactggtaatgggggag

SEQ ID NO: 99928 - DNA, 625 bp, Zea Mays
cctagatgctttcagtatccttcagcaggacatgaatcacctttatgttgttattcagactactcttttcgtggtactggtagtatttgaagtcatgaggtacacacatggattgactgatcttcatggtttaggatgttggataattaatcaggtgttttgttgtttgtgttggtcttgccttggtttcttgtacgggacacaaatttataatgttgtcttgtacaatgtgtttacatttatatcttctttcatttatgcagtaggatatttctctagatcatctgctatctttgttgccaaattcatactgcacaatgagctcatttaggaatttgttctggtgggctgtctttttatatttattatgctaattgttggactgggttgtgttcaattgatctctgtaggagattttatacccttggagaaattgaaatacttagatctcaatactttgtttttgagatcatgaatgatgatatgttttattggtacatgcaaacatgtcgtagatggtgttcatgaccagaacttagaccaaactgggagaaaattaaaaaatatcttttacagatcctttaaaccgatatttttagcattctagcaacgatgtgcatctgtc

SEQ ID NO: 99929 - DNA, 613 bp, Zea Mays
caacaagtgcgcaaaatcgaagtctctttcgaaagaccctccgtgagaaagttgcctcagggtgcagccggaattataggtgcgcacaaccaaagtcattcctaaaagactctccgtgtagaagtcgcctatgggcgcggctgtatcaacgaaggcgcgcaaccttatcatacaaattatggttacatacacagcgagggcatcacatattacattggctcaaccttcagaatgatacccatctccctgtagttgaacagcattatcctcaattcctcaccctcaaaaagatttcgcagctccccttcacccacactagccccagccggcgaggacaacaattcccgtttaccagtcccgtccacgcgaagacgaccactctccatctcaccacaatgacgcctgccacttcgcgacaattcactcactctccgtttcgccaccacccttcgctgcctacacctagtactcacacccagaagatactcagcacccacctcacgcggcgaagtctccgccgcagccatgtctaatgctgcaaaataatccaagtcctcatctgaagactcctctgtccacgcaatcgaactcccagaatcatcagactcaaaac

SEQ ID NO: 99930 - DNA, 425 bp, Zea Mays
cctggggcatgtgattagtcagcagggcattgcggttgatcccaagaatgtcgcggttgtggtggagtggaagagaccctctagtgtctctgaaatccgaagcttcttggggctcgccggatattattgacgcttcgtaccaaatttttccagcattgctaagcctttgactagacttttggagaagggtgttctgttcgtctggtccagcgattgcgaggtcagctatcagacattgaagaacaagttggtgagcgcccctatcctagctttgcctgagagtggtaagcgtttcacagtttttacggatgcttctcgaattggtcttggctgtgtgttgatgcaggaaggcagagtgatcgctgatggctcaaggcagttgaggaagcatgaagggaatatctaactcatgatcttgaattggc

SEQ ID NO: 99931 - DNA, 497 bp, Zea Mays
ccggcggcgaagctgtcgcgctggagatctcatccatttcagctactgtactatcgcggagtgtaagcggtcgacctgacagagcactttggagctccattttctcccagattcatatggcaacatgatcaacgctctgcagcaaaattatagagcaatataccatctacaacattgctatatggtgttgccacaaaaagccactggatcatgcttgaaattgggcttgaagttgatgtcagtccactgtcagtctgaaaattcagaccttaacagcctgacatcctgattttgagcatgattatctccagatttttcacaagaacatggcttgcactcttaagcaaaattgttctcctttgtttgctctacaactttgatgtggttccctagggcaacaaccttatactttgaaagttacaaagccccaaagttgagcccataacactgtttttcagacttagagtggaatctcaattggggtcctttttgcaaat

SEQ ID NO: 99932 - DNA, 387 bp, Zea Mays
caaaacacaataggtgcgaaagattctccaaatttattcatatatcacttagcacaattacaaatcttgaaaggggcaacaccttgacattttttttctttgtgagacatactccttctagctaaatgatatattattcttccttgtcagatgcaccaatcagagctggaggtcgattgttttcaactactattctttctctatatggggtttccaaacacatggttctctcagtatgttggattactgccttagttctttgtaaccaattctttccaagaatcacatcctttcccattgattctatcactataagatcagctagaaaatctatcccattgattttaacacttacatttggacatatgtagtttactaacatttttc

SEQ ID NO: 99933 - DNA, 436 bp, Zea Mays
acctgaaggggttattcagtggatcggcaaagaggacgaagcttttgatgaaatactcagcaatcgtggggatttctgcgctttcgccggtgcacaaggggtcgcggcaattttagagaaggccggttgtgaacatgttaaggccgcagcccagccagaatctattttctcagcaaatgacaccaaggatccctcgttcgaagcctctttgctaggcgagaggttttactctgatgtttggatgaagggcaatcgtgagatggctgatgaagccattaaaaagaatgataaagaatctcacaacgcccgagaagaggctaaacgaagtgaagaagctgctgaacgtgccaggattatagatacttttatttaaggttttgcttcgttgttcgtttctagcttcaaaattcaccaacatatttttattgcagctggc

SEQ ID NO: 99934 - DNA, 305 bp, Zea Mays
tcacaaatggctacccgatttgctctggccacggtgaccgcatgggcaacggaagaacacgggcgttcacggcaacccagggcggtcaagttcaatcaaaggagtcgtgaagcttgaggaggacctaaggacactagaacaatcgaccagagtgcttgaacgaacctggaataagctggccgcggtgagggtgtctctgcggtggcggaaaccggattgggggaagtaagaaattcgcggtctctggtgaacgatttgaggcaatacttggtggcttggtgcgtgatcatcctacggacctgacc

SEQ ID NO: 99935 - DNA, 1404 bp, Zea Mays
agaaagtccaaaaggcattactcgaaactcatagtggccatgatgagtttgaaatgccgtcttgtgctgatcctgtggattcatgcgaatctgatgaaatccagctctaagatccaaagtagtaaaccaagcagctcctgacaactcatccagaaattcatcgatgattggcactggaaatttagttttgactgtcagggcattcaagtggcgataatcaacacaaaatcgatacgtgttgtctttctttttaactagaatgaccgaagaagcaaattcactctaacttggctgaataattcctgtcttcaacatatcattgacttgttgttcaatctcagtcttgagggcaggagcatatcggtatggccgcatctggacaggtcgagcccctggaagcaagggcaccttgtgatcacaatcccgaacaggtggcattccctgaggcacctcaaacactgtcgaatactgatgcagaagctgctgaatatcatcaggaagtcctttaaggattgactgctccttatccgacaggtcttgaatactacagacttgaattagggcagtctgcatgaccgaagcttggattcctcgcaacatcacagtagaatttcgaagaggaatgcacagccatttatgtgcccaatggatccacatgggactatgagcttctagccaatccataccaataatgatatcataagttggcaagggcaacaccttcaatgtggatgaaaatgaaacaccactaatagaccagcatgcacccaccacctgttgcgtacactgtaattgagatccatttgcgacttggacttggaaaggcttactgattgtggtcacatttggcaaggactgagctacagtagtgctgacgaaagagtgtgagctccctgagtccaacagaactaaaacatccaagccagatatatgtcccacaaatttcatcgtacggggaacctccagaccagtgaccgctgcctgcgacaggtgcaagacattaagttctgtttccgcatcagctgtatcctccactgaatcttcctctggcagctgcaccatcttccacatctcctcaactaagtgcaactgaaccgagtcagcacacttgtgacctcgagcaaatggtgccccacacttgtagcataaacccttcgccttgcgataagcatataatgatgtgagccgatcatcagacgatgtgcctgtagcagccttgtcctcccctgctgcagaactgctcttgatatctctagctgtcgaaactgaagccccaaaattcttagtataatttttagaatccggccaccgagattccctcttcttcaccaaagctccagcttcctcctgcaattgagcaagaacagcaacagtatccacgtcggggggtcgttgcaacataac

SEQ ID NO: 99936 - DNA, 373 bp, Zea Mays
tttgcattcattacggataagacgtgcgcctgtccattccagtgacaggcagtgtgccgaatccacgctgcgtcggccgtgctgttactcacacgttaccatagcaaggacaatgactcaccattactcgcgcgtttccaagaaaagggtcactgcctatcaatgctgcatggactgcagtcatcatgactcccgctgattactcatgcgttactaaggcggagggaatattaacggctccgcctatatgcctttacgcacaacaggtgtaccaggctactccgtattctactgcaacaagccatcacccacctgcggacacgacaagacatggcagtagccagtcggagaagcaacacagcgtccaacaaag

SEQ ID NO: 99937 - DNA, 539 bp, Zea Mays
ccgtgcgcctgataccgttcgctgctcatctgatggtacaccgtaaacatcaaataagcatgcaagagtacgcattgtcggtcaatatacgtgactatccgtcttattagttgcctgcttccgtgtgtacatgacctgtagcatgtaaaaaaagttggtatgtgatgtttggttggctacatttatgattggattaggtcaagtttgtgcataaaaggagtcggaattaggcccgcgccatactgtcgttcgctgtgtatctacgtataaaaactgtgcccagccatctgcactcactcctacaagtagacaatcacatagtatgtgatatggccatgttctagaaccgtagaacacaaagaataaaagactacattcaggccacatgacttagtctcgcctaagcttaaaatagtccaacgcacgacttagcctcgcctaagcttaaaatagtccaacatgtttcaatttcagactaacctagcacccaataattatggaccataccggaccagcctatgggttgagccgtcgacaca

SEQ ID NO: 99938 - DNA, 431 bp, Zea Mays
ataagattaatattgaaatggaaacatatgtaaattagaatcatccgacaaagctaagagatgtccatgctttgagaaccttctttagatcacgaccgcagaagtagctctccaagactcaacgaaggatgccgcaattccccaaatacatggcatgcatcctcatggttgacgtcgccaccataaacacggacaactcaattccccactccatcaatttagaagcgagcaagcaagcaaccgatcgctcaccccatatgcaccaatctggctcccaagcttcgttcgcatcagtaccaccagcactccacctgcagctaccaattgagacctccccgcctaagcagatcaattgattgtcagagtcagatagttggtggtatgggtaccttaactaacatggaatgatggggcgcgatgtagagtggata

SEQ ID NO: 99939 - DNA, 472 bp, Zea Mays
agaggcatcacaatacacatcaaacggcttgttgttgtcaggctgcgctaacacaggtgttgtggtcagatgttgcctcaaggtgtgaaaggcatcttcacacttctgaccccattcaaattttgctcccttctttaacaattctatcatgggcttcgcaatttgggagaagtcaggaatgaatcgtcgataatactcggccaatctcagaaaactctgaatctgacaaacagttgtgggtggcttccagttcattacttcttgcaccttatctggatcaactgctattcgtttttgagagatagtgtgacccaagaatttaatctcctttagctagaaatcacactttgacaatttggcataaaggcggcgttctcttagacgtttgagcactacatgcaaatgaccagcatgctcttcttcgtttcttgagtacaccaagctatcatcaatgaagaccaccacaaatttg

SEQ ID NO: 99940 - DNA, 449 bp, Zea Mays
gtcgtttaggacgagcatgcatgcattcttaattaaactatttaataatcgggtaagaacttaaatatacaatgatgacaaattaagtacccccgtaccgttgtcgtaattatagagaggctgagttgcggtccattttcatttttcattttataattcttttcttttacttacgcttaaccgtacacagatgacttctcacggatcctcggatgaagggaatgcacagtcccacactgacaggcttgcacgagagggtttcccccgtatcttgtgggaggtacttcagggagctggttacacgacgcctccccagtacgcggtgcagctgttcgagaagcaccgagtgccccgctgtagggtgaggatgaccctggagcctcatcccctacagggctgaggatactatggaggcaattgctcttcacggactgaccaccttctgcgaa

SEQ ID NO: 99941 - DNA, 279 bp, Zea Mays
tcatcatttaaggagatggaattgaatgctcaaggcaaaggtataacaataggtttttgtttttaccggtcaaaaggtgcttagaggttgataattgaccgggttagtaggctagatagccgtactatcaagaggggtcaattatcttacttgacatgtctttagtgcctcattgctcatatagttggtgcatttgcatgagggctaacaacgctttggttcgtgtaataaaacttattcaaaagcgatttcttgaatgtgggctgaattgaggtaccg

SEQ ID NO: 99942 - DNA, 356 bp, Zea Mays
ccgggtgtgacattgatgatccggtggccatcagcgtcttgtgttatttgcagaccttcgggattgcatacggctggtgtgctgatgacatggtagaacacgtcggagggaagggcctcgcctttggctgctgctttggctaatgcattggcctcttcgtttttgtttcgctcaacgtgttgtagggtgaagcccttgaactgcttttcgaggccacggacggcggtgaggtattgcatcagcatgggctctttggctaagtattccttttcgatctgaccggcgatgaccttggaatctattctaatgatgcatgtggtgactccaagggcccgcagtttgcgaagaccgaggat

SEQ ID NO: 99943 - DNA, 471 bp, Zea Mays
gtttaacctagggattggagagggaataattcctttgggactttgggttgggtctgtggaggggcggaggctcgtctctgcgcaggcagaatcaggaggtagagagagaaagcgaacctttggcttgtctctctccccctctctgcagtccactagttattactagtggattatcttaggttaatccatcctcttcttctttcccatgcatctctggatctggcccatgtcgctggagcaaactattgcctccagctctgctcctcacgtcaccatcgccgtctcagctcaactgtacgactccgtatatatattactataataaccatcggttgtcatctgcaggaggttctgtaataacaacttgagacagtgttcgcacacggacacatcatacctgcaccaggcgacgagcatggtgtttatcggaatgtacgagaactcttgaaattgaatcgcagaacacctcac

SEQ ID NO: 99944 - DNA, 509 bp, Zea Mays
tttatctaagtcatagaagtgctaaaaatacagccaaatgaacacaagagaaaagagccccatttggacaagtcagactgtttctaggtgcaccggaccaggtctagtggtgcaccggatcaaagttctagagaaggattttaatgacctagacaactgtgcactagactagttttctagagtaggtgttttcggacgcatagggcattgactcactagactcagtccggtgtgcactaactagtcgtacacccaacggtcggatgggacagaccaatggtcagctgacgtggcaaggtctggtgcgtgctaacatttgagaaataccttaaaatggctactaacaagactgcaaggtcagcggtctggtgttcaccagaccaaacattgttgtagtggatgtccaatagctatatagggggttggggctataaatacaaccccaattagcacatttaatatacaagatctatacaataactccaatacacaagtgcaacatccccaag

SEQ ID NO: 99945 - DNA, 390 bp, Zea Mays
aaaacgattgagtggttggaaagggaaattaatctcatttggggaggctgattttggttaactctgtcctatgtagcttacctatgtttatgttacccttttttcaagtcccatgtggtgttcttaagaaaatggatcactacagatctaggtttttttggcggaatgaccaacacaaaaaagtatcatctcgctaaatgggaaatactatgtcaaccaaaagactagatagggcttggcattatcaatctcgatctttaaaataattggctacttagcaagtggttgtttagactatgtaatgaagatgggatgtggcaatagctgattcaaaacaaataccttaagaatgcaaccctaagctaggtgtgcaaaaaccaggcgactcac

SEQ ID NO: 99946 - DNA, 432 bp, Zea Mays
aaccgccatcaagaaaatgtttctcaacgacaagaagggtaaatgggccgacctgctgcctgaagcaatctgggcgctgaacacggctgagtgctgggcgactggattcactccctttcgcctgctatacggatcggaggccatgaccccgtaggaaataaaacatggatcaccacggacaagcgcttcagccgtcctcgacgtcgacgaaccaacctccaaagacctcatcgacggagaccgtgtctttgccctgcaggccctcaacaaataccaagctcaaacgaaggcctggcgcgaccatgcagtcgtcccaagagaattcgacgaaggggacctcgtactcgtccggacaacccgtacagagtcacggggcaagctggagccaaagtgggagggtccattcatcgtcaagacgaaggcgtcccccag

SEQ ID NO: 99947 - DNA, 1081 bp, Zea Mays
gataatgtaatacttagagttttgtacttgatgtattcatatatgtcataatataatacttagagttctatacttggtgtattcatatatgtgataatgtaatacttagagtcctatacttagtgtattcatatatgtgataatttaatacttagagttctatacttagtctatacttggtgtatgcatataatacttgatatattcatacaatatttgctgggacaaagcttcactttacgttttagtgtattcatattatacttgtgtctacatacatacttggagtatttaagatgtcgatatccattttatttctatccgatccaatatgtatccgatctgatttgatctgaactcaataatatctatattcgatccgaactcgataatatctgtatcaacacaactcaataatatttgtactactctccctctctatacgttctatatgactctccctctcccactctatgtgttctatacgaatttacctctctcactctctatacgttctatacgagtctccctctctatatgtcctatacgaatctcccctctccctattggatttggattagggtttatggttaagggttagggtttagggttttgggttagggttagagttagggattagggttaggtttatagttagggattagggtttaggattagacatagggattagggatagggttagagtgagggattagagtttatggtttagggttaagggtttagggttatgcttagagtcacagattagggttagggtttagggttatgattaagcgttatagttagggtttagggttatgattaagcgatagtgttagggattaggatttagggatatggtcagggttagagtcaaggattagggttagggtttatggtttagggttaaggctcaatgtttaggattatggttagagttagtaattagggttaggctttagggttatcgttaagggttagagttagggattagggttagggttaaagtcaggttttagggttagggtttatagtttagggttagagttatgggtttagggttatggttagagtcaaggat

SEQ ID NO: 99948 - DNA, 307 bp, Zea Mays
gacggactcacctgtccatgtcgcaagactgaggtgtcgataggctaccctaccaagctaaagtcacccaaaatggtgaggtccacaccaccagttcagagagctcaggggatcccctccataacccaaaaaggctaccctaccaagctaaagttttgctagatctgatgaggaacttgcctatggcccccctatgtttcaacgccacagtaggccaccaacaccacccattgagaatgcctccggagaacaatgatgaagacttccaggatggcctggacctcggtattaacaccgaggaggaact

SEQ ID NO: 99949 - DNA, 447 bp, Zea Mays
agaatttattagttcgtaaatttgcggtaatgaaatgacgcatgatgattatgaaatttgtttgcgggatatagaagtcatcccctggattacataggcgcgaacacgttgccccggcttaagtcgtcgctgacttaagtcgattgctccgttagcagggcatagtggccaccccgagttaagtaagcgtgaacgtgttacaccgccttaagtcgttgccgacttaagtcgattgctccgtcatcagggcatagtggccaccccgagttaagtaagcgtgagcatgttgcaccgctttaagtcgttgccgacttaagtcgattgctccgtcagcagggcatagtggccaccctgagttaagtaagcgtgagcatgttgcaccgccttaagtcgttgccgacttaagtcgattgctccgttagcagggcatagtggccaccccgagtt

SEQ ID NO: 99950 - DNA, 1001 bp, Zea Mays
gaagattgaggttgaggaaggctaatgtatgcaaaaaaacaaagcaaataagataaattgtttagatagttttgaatgtgtgtcaatcggacgtaccctttcatttatataagaaggtggtcagttactagtcggtttctaaacaaatcccgtaaagtttgctaacaaaatcaacaaaaaattagcaactctaaccagtggcggacgcagaacgagaattcagggtgggccaaaaaatcacatgataaaatcaagccataccgtaaacaactactgtcacataaaattcaagttttatatcaatacatgatataaaattcaaagaaaaccatataaataaaaaagcaaacataccgttaagttcttgtgaccgaggcaattgcatccttctagttttgaggcgttgaaatcgtcgaataataagctcatcatcaatggatttgaagatctctttctcagtgtagcaaaccattaaatcattcaaccaatcatcttcaatgttgttacacaattctctcttaattatattcatagctgaaaatgttctttcaacacttgacgttgacacaagtaataatagggccaactcaattagcttgtagactaaaggaaacacaacatgctttccagtcagaaccatcttaatagaaagagttgcaatatcttcacaagtactaaaagcagcatgccttctcacatgaacaatatatgtcttgagttgctctcttaacattgcacgatcaacaactgtgaaatcttgatcatataacttaacaagcttaacaagcttctccaaattgaacatagaaaatgacttctttggatcaaggcaagcaaaaccaactagcaactcacttgaaacttcactgaactgatggcacaactctgtattgattttatcaagaacaacaaaaaatatctcggtgcggtagtagtgaagatttgtgactgtgaatccatctcgccttgatcgacctctaataggtacttctgcatccatg

SEQ ID NO: 99951 - DNA, 633 bp, Zea Mays
gcagaccgcgcgccgtcgccgacggtacgtagccatgtcgtcttcttcttcatccgctgtgaatacgccattgggcgaattgtcgtccgagggtacctcagtgatttggcagcggtggagctacacccgggccacacggtggaattcggcgtttccaggatctcctcggttcgcatgcaagacatgcatcagttggggtattttgggaatggagttggacgagtttcgggggcggaggagattcctgagccggagggtaagatagttgtgttcgaggcattttttactgccgaccttcggttacctgtgcatcgttttgtggtggaggtgttgcggaggtatgacgtgtagatccatcaattgacacctaatgctgtggtggccctagcgaagtatgtttgggcagtgacttcgtatggcggtcagccctccatagaggtcttcgccaagaattattgttttcactggtagaagagaaaagttggaagcaagattgcacagtttggatcatgcacctttacgccgaggactagaaagatttcggcggaagttgtggagctagttccctgcgcccgcaacaagtggggcaactggtatgattattggttttatgtggcgggaggcgaagtcgaa

SEQ ID NO: 99952 - DNA, 303 bp, Zea Mays
gggacatacgttcttcggagcggaacctcgggaaacaaatcgttgtgttctttgtgtttgatcatttgtttgcgatttggttcttcctcttccctcttttgttctcttgcttgcaactggtctcatatcaatttgagttggctcccaaagtaattccacaatcgattgagcaactctagcaagaaaaacacctcccccgcactccgatttactttatactcgttctaacgctaacacaaggtgaagtttgtgtttaaagtctgtaaatttcaggtttcacctattcacccccctctaggcgac

SEQ ID NO: 99953 - DNA, 313 bp, Zea Mays
ttatgaacgaagctctctcgctccacagctccaagcctcaccttggcccaacaacttcagggcaggtacctaccccaagtacaacagtagtactgatcccacatagtatattatgagctaccaagttgcagtcgcatcatcctaaggagacgatgctaccatggccaaatcattcatcatagccctcgaaggcacaaccctcacatggtacacaagactactgccattatcaatcgactcatggaaaacactccacgacaagttcttattaaaattttaagggtatagaccagacaaagatgccctgacagaa

SEQ ID NO: 99954 - DNA, 390 bp, Zea Mays
tgcacaaagaagaacctagaaaaaatagaaaatctgttgtttgatatttttcaaatggcatgatagtaggaagcacccctaagccctaaaactttagaaaatcaccatttattaaccattacgtatctttggctaaaatttggcataaagtcatattattacacctagataccagcaaaaatagaccttagggtaaaatccactcatagaagagagttgtagttcaaagcatctcctctgtcctaaattttaatatttttgtgtagagaaaaccattctcattttaagcctcaatttttgcgactgaattatataaatcagtgaaaggtcactgtaatttttacaggatttttgtaaatttttaaatcaatgttgtagttcaatcccact

SEQ ID NO: 99955 - DNA, 517 bp, Zea Mays
ggatctcaagaaaataaacgggatcgagaaatattaccaaagcatcatcactgcaatagcataaacaaaggttgagtttttcactgaatcgacggctccttcaaccttttcgtgggcactgcctgcatactgcacaacagcgattgcctccttctccgcaataatggccgccgaacgagcctttgctgcagctacgacagctgcacacgcgacgtcgtacgcctcggctacagcttcaacaggaggatggagtcacaacaaggtgacggcgtgacctctggttgcttatctcctcaacgcctaaaagagattttgagttcataccagtggctacgcgtcgtgtggattttcaaatcgtcgaatcactcccccaatgtatccatttcgatgaagccgaatgtgtcgtgtttcataatgacaaaaatctcgatatgtcgtgtggattttcaaattgtcgaatcactccccccaatgtatctatttcgatgaagccgaatgtgtcgtgtttcataatgac

SEQ ID NO: 99956 - DNA, 468 bp, Zea Mays
gagtgtttgaggaacctccaaagccccacctcaaaagcaagtgtgaattccaaaacctagccacatccctgagcggcgtgagttggagccagtgattacattcttgttatgttatttccaaaaaaaaagtgttttattgactaaagtttgacttttatattttcaaatctaaaaccaaaatacacaagaaatcgtaccagttttgctatctcggtttgtaacgagaaggaattcttttttaccggatttcggtagttcgcgggccgagaagttaatccgtggttggagctgaacaaccattatgcgtttgttgcttacctggagactttggaatttttttccccacactttagatatttatcttagcaattaaggaacggagataccgtaccttcctctcctgtatgtatttatcgaccaagcaccccagcgcgagaccgtatacgatactggagctggcgaagaagg

SEQ ID NO: 99957 - DNA, 292 bp, Zea Mays
gtctttgtgggtgggtactaagtcctcagttctgctactttgtgtctgagaagttaggccacaggagtgaccaagtaattccaaacaatggattctcttgcgccttgcctgccatgttccacaatgccagagatgagacctcaaaattggccttatctcacatgccttgctgaaatttaaacactgtttagtaacctgaatttagcctccccactggaagtatactgtctcttaggtactgagaattctgagccttatctaagatatgatccatgaggctaagaaaaatgga

SEQ ID NO: 99958 - DNA, 456 bp, Zea Mays
tcgtcgacgaggcttcaaagtatgtgctatggtacttcagaccctcctcgtctgcctcatggtggagtagctcctggcaactgctcacgtcactgctctcttcagacatctgttcttagacaactctcgacgttcccctgcagacttcacccaacggcgaagttcttatatgagcttatgaggcgcaccctgctaccaaggatgggctagagagaggctacaactcatattctgctctagctcctcggtgccctggtgtcacattcagtctttaatgtggttgattttctgatctgtgcgatcgaagacactatgttggatggtctccatgctcggcgtcagctgccctacgctcactatctctgccacatctttgctcagctgatccagcctcttcagttccaggctcctcttgaggcctcgagacttcagtttggtttctaccgcccagctcct

SEQ ID NO: 99959 - DNA, 465 bp, Zea Mays
aggatatccaacgacattgttactcaatacatcatcagtagtcctatattataacattgttataggtcgatctataccaactcttctttaagttggcaaatccttggctttgtcaaactatcctacgcgaaagccatcgtttccattcgttaaatcaagaagcacaatatatcgttattggtccgctctaaactaatggtttagtatatttattcaatctaaattgaattctcgctgtcagatacatttggtagatgtatttctatgattacttgcttgctacagattgagctatgtattatccttactacttattaagacagtaatagtagtctgccgttctgccgttggctaatctacaccgtccgtccatcgttcatcgcaaaccccgccgctcgatttgaggtccaccgcccgctcgaccgtccccctcccgaggctgaatccgccaacacttgtctatcg

SEQ ID NO: 99960 - DNA, 405 bp, Zea Mays
ttggagtcccgtccgaactcacagtcgacaatggcaaacaattcgacagccaagacttcagggatttctgtttttccatcggcaccaagcccgtcttcgcctcagtataccacccatagtccaacggcgtcgtcgagcatgctaatggcaagatttttaccgctatcaagaaaagacttctcgacgataaaaagggcaaatgggccgaccaactacccgaagtggtatgggccctgaactctacagaatgtcgggcgaccaggttcaccccctttaacctattgtatgaatccgaagccatgacgccgcaggaaataaagcatggatcgcccaggacaagcacatcagcagtccccgatgtcgatgaaccaacttccaaagatctcattgacggcgaccgcatcc

SEQ ID NO: 99961 - DNA, 508 bp, Zea Mays
tttgtgtgcttataagttggtatttggtttggcgcaaaaattcttagaaaaatttcaaaattcccttagtttgggctcaccggacagtccagtgtgcaccagacactgcactgttcactgtccgctgctccagcttggcctcggcttgctctacctctatgcagactatccggtgtgcaccaggcagtgtattgtacactgtccggtgtgcccataaccgcgaattcaaacatcttctctcgtccaggcccgcacgtcagtcacttagattcttttatttggccacaactatgctcttctcttcctccagtccagaccacgtgattctctctgtctagttcagccagcgccaccaccttgctcattatccttctacaccgccatgcctgtgcttcgctgtagggctcccctcgtcgtcggtgtccagctccccgtcgtttgtgctcagatcctcccctctcctctctggtgagcagatctcacctcttcttcctcccttgctgtgttt

SEQ ID NO: 99962 - DNA, 560 bp, Zea Mays
gacccaaatagaatcgtggtgtcgggaggtattgggcaatcccacaatgaaatccatgcaaatatcctcccatttccaggatggtatgggaaggggctgtaaggtgcctgctaccttcaaatgactggccttgactctctggcaagtgtcgcaatcagatatatacttcgcaatttccctcttcattctggtccaccagtacaaggatctgaggtcataatacatcttgttactgcccgggtgcatggagaatttggaaaggtgagcttcatccaatattttctttttgagctcgggattcttgggaacaaccaatcgatctccaaaccatagaatccctttgctgtcctgacggaagcatttgtatttacccaccttctgttcaatcatttccttaatgacttggacacccttgtcaccaatctgcgccatgactatttgctcatgtaaggtgggctccactgaaatataactcaaagcaccggaggaaatgacttctaggttcagcttgcacaactcatcacatagtgtggtgattcttgcatccatattcatacaat

SEQ ID NO: 99963 - DNA, 406 bp, Zea Mays
atctcggtggaacccacattgcaagagcaaatagtgagggcacaggttgaggataagggtgttcaggttatcaaagatatgatcaagcaaaaggcagaaaaatacaagtgtttctgataggacagcaagggaattctatggtttggagatcgattggttgttcccaaggaccctgagctcagaaagaagatactggatgaagctcacctttccaaattctccatgcaccctggtagcaacaaaatgtaccatgacctcagatctttatattggtggaccagaatgaagagggaaattgccaaatacatatctgagtgtgatacctgccagagaatcaaagctagtcatttgaaggcagcaggccctttgcaaccccttcccataccgtcttggaaatgggaggaca

SEQ ID NO: 99964 - DNA, 377 bp, Zea Mays
gcaaggaagaaatcttcactgaatacggcagcccaaggtactgattatagggggcagatgcagtggttcttgagctggccagaacacagcaaaggagagctccaagggcgccaacacaacatgaggtatacacgtggtgctgctcttttgacccacgccagcactcaaacccagccaaggcactgaacttggattgtttcataaatatagcacacaaatatccaatttgtctaggaataaggacaagagaaatagcagtgcccatgcttgatatttttttccaggggtgaggcctctagactttagttatgtgctacatccatatctcaacctttacagtcgagtgaaacagcccagaacactgaatttagtatgcc

SEQ ID NO: 99965 - DNA, 588 bp, Zea Mays
gagatttgatgtgagaacaaaagaaccatgaaatcaagattgatgagctttttagggacacgagagaaccaaggacaacaacgaaatccattgaacccaatggatacaccatttagagatacaattgataaaacaacgtcatgatcctcggagaaggggtatgagaatgaccagaattgagagatttaggtagatcaacatctgatacttgagaacgggttatagcagataaccagataatatggcagaatcattaaaggatctgaaaatttggatgataaggccacaacatgattcacaaaggtaaaggtttactagatccaggtgaaaaagagaggtcatcaacccagatggcttctgggtttagcagaggagaatttaatgaggattttggaccatgtttccaaaaagaatttgaggctagacattgtttgcgtgaacagacaataaaccattttttgacatacacaagtgcacaaggaagatttggtctatttaggcggtcaagctatggggatatacaagctgtgcaagtgcaacttcaaacgtaaaacacacaagggttagataataccaacacaagcatga

SEQ ID NO: 99966 - DNA, 704 bp, Zea Mays
aaggagctgaatttgaggcatcgtcggtggctcgaatttattaaagattatgatttgtccattcattatcacccggggaaggcaaatgtggtggctgatgcccttagcaggtctggggttccaaaagtggccttgtcgttgattgctgatctggaccgtttggggatcgctttgtgctatgtcggcaccgctagtgaggagactcgtatgcttattcaatctttcctcatggagagagtgcgtgcagctcagcagcaggatcgtttattgcaggaagctcgaaagagggttggcgatggtaaaccccgggagttctccattaatgagaatgatttggttcgtttcaggggccgcctttgtgtgccacagaaatcagaggtgaagatggatatcttgagagaagctcataaaacgccttacaccgttcaccctggtgaaaccaaaatgtaccgagatctaaagcaaaacttctggtggaagcggatgaaggttgacgtttctaagtacgtggtcgcctgtgaagtatgtcagcgcgtgaaggccgagcataagaggcctgcaggtttgctgaagccattggaaattctggagtggaagtgggagcatatcaccatggattttgtggtgggcttacctcgttctcctcggggcagggatgctatttgggtggtagtggatcgcttgactaagtctgcgcactttat

SEQ ID NO: 99967 - DNA, 533 bp, Zea Mays
gtagcacttgtcatgctcggttcttctgctgttcccttctccttcactccttctgccacctcctgctgtcctcagaatggtgttttcattgccttgtttgaagcaatagagaaatggagggaaactcgcaggaaagtatataggggggctcatgtctatgattaggatcagattaatcgaataattttatgcgtttggagatggattggatgataacaaaaatacttcttggtggcatgatactgcgttcggatactgctgcgttgttgtagtgttaggtacatggttcagtagcctctgtggggccttggatagcacatgaacagctaggtatgagagtgtaaaggttgggaggaggcatggacataggctggaaatgcctttggaattattgagagctcggggagacatggcccatgtggtgaatggaatgtgtgaaaggcagactggtcactcgtcattggagagagagagagagagagagagagatttgtcttgttgggttaaacagacggtattgcaatcattgtata

SEQ ID NO: 99968 - DNA, 324 bp, Zea Mays
caagaccttattgctcgctctggtctgactgataatcgtacagctgcaacacccatggatattcacttacaactttgttcgaatgatggttcaccactacaggatccatccagatatcgacatatagttggcagtctagtctatctcactatcgctcgaccggatattgctcatgttgttcatattctgagtcagtttgtctctacgcctacttcagtccattatggtcacttgcttcgtgtattaagatacttacggggaaccacatctcgaggcttattctatgattgtaatagtcctcttcggcttcatgcctactctgat

SEQ ID NO: 99969 - DNA, 568 bp, Zea Mays
gtgatttggtcttgaacgtaattagtgtatatgcccccccaagtagttcacgacgagaatgctgagagacttattctagaaagacttagatggcatgattagagatgcacctattagtgagaagttttcataatagaagaactggacctgcggggggtggtaagacagtctccaagtgttacattaagaatatcttctcatgcaggtcgagataacccctaaactcttgccctacctgtcggtgttaagtaccagcaacacactacggaggtgggcgcatagtgcttttctaaggtaggtgacgaggatcacaactcgatggcacgtgtagaacacgtcggagacacaagaaattgctcggacgctcgatggtacgtcctgtggtttccgtctgtgtgcggttgacttctctctggagtacaggggatgtctagtggaagaagatgagttctatgagtgtccatctcatttttgtagggtcccttcagcataattgccgactgaattggggttacagagaaactaccatgagtccacgatctccatgttccgcttgttctgtctctcg

SEQ ID NO: 99970 - DNA, 583 bp, Zea Mays
ataaaggcttactagctaatagccttgcatagctacagtaattaagataggaagtccagtctaaccagaaattcgagtgggggctcgccataacgtcggtctgtcgttgcaaattataacactattatgctcagaagatgtaacgagtaaagctggtggagatagtttgagccattgacgagtgaaattaaagataccgcagacagacgattgataagatcaaagcacaacacatgtgtacgttccacactgttccgttaccaacaatatctaacggttcgaagtacgatgaacagaccaaacgaatcatcacagagcagcagtgcaacttgctgccggtagtagttgtaggctacaacttgaccacagcactgtatatatatcactgctaccccgccagagacgtgtagttgggatggcgagcagtcaatccccgggccaacaagccggcatcagcatatgcgtgcatgatgattgaacgattgattgaatcctgggataagggcccaagcatgctattatatattattattgtgtcagtttgcccctttgtacggcatgtctccgaatcttttttgattcc

SEQ ID NO: 99971 - DNA, 279 bp, Zea Mays
atcgatgtgaagcaaagtcataaagaacatatgacttccagatctgaaaatcttgagttagatcataacacccctgtggttaagtggttcagatctaagtacttaggggcaagttagtaatgtttaatagccctataaataagggggatttttccaaccatcctcatctctccaacaattctttttatttttatccttgttaggttttctctccctctagtctattgttgagattcgcatatgatttaggcactacaatattcgttcatatgtgtaatc

SEQ ID NO: 99972 - DNA, 511 bp, Zea Mays
aagctcttgaaaacgacaacttcatccttcttcggctctgggattacctcttctccagcaaatcaaataagtttgctctcagcctctccaaaatagcccaatttcatcatcataggcatgtcatcttccatcacagtagatttttcaaattcaagatgactaggctttgttgggatcagaatgatatagtcttcttcactctcatcaacattttcaccctcaaccacagtttgtttagcttcggcattagaagcaccttcgtcagcaacctcctctgccacaaccagacctgatcgcttcattacttctgaaatcggtgttgtttcgacggcctcggttttgtcccccgcatgagacactctagcagttgatcgcactctggccatttcaatggtttcaccttttgacaaagttaaccttaaacgatgaagtgtttgctcgagagcacaatactaaaagcttcggctatggtccaattttttaacagcagaacagtgcaatggcaatgaat

SEQ ID NO: 99973 - DNA, 1389 bp, Zea Mays
cctggccgagccattcaggcccctcacgttccaacagagatttttttacggatccattgggaaacaatttaaacacaaccaacaaaatacacataaaagatcaaaccgacagagatgctaccacactctgcaggtcctctgggatggaccaatcggaaagagtcgccaaagctttaagttgcagatcagaaagccatttgttgaagaccttggcataatactcaagaatgttggaggacaacaactcaacctgttctgacctcaggagaccaagctcctttgtaattccaaatttgcctttattgacatatttaggagttgacacactctccaccccaacccctgcgacacgcctgctgcggtgagggagggcactacaagtaggggggtctggggcgacgcttcctcttctgcggcacaccaaggatagaatcgacgggctttgacatcctatcagcgaagcactaataaagcacatgaagaaaaaatcatctaaattgtgttgtcaaattggatccctcccggtctgagctcatctcaacagaccatgaagtttagatttgcacatataaccatatacatgacacaacttctagacaatgatttcacatacagaaaagagcatgcttacatccagtcagattttgactactgtgttgtacgttaatctctctgtttgagtaaagggcactgtttagataatctttgttaaaagaaaaggcgttcaccaagagcacatgaggattcataagtcgaacatgtttactcaatctttatttctttgtttcaatctcactaattcgtggatttatgcatgatcatattgcacatatatatatatctggtcccgtcctcgtgagccagcaaagactgatcgttcgctttcgacccggccgagtccactacgtgatgcttgacgccgcaccgggacaatcctcgtcgtggaccacggaacaccacgttttgtagcgttctggatctttccccaagcgagtcatgagttaacgggatcacggctaggcagcacaccaccatcgtttctagtggctgggcaggccagaggttgatgaaggagtgtgacagctcgcaatagcataattgcataaatatgcgtccggagacatagatgcctgtccatgatggatcgaactagcgttaggacattctactgcaacttaatcaattaactgaatacaatttcttattgtcagttctcgatttgttgtaaaactgtaaaatcaagtacttactgatcctaacactaaagtatttagcattaaaaaacaacaaatacagtcatatattcaatgaaagcagacaatatgttttctagggctaccaagtcagcaaactaaatcaagttaagcagcaaaactgatatgagagaac

SEQ ID NO: 99974 - DNA, 875 bp, Zea Mays
cgacaacatcttagccattttgaggaggcatgggactcatgccaccgttcgaagtcccaccgtagagggagttgtggcagcagggtccgtgttcggtcaatcggtgtggcctaagcatctcgtggtcgagacaaataacagtctcccaatagcctagctagacctcgcagagacatagtcgcaaggttgttgtgtcgatggatctttgtcaaggtccatgtctaaaggtgagtatcgtactctcccatccctaacttttgatccttttagtcccagtaattcgttgatgggttttcctgtttttaccagtgatggtgctggaggagcttgcgcgtgcggaggagcgtctctaggtccttagttgtgagcgctccaatctgtccacgaccatcgaccctgtatgcgaccaccttggggttttgcaggtaagtgtccgcccgtactcctcgaatggcacttgtctctggctacattcacgaactagaggccactgggtttcggcttggggtcctctatgcctcagtcgttgctcatcctctcgatgaggactcggtcaagcggggttgagcctgcctcggatgcaccatcagttggtcacatggcgagctcttaagacctgaaggcattggcgggacccattgcatggcgctctccctgtggtcgctcattttatgagttccctagagaaggaaaagtagagaaataagtttgttgtggggtactgtaaaagcaaggatatgtttaataaaagtcattagggtccttggcattgtgcttttcgttcgtcttcgctagcgaccgttctgtcgagacgggtgttcgcaagttttcggttccctcaagttccagtggtgaccattaccttagccttcgag

SEQ ID NO: 99975 - DNA, 682 bp, Zea Mays
cttgcccttcatcatgacccctatgttaccctacaacatgcataggcatacacctgatatggtgcattgtcccatccttcctggtatgcgggtcactgtagagactccggtgcttaagtccccaatggctagggttgactggccccataaggcagatgggatacaccatggatcgtatgcgatggtgtacggtcgtgttgatagggacctctcggcgcccattcgatatgccacacccatggtctggacgtggattggtggtgatgcgtcctatcatggctgatgtgggtcagtagtactggatcggggccttcgcctcactaatttgctcggtgaggacttgatctgtcgcttcgccttgcagggttgctcgatagggagttggtcggtagctccgccacgtaggtgtcggatatcataattaggggtacctagatcacaaccctaaagtgcctagacgattgagtaagaaggggtcataagaaaaacacgcttccgaccttactaacgcacgagggacccaagtcacaactcgccagaggctaactccgagcactatttcaaccacccagagcatggctacatgcaacatccgatcctggccttggcctcgggagaaatctctgccttgcccgagctcgaccttggccaaccgccccagcagatgcgcattaaatgccac

SEQ ID NO: 99976 - DNA, 402 bp, Zea Mays
gagtagtaaatgctatgatggacattgatcttcttcttggttgtcgtgtggatcttctgaacaagcgtgtcttctgccctgtatgtcagcttgagttgaccatggagacgagccctatatgctgacatatgtaggggttgaccctgctaacatgcatgggagttaatgcgaaggactcgagctcactgcacaagccaaactgctaatcatgctagaaccaccatgtgcaaggcgcagagacaagaacctgcctcagtatcacgcggcgtactatgcaagccatccacgcagtgctgacacacaactacctgcatcggtaacgcgtggagtagtcatttatgcctgtgcagcctgacaaaagtgtgcccataccctatgcgcagtagggcatgcctcagccgc

SEQ ID NO: 99977 - DNA, 519 bp, Zea Mays
gttgatcagcctcgtggccaggacgcgaggaggggcaacacgggaggtccagcccacaagaggggcaagtctcagcatcagcgccaccatccttaccgtggcagatcttccgatgcgggtacttcgggaggaagtactcagaggtttcgggctgttcctaagcccgggctggggctggtgtgtttccgctgtggtgatgcgcatcgccgtgcagagtgccagtggagtggcaggtgttctatctgcagtcaggaccacaaggatgtggtgtgtaggaggaatcctaatgggaagctcagatgggagccggtgacttcctcctcttctcagggcactatcaacatgatgtcaagtgctgagcagcagttttcagttcctcttcctccgcagcagctttttgtgcctgggacttctcagtttgtgctgatgcagggttttcctcagtatcaggccacgcctactcctacaccgtctactcctatgccgtctcagtttggagctccgcgtctgcctcacccg

SEQ ID NO: 99978 - DNA, 421 bp, Zea Mays
gaagccttcaataaatcttctgtagtgtcctgctaatccaagaaaactcctaatcttggacacatttgtgggttgtttccaatttagtatttcacttattttactggggtctaccttgattcctccattggtgataatatgacctaggaaagcaacttccttcacccaaaaatcacacttcgaaaatttcacatacaactgattgtcacgaagctcatgtagaactaatctcaaatgaccttcatgtgcttcttcattctaagagtatactagtatgtcgttaatgaataccactacaaactggtcaagatattccatgaatactttattcatcaagttcataaagtacgctggtgcattagtcagtccaaaagacatgactaaaaactcatatagtccatatcttgtagtgaaagttgtt

SEQ ID NO: 99979 - DNA, 740 bp, Zea Mays
ctcgtaaatatattttcataatatacctctttcatcatttaatcaatattgactctgggctagctaggagagtttttgatttacgataaaaataataattgcattatttttttgacaaagagagcatctacacgcataagagacgttactgaccttgtttcctccccctttcattcaacttggacttataaaacaagaaaaaagaagtgttttttttcatctctcaagtattgcaaatgtgtttgaatctctcaccaaattggtacttaattacaggtactactctattgatacattctagtactacctgatacactatcaccattagattttatcaaatgaatagctcatgttaattacaagcacttacaatttctattgtttatctctactatattaaagcaccagtttcaacggttgtcacacgtcatctttttacaaagaaccccttgtatttcttcaaaatcaatctgtggtaccagatcatatcctatccctatactatttgttcagcagcgttctcgtacatgtcgctctagcaacaaacctcatccatttcgcaacaacctccgcccgcttcttccgccgttgcatcgccacatgcgcgaggaggattagggcgcttgcctccggataaggatgctcactaggtgataaaagttgcatcgagtccagccaactctgaacctcctcgtcgccaaaagggaccgggagcccgtctcctagctcactcgtcttct

SEQ ID NO: 99980 - DNA, 541 bp, Zea Mays
ggggtgacgatcgtggggttatgtagatgcaagcactgtcgagcggcagcggccttgtgcatgagggtagtggcagaggtgttctcctattcaaggagaagggtggttgcctagtcacgagcgtgtgtgtttgtagcctccttgttcacaatttgagccgcgatgagcatgtcatcaatcttcttgaggacggtcgtggccttagcgtgggcaccctccttgatatttgatgaagtccccaccatgggtgctggagggagatgtgtgtgttgctacaacgacgcaacacaagggctgcaatagagggtcgacaaccaagggaggagcggaagcgatattagacctgtgataccatgttagaggatgtattgtcgtggaattagattgtattgcattgaggtttgtgggttgattatttacattgcataggactaacgccctatgttagtaggcaatgcaataaattcatatatatacacatatgcagcgttgggcgagcttagcccaactatggctataaggcccaatagggttgtgcgac

SEQ ID NO: 99981 - DNA, 452 bp, Zea Mays
ctctattgaatatccccttgcaaaggcttctaaaaggttgtttttggcctttgcatttcagttttcataatagatttaagctataactaggttagtggtatccttaggttttggaagcttttgtgtagtggatctaaagactcctatatcaatagcctcaaggtaagataccataagaattttccaatatataaaattgtcacactcaaagaaatgatgaggtccatccctgctgctaggcatcataactcgaagcgattaagcttgaaccaatgagcagaaggttgtggtaccaattgaaaggatcataatgcctaagaggggagtcgaatgagattctctatttttttttttttgccaaacataagtcataattgtaagcctgtaaaggatatgtaccagtggtatttacatacaactttgtaaaagaagaccacgacgtctgggcccac

SEQ ID NO: 99982 - DNA, 783 bp, Zea Mays
gtgccacttcatggagcggatgcagcacagttggctaggtaccactttctttccaagcatagtatctcttttgttcttgtcaaatcattttagttcacttggtgtttttttttgtttagaatatcttggaacaaagtgcaacacttgtgtgcagcctggttagtgtgtctccctgttttatggggcctaattttagacgcgatgtagtgtttaccaatgaggttttcattttgcacactggtttctacacagctaataatttgcataatttactaaataggaactcggccatgaacaattaatttgagtgctactttaacccttctatcaagaaacataacgttttgagcagaaactaattatgtggtgagccctccctgtcctcgtgctaagcccagttatgtagccaaaagctgggattagatccactcagctaaccccgatcgttgtcatcagttttccccctctctccaaggcttcgagtcgagctgctaatgcggtgccctgtcctttctatcttcccctcaagtccatggccacgattcccctgacatatgattatgatggggggggggcaagaacgatcggcgttgatggtgcagtgcatgcaccatcaccttcatgaaacctaaatatagttaccaccgtgcttgttttgtcgtgccgtatgatctcgacctttcagggcactgaaatatgtactgctggctggctggctcatcgccatgccttgcttttattatgttaatgttttgtttggaacacgaaaaatatccacacaca

SEQ ID NO: 99983 - DNA, 381 bp, Zea Mays
cgttggatctcagatgcacgtgtgagattaaaactagagacaccccttcgtcaatttaaatctgagccatcggattttaatcatgtggctcggggtagatcagatcatgggcattcgtgaaccgtagaatctagatcctgtggacgatgctacgtaccgattcgtaatcccgctcatctaatcttgcgcgcacaaaccgaatcgggcggtgcagatcgtcccgtaccccttcggttgacccattttgcaaaagaagccccaggattctagaaaaccaacccgccgtcccatgcactgtttgctgtgtctcggaaattttgcgtggtcgcccctgcattctctggattttatgcgcgcagtccaggaattaaagaaaacagg

SEQ ID NO: 99984 - DNA, 362 bp, Zea Mays
aaccaagagaatttcaggagtagattaattggtctagctacattaaggttatatgggatggataacatcattcatcacccgtgtccattttctacaataagttatcctacagagaattttgaagcaaaacataaatacttcaggtttgtttttccaagcactgttcctgcttcagaagggctggtgcaacccacaatgccatcaccatgggttttaagttgttgcctaggcatctagtcgcgaagtctaggcgtcagcacacaattttctgtctgaaagaggacgatgaagtagggcgtgggagtttcgcgcgctggggagatcaactggagttgtgtgctagcaggaaattgcacgactac

SEQ ID NO: 99985 - DNA, 408 bp, Zea Mays
ttgatgacattattgtaaaaagtacgaagcaacaagattacatttcagatcttcagtaaagcattgctaatttccaaaaggcaggtctaaagttgaaccatgagaaatgtgtcttcggagtaaaaaaaggcaagttcctaggttgtcttgtgtcaacaaaaggaatagaagcaaacccaagcaaaatataagaaatacttcggatggagccaccaaagtcaagaaaagggtctcagaggttagcagggagactagcttctttaaacagattcttaacaagatctgttgaacaaagcttgacgttctcagtagaaaattttcaatgccccccttagcaacaagcctttgaagaattgaaggactatctaataaatctaatgacattttctccaccttcgctaggggctc

SEQ ID NO: 99986 - DNA, 406 bp, Zea Mays
taattcagttggggtaaaagtttagtccgataggatttgtccgaatctaaggattgaaataagggggatagatttccccgctagcctagtagtaatgggaactcaagggttaaatgtcatcctagggatgaattggctacacagaaatcaagccactgtcagttgtgacaagaggacagtcaagttggtgtccccattcggaaaggaagtggtatccaagctgtacttacctaaactagaagaaggagcctgtcaccatttatcagtagatgacaaggagtccaatccaattgaggcaattaggattgtgtcagaattccccgatgtattccctgaggagttaccaggcatgccacctgaaaggaaagttgaatttgccatagagcttatcccaggcactacccct

SEQ ID NO: 99987 - DNA, 505 bp, Zea Mays
cgggtaactagaatgtagaataagatgttgaaggatatggcataaaatcggcaatgtacaaaagtgcataaatattatatactttgtggcgtaaaatgttgagtcattgtgcgtaagtattgtgttagggaaattagttttatatgtacatcgctagaatatcgggacggtttcggaaataatggaaataccctagaaacgtggatgcggttacttgtatagtatccgtgatttcctttcatcggaaaaaacaccacaaagcctacataactatttggaggtggagatggccggctctggagagtcgccggcgatggtaggaggtggcgttcatcttgatctagagacagagggaggagttgatggaaactcactggtcacaccacctcctgctctactgggtcctgtaatcgacgagatgagcataggggaagaaggagaacaaagggtccgacctcctatgtccaatattagctccatggagatggatacgcctcaaatactg

SEQ ID NO: 99988 - DNA, 636 bp, Zea Mays
tgcttgtttgttttcccgagattactctttgaatcactcctgtaatgaccatgcagccacaacagagttaatttacttctagtggtgaagaagtaaaatgtggcttagaagcacatgagcttcactaacttgtaacaaaacagtagcagagtagaacaagtatcaccttccagaacttagccaaacttgagttgccccaccaccattgtaacggtaacggtaaatgtattctgcttcttgtttttttagttcttgttctgttagtccaccaattgtaccatacattaaactatcgagattaacttctttgtttcgaggatccattctaacctgccaaggaaaatatgtaccatgttagttacaaatctcaaaagaacaagaaaggaagacgaagatgaagagcactagttttgtccttagtaaagtcaggattgtggagctcgaatcaaaatcttttaagattcagctctagatatttcccagatgttagaaaaagtaaggcagctgaaaggactatctaaatgtcctttgagaacaaattagtttcaatagaggaaattactatagactttaatctgtaaaaggtgagagcttcacctcttattaaggatacatttcccctctggtggatttttt

SEQ ID NO: 99989 - DNA, 349 bp, Zea Mays
ccggagcgtaataccctacctccacagtgtgtaagtagtattgagtgtgcagagcgtgtgattgagtctgtcccttgtaacgttgtgtgccttcccttttatagtttaagggaggcacatacaaggatgctgagccccgacatgcaggcccaggagcataatggaagaaatacattatgtggataactaatgctgacagagtaacgcatgagtaatcagcgagagtcaagatgtccgcagtccatgctgcattaatgggcagttaccgtacgagtaatggtgagtcattgcccttgatatggtaacgcgtgagtaactgcacggcccacgtatcgtggactgagcacgc

SEQ ID NO: 99990 - DNA, 417 bp, Zea Mays
ccaggtcaggtctgcctctgtggcctgcgggctgaaccgccgagtgccgacgagacgggagtaagatacagaggcagtgagcttgccgcaatctccaatatttctaagagcatcaccaacagactggctaaacagactgtgcttggtaaagaaatggatttcctgtcctataagtctgacaggtttttgtccatgcgaattcagggttgtagtagtggaaaacacataccattgctaatttttggttaaacatgtgcatttgctgtgtaaaatccactctgcactgtccaaataggtgattaatgcaacttttaggatagcacatgtgtagctattcagtagcaggtgtagttgtctacacgtaattttcgtagttgtatcctatgtgctaggataataaatccaatgttatttgtt

SEQ ID NO: 99991 - DNA, 631 bp, Zea Mays
cccccccaaaaagcccatatttatgatcaatggcacagaaaatatacacaatatcatcatgcacattcacacatcaatcacatccatccagggcctcaatcacatccatcgacacacatatatataagaacattcatccacattcatccacataagaagtgttcatccacataagaagtgttcatccacataagaagtgttcattactgaaaaggtagagatcgaagtgttcattactgaaaaggtagagatcaaagcacattaacgaacttccgcggctagggttgttggagctttggccactgcctgcgtccggagttgggtacgcgaatagggagttgacgaagccatccatcgttccacttccttcctgattgtcctatggagcgagaatgcaatttgtcagaaatcgtacatattaactgttgaactgtcggcgatagctatagagttagaatacaaacctgtgctccaggggcaggtagctgtgccggcggtgtgctaaactgaggctgctgcggcacaagtccctattgaatacaagaataatacatattcatgtgagtgcagtgcggcacaagtcgtcgtttttactatgtaactagagaatggacatagaatttcttaccgg

SEQ ID NO: 99992 - DNA, 603 bp, Zea Mays
tatcacaaaccagcctccgattgtaccatcctttgcttgtatttcgtcagacacttgtaagagcttggtaagatacattacaacgtgttcctatgttccacctgagaggagcgtgtagtgaaattattagggataaccgtcaccgtttgtttcctgtttttgtgtttcgatggcaggcgacgaagaagaagcaaggatccctatagacttcaatgaatgtgttagccgccaagatcttgaggcaaacaacaagctcctaaaggagcaaatggaggagacggtctacaagtcagtgcatgatgccttcattaacatggaccttggcaggacttacgagaggctggatcgacgattgtccgagattgtcgacagacttgctgtgctggagacgcaacaacaagcactgccaccaccacctcctcgtccacgtcttcccgatgatgcggtgtttgatgaagaaggtaattatgatgaagcgaccaccagagatttgcgcctttgtcgccgtcttcatcaaaacacagaaggtatgccacaccaacaccgccagcaaggtaataacaatcgtgctcctgacgacccttatgctaagattaaattttc

SEQ ID NO: 99993 - DNA, 440 bp, Zea Mays
atttggtatcccaaacttgaatattatatcttgtatgaattccactgccttggctgaagttagagaagcgatgggtttgtattctatccatttggtgaatttgtctatggcgaccaacacatgagtgtagcctccctgagctttcttgaaaggtccaatcatgtccagtccccagcacacaaatggccacgttatgggtatggtctgcagttgttgtgctggtaaatgctgctgttttgataagaattggcaagcttcacatctctggactaactcgactgcatcactctttgccgtcggccagtaaaaaccagacctgaagaccttcccaaccagagttctggatgctgcgtgtatcctgcactgtccggcgtgaacctcatctagcagttgcttcccagtaaccaaaggaatgcacttcatgaggactcctgttgcac

SEQ ID NO: 99994 - DNA, 483 bp, Zea Mays
atatgtagcaatatttagccaaggccgaaaaaatgtatttcaatggaaaacttttgtgttttattttttatttgtcgccccctctttggcccttaagcttttatgttgtgattgacaactttgatttaagagaaatagattcaacgagaagacaatacacctgggcaaattcccttcctaaaccgacttatgaaaagctagatagagctctcatgtcgagtgaagtgtgaatttaaatacccctagtctcggttcaagccctagacagaggtgttttcgaccccacctctttgctcatggacactagaactcctgctttcgttggaagcaacaaacaatttaagtttgaactacattggttttaacaggagagttttcgcaaatgggttaaggaaatttggactaaaacaaattaaggtcgtaattccgtacaaagctagaacaacaaactgagcactttgtggaggttcctaagaggatggg

SEQ ID NO: 99995 - DNA, 1492 bp, Zea Mays
acaggccaggcatactcgagggagtaagtaaaaggttcaataaaaacacggcagaagatctctatgagctaatttgggaaacacatgatgctaatacgcaagttgtcttcatgcaggagttataagaagacatgctgttgtgtctgaaatcgcttgtcgatgcagttgtaatgcatataagaagagcgttagagtctaaatcgaccacactattttttgttacaaagtgctgacaatagaaccgaacatctaaatgtgaagtccgttcaatactcaatgcactgcataagaagaggattcaaacctaaatccccccccccacaaaaaagatattgtagcatgaccttatctaaaatgaaagcattaattgcgaagtagataaagctgacatttaagcgaagcataacatgcagccgactaatgataccttaatagaaacggaataatacaagagatagttacctcgtcgttgcagtccttaagaagaggtattactcaacgtgtttcgaaaggcaagctgcaatgaaaatgggtgtagcggaggaacacattaaaccatcagaaagatttttttatttaatagtgaaacccagaagactgacaagatcactcgtaggcgctttgtaatgtacgaaaaaatttcttagactccgagaaagcaaaacgtaaacctttgagtatacagtaacatctggaaaattgtacaggcgatagacgcaaatttataaacgatttgtgatggaagtcaatgattgtttagcgaaaactcaaactctaaaatagagatagcgaataaactgtaaatcaaagtgtggccggtcataaaaacaggaaccctaaaacgaaggaggcgtcaaaaaaaatggcggtgcgcggctggtcaaaaaacaggaaccctaaaacgaaggagccgtcaaaaaaatggcgatgaaccggatcagcagctatgtctagtgcacaacagagaagggagcgtggatgagaagtacctgtaggtcgtggcggcacaggacgctaggacgaacaggcggcggagcgggcggtgctgtccatgtcgtccaggcaaaggttgagcgcggtggactggtgggcaaaaaacaatgaatacggatgaagtttctagagccgtatggaatgggaaaaggcaccagagctccgacggcttgtagcatttgggcagacagggaccgtagatgaaaaatcggacggtgcataaataaagacatgacgtggatagcctaatcacacccgttttgaaccgtgtttgtaaataaggaaatatccggtgatgtgccacgcgaacaaggagggcaggcggcagcaagtgagcgactgagcgttagctctgaagacacagtacgttcctaaaaaactagattatttttcatcacgtttgttctctaacaaattagttaaaccgcacattctatgtcaatccaaagactaaagtaggcttgatattcctaattcttagacatcataaacatatccc

SEQ ID NO: 99996 - DNA, 383 bp, Zea Mays
gtttgtttctactataaggttttggctctatagcactatgacataatcattgcgatggattggctctcgtctaataatcctatgattgtgcattaggctgataagtggttgacactttccaaggacgaagtctttgtcaagttgtatggtgtcaagacttctaatcgtggggcttttgttcaactttgcaacattgttgacttaactgatgaagataggttggttgccaggatcttcccctggagttgagcatctcattgacaagtattctatggtgtttgcacttcctcatgggctgccacctacacgagattgtgaccatcaaatttcactaattttgggggctcgaccggtgcaaatgtgaccatatcgatacactcttg

SEQ ID NO: 99997 - DNA, 861 bp, Zea Mays
cctgcctttccataagaagctccttattttgtcaatagctttgatgcaccatttagggacattgaacgcaattagcaaatacaccggaatagactcatttctaaaccactataaaaactttggtttgctaccctttcataacctcctaattgacatcctagattcattcttttactaactttcctcatctgtgcctgccattttattggcaaatttatctatgcttatagcaaagtgggcaatgaatcttataatttcttagatttagtgtgtgtttgggtggggtgggtaatcaatggggcccattatcctcacccaccatctgttgcggaccaatcctttcacgagacttaaaatcatccctctctacttctgtttctcgccgcagcctctcattccttcttctcaagcacattcagatccggcagactggccatggcagcacacagagaaggtgccaaggtcatacgtgctagcagcctagcagaggtgggatgcagaaatttttttttgggggcactgctggcgttgtgatctggatctatctgcagccatagtgcgtggaaaccaccaaagcggctttgcatctgtatgcagccattgattcctggcttctttttcagttctgttgcataggtgaggggaacaaagcagtcatgattctctttgtgaatagaacagatgtggggatggatcaggtttatgcctcttcatgtggagttgccgatcgtttgtttcttgcattactttctattgtcagctagttgattcatgcattttccacaattacttgcctaatcttctcttgcttagttaaattcctttctcctggtagagatctttcctctttggtcaatgttt

SEQ ID NO: 99998 - DNA, 976 bp, Zea Mays
gggtcaaccggatatcatcataaagttgtgcagtggaacaggataatcgaggaagctatagctaacagtactttggacccaatattaaaagatatctatgagcgagctattcgttggatcttaggtcgggcaggtttgagtgaggacgacaaacttttgcatctagaattggtaggcgaagtttcaaaaaaaatttaagaatatgcagaaaagagaaagaagggcgaatttaagcctcggagggagaatgacatactaactgcagcactaggcaatcctgaacacactagacgggctcggggaatctcttctaagatttcttggagagaggcgtatccagagtatgcagcgtcatataggaaacacgagaagtcgaaaaggacccttgaagagagtattgatgaaagggtacaaaaggctattaatgacgtgatgaacaaaatgaagaaaacacaatgcatatcatgtgaactcaagccaagccacatgagtccacctctagtccctagcagcgtaggatctgtgcaagacttcgtatcgggcaccaagtaccctgtagacgatattgttgaggacaagccttgctttcttcatattccaatcaatcgatctgggacaaaaacaaaacatgttgctactggttggtaaaactaggacctgttaactacaaagataatcctgtcccgccacactatgttgtggtccaagttctagagatcacatacagtggttatgaagattgggagatagactttccagttgaggggatcataactttgcacgatgcaatgaacgagttggtcctttgtcatcgacgcgacatcaagttgggtgatgagccgatcttaagccgtgtatcgcgtcataagtcaccaacgccgaattcaacaccaatgcaacagaaagatagttcgatcattccataccccatggtgcagggaaatatagcaccgacctccacaaaaatcgttgaaac

SEQ ID NO: 99999 - DNA, 684 bp, Zea Mays
tgaatctcttatcttttttcttccacacatttatgctttctttgctactcaccgggagagtcgagctcttaaccaccacttacctaaagctaggcctatttttctagcataactcgtacctgaactcaaacttgtgaagagataaggtgtcagttgaaaggagtagaggcacatgattagataaatatctgttcaatcccctaaccacctgactataattcagatcccactcaggactcactagaaatctatatattttttcaaaggtgggattagacctgtagtttgaccaggtatagagcctatctaacaaatccaattccatcaagccatattggtcaatgatcgcattaaagatgaaaccccacctttccaaagtaaaaggctttttcttatctttatagcttcttaaaatttttaagtcaccacacaaaataaaggggtctctacatctagcacaacaagttgccagatcggcaagaaatctaactttacaattagcctgagcaactccatatacattcactaaagaccagataatgtttttacttttatgcctgactaaataactaatcatgaactcacttatacaggaactaataatatcaaaagaatttcagtcaaaaccaactaataaaccgcccgatgtaccattaggaggagccaaaatccactcaaatttcc

SEQ ID NO: 100000 - DNA, 610 bp, Zea Mays
ctaaaactgaacctttgggttcgaatgatttgcaagaagttgcaaaattaactgccatgtgcatttactatgaggtgtcactcaaattaatcctatgtggaagtgccagaaagagtggttaaatagaacaccactaaactccctattgcaacgttgttgtaaataagagggggagaagtatggtcacaaattgggattaagatgcttgcaagcagctgaaggctaggccttctgagatagtaaatgcagaccaactattcgttggtaaccaacctagtgttggtagacacctagaggatatggattatcctgtgaatggaagacattcacaacctagctcagtgcgcactgatgaggctaggttatcggaagcccttgattctcgttttgggatttcacgaggaatcataagggtacataaaaaatgactttatgtcaactggagaattgtgttatttaaaagctacaagtgtcgacacatacatctcagcaattgtatatgcactccaagtgatccaaaatactatggccatagcagagcacgagtatgctcaaattggatcttattgagtgatacaatgttgcagagatagccttgctcaccagaaag

SEQ ID NO: 100001 - DNA, 422 bp, Zea Mays
attccccccactgactctgtaacgccgactgttcttccgaatcaatgggactttctcttcttcttcttcgtcctcgtcaacaatacggacaataaacggcgcagggtcacacccattaggattggctctggtagggtcacacccattgagatcagctcttgcagggtcacacccattgggatcagctctagctgggtcacacccattgggtttagctctggaagggtcacacccattgggatcagcattagcagggtcacacccattgggttcagctccagtaaagatttccaccggtacttcttcagcagcaggagtagaagggccagcaccctggtctagacatgatactcaccgaagccgtctcttcttcttcttcccctcggcaggtacagttggatgactaacctggcggagacgtt

SEQ ID NO: 100002 - DNA, 352 bp, Zea Mays
agtatatttatgaccttgatacatacacattatcctaatacaagcatcagggactaacaggtcttttcctctctggctcaatatcacacctgatcttcgtaaccatcttgggctgaagctatagaccttcgacattttatgcatgtctgctgcagtttcgacgctcagtccttttggttgcagacgatttcttcatcctgaggaccttcgacagagaaggagacccctaacactgatggccgcactacgaaccatggcgattggagatgtacgaccgcaggaaccacaagaacaagatcaaccttcttcaactatggcgcaatccctactcaagataaggaataggtacctc

SEQ ID NO: 100003 - DNA, 422 bp, Zea Mays
gtttgtcaagctgtaaaaagaattgatccctatggctgctaagaaaaacaatagtgatacctgtgtgcggtgggtcatcattatgagaaatccgagttacagatcattgatccctagagtaaactaaacagtatcatttctaccgagtctaagaccatctgcaaggtacttaattgggtggagttttgtttgagtctgtcaaaccctctgacaacagagacatgcgacgagaccagtttgtcaagctgtaaaaacaacagtgatccatatttatagcaataaagtaataaataaactattacatagttacattggtaggaccgatcatacctgtgtgctgatggccatcattatgagaaattcgagttacagatcattgatccctagagtaaactgaacagtatcaacctgaccatatgaca

SEQ ID NO: 100004 - DNA, 590 bp, Zea Mays
tcccttctgttttctctctttttcactcttggtgctgcctccactctctcccacccctctgtgcacttcttcaaattcttgtcaaatccagtgaatgaagtgaatccaagtggttagatgtgttctatgtgtctcttgaatacccctgcaggttcctagttcccttggggagggtttcacaacctaaattgaccatttctccaaaaccctaaaacactgcatgccacgtgctcggtgaaatgcccaaaccagccaaaattgctccgattgcacccaaatttttcaggcaccttcacaatacctccagtaacatattcgccaaatttcacgccaatctgatatcccagacttcaattttacacaatttcctatttcgagcgatcaattccgagccgagtgcccaaattccattttcttcgcctcaaatcaaaccaagcgcacacttcactcatatttacccatataaacctattcatgaagtatcggctcaattccaaatcatttcatgcctcattttcaatttcaaacctcctatggcactatttcacgttcaaacgctgttttcgcgtcgtttgacctctcgatcgcca

SEQ ID NO: 100005 - DNA, 689 bp, Zea Mays
gtacgaccatcctcttccaccgcatttttcttgaatctcaaattccttgctgttaggtttgctcctttcctgccagttcgtgtgcgccgatgcgattatagcgggtcgatgagtaaccgtcgcaacctttgtcttgagaaatttgcagggcacaggtcccgccatggggaaactgttgttaccttatcgcaatctgtggggcggtccgcacgggacggtcacgggggatgtccagatgtttctcctctctcctccatgcaccctcctgcctccctctcactttttcgtcctcaattgcggtccctgtcggttataggttgaagttggagcatatgctgaggaccgtgagggcatcagttacggattggagttgcatcgtatgatgaggacatctaccatgggggttgtttctcatccctctcctgtgccccctccctcagaccctcacgcttcttcgtacttaggttgcagcccctgctggtgatggacgcccccaagttcctccatagaagacgacgaaaggccgctcccctcccgctttcagatgcaacaatgcaaaaggggattcaccctttaattttctgctcctctccccaaacccaacccgcctaccccactatccagttgcagtccaacttccctgtcttttctttgctatgcttgcgaccacatctccttgatgtattcct

SEQ ID NO: 100006 - DNA, 271 bp, Zea Mays
atgatccgaaccaggtattacaaggcacaagaaagtaaattcatatttcatgcaaagagctggcggaaggttgtatggaacagcaaagacgggacaacatgagtaggacgatgcagttagattgaaaggagagaaaccatatgttgccaaatcgaagcggacattccgcacttcatatgcacacctggaatcaaaggaatctagtgccttccatgcatcagtatcagctaggtgcgccataacatctggattctcacgtaccccttctttg

SEQ ID NO: 100007 - DNA, 569 bp, Zea Mays
cccgccgcaagagtcggagctgccgaaggtgtcaaaaattcctgcaacaactccaaaaaggaggagaatggccagcgtactagacgctgttatgaaatcttcaaaagtatgaacccctgcttcagcgcttgatggaaatggtgaaaccccaaagaaatctagtgaagctggcataacactagatactgccgaagctggtccatcaactcctattgaggcatatgcttcaggagctattcctctaaccttggaaaaagaaagttcgcccaagaaagttaattctcctgctcccgaagtatctgttgaagagttggaatttatcgtgcgacatgcttgagggaagcagctgccgaaagagcagattgtcgaagctaaacaatacgccagggatctaaagtacccagagagatcctctgtatacaatggcactgatggagacgactttttatattgccttctggacaataaggagatatctgtctgccgggagatggcagatagtataggatatccgaagcatgagctcggcctgtctgtaatgtcgaaggatcaacttgcagacagccttg

SEQ ID NO: 100008 - DNA, 461 bp, Zea Mays
ctggaaggctcacacaagaggtgacgatccaggcaggacgagagacagcacacggtcaagcaaggtcactgaaatgacagaagaggtgagcacgtattagtcacatagtcataagcatatgaaatgtgaataaatacatacacagagagatatggcacgagacgggacgatcaagaagtcaaacgacgtgaaaacgacgtttgacagacaaatagtgacataggatgattggaattcgaattgaggcacgaaatgatatgggattgagccgatacttcacgaataggtttatataggtcaatatgagtgaagtgtgtgcttggtttgaatttaggcgaagaaatagggatttgggcactcggctcggaaacgatcgcgcaaaacgggaattttggtaaaatttaagcctgggatctcggattggcgtgaaatttggcaaggaggttactggaagtgttgtg

SEQ ID NO: 100009 - DNA, 1565 bp, Zea Mays
cagaaagaagctgaaaaggaggcaactcaggacaaaactcctgtaaagtcaaaaaatgggaatgcagataaatcaccaagatcaccatcaaccttcaaatgatatacggcaaaagttcacatgatcatcatttcttcctcaaagaatgtctgccttttctggcctcggcacaatttcacaagcatcaatagtaatgcaaatccataataccatgtggacaactcatgcagtcatgcttacaagacaaggtaacaaatgatctatttcatatatgtgtaatgttctgttgtaacaggcgaaatatgtatacttgccagtaccactcttaacatatattcactgccctttttccagatgcttttggttcaacatccatgcatgtatctcatgacactgtacaaagctcaccccacacaaacttaggttcttctgtacaaaatccacactagatctttctttttccccccttctgtttatactagcaccaggagtagctcattgtttgtaaactagaaataggagtgtaggcagtgatcagtagtaggtcagaagcaatagaaaaggattagtgctaccacaggcaggttctaaccaggtaaaggtgagtatatagccatgtgcccatgatctttgaattcttgactagagcaaagtgtttgtgcgtgacgtcctgccacaagtatctcgagatcaattaaatcttggtcaaaatgtgagcttcagtgtttcgctccatgatttgtcaagggaaaaatggtcacctgttgcttttgcattctcattttctgcacctcctataatcgatgttatggttttgatgacactaatttctgttgtagaaaaatagaaagcagttcctacaggagttgagagaaattcacgatgcttgtcagggaccttgggatgttcttgggaattttaaccttatatacaaagatgaagacaagaatgatgggcagatttcgaaagtttattaatgatttagccttgagggacattcctttacagggtcggagtttcacttggtcaaatctgcaagctgatccggtgttggtaaggcttgacagttgagtgggagcagctgtttccaaactgccttctgcagagtgcagcctcggaggactctgaccactgtcttctgttgctcgggctggatgatattaagcctggaaaacctcgatttcacttcgaatccttttggccaaaaatcgaaggcttcatgcatactgttgaggaagcttggaactcggttctaggatcctcctgcccttttgatgttttgtccaggaaactcaaatccactgcaagaaagcttcagaattggagccacagagtttcttcatctactggaaattgctcaagactctcggactttgtccaacgaggaagcatggctgcacaataatatcaagaaacattgccttgccctctcctctcaagcgtattgcgaggagccgctctaggatcagctggctgggtgagggcgatgccaacacagctctgtttcatgttcatgctaggaaccatagaggaaaaactttattatgagattatgtgaggcgggt

SEQ ID NO: 100010 - DNA, 644 bp, Zea Mays
gccggagagccgccacggtgaaagccactaatctcgtgcgccagtgactcctttcttctccgaccgccaccgcgcccaacccaaattcacgcgccaccgctcaagcactctataaattgagcacaccgacgggtccgtagggtaggcacgcaccaagccaccaagccgtgcctccaattgttcaccagagctcgccaattccaaatttcccccaaatctgctttgcgccaccatgaaagagacctcgccgtggctagctcgtctcaggtccgctcataccctctgccctttcgtttcagtgttctggtgtatccctgatgctccccgaccccgccaattggacttggaccccttagatcgccgggaacgcgttcgattgtccgttgtgcccgctgccaccgtggacagagcaagttagagctccgctagtgaaattagttgaggggaaactcttgttaaggcttgaattaggttccagccgaaggagagcaccagtcatcgcgtgtcctggccagtgcaagctggccgaagctcggttccccgccgttcgccgtcgtggactgcggaatgtaaagaggtgaaagcgcgggggtgtttctgcaagtgtcagcgagacagaggaatagtgggaaggactctttata

SEQ ID NO: 100011 - DNA, 517 bp, Zea Mays
tcactggctggtccgagtccgagacagatactagacttcaaagagaacaactatactaatgcatcttacataacggcggtcacggtgtgcagaaactgatcagtatcctgctgcccgggcgacgcttatttctcagaaaaacctagctagctagctagaccaatcattccccgagccgattctttctcctccgaaccctctctgcggcggcttcgtcatgtggccggggcgagcggctcgagcggtggcagccgacggcgcgacgattaggccgccggttcttctcctgcgaaatatagtggaggtttagattcgtttatagacgagatctaacagtttcttataagtttgttagaataatccatgcacgagataaaaacttcagtccaaattaatctaaccgtggactgtccgagttattcttgtggaccgttcgggtcacaagactggccactgtttaaccgttcaggtgccaaatttgatgtttagcacaaactgaatcaaggtcaaatctggg

SEQ ID NO: 100012 - DNA, 677 bp, Zea Mays
cggcgattgtgaggtcagttatcagtcattgaagagcaagttggtggacacccctatcctagctttgcttgagagcggtaagcgtttcacagtttatacggatgcttcgcgtattggtcttggctgtgtgctgatgcaggaaggcagagtgattgcttatggctcaaggcagttgaggaagcatgaggggaattatccaactcatgatctggaattggccgcggtggtttttgctctaaagtcgtggaggcattacctttatggcgaggcttgtgacattttcaccgatcacaaaagtctcaagtatatttttactcagaaggagctgaatttgcggcagcgttggtggctagaattgattaaagactatgatttgtccattcattatcacccggggaaggctaatgtggtggcggatgcccttagcaggtccggggttccaaaggtggccttgccattgatcgctgatctggaccgtttggggatcgatttgtgttatgtcagcaccactagcgaggagactcagatgcttattcaatcctctctcatggagagggtgcgtgcggctcagcagcaggatcgtcttttgcaggaagctcgaaagagggttggtgatgttaaaccgcgggagttcaccattgatgagaatgatttggtttgtttcaggggccttcttt

SEQ ID NO: 100013 - DNA, 879 bp, Zea Mays
tggaaactctgcaatacttcagaaattttgggatcaacatcccccattgccgagtcgctgtccatagcatgcaataaatagaccacatggaacaagtctggactgtctgtatattgatatttgccttgaagtaccacggtatggcccttgtagggaattgacaaccatttttctgtccaattaattttcatgggactaaattgttcaagccagtccatgcccaacactgcatcataagtctttaggggaaacacccgaaaatcagtaaagaatgtgtagccctgaactgaccatgaaatggagctgaaaaattgggaacaagaaacattgcctccatcggccacttggactgtcacaggatgaggtagaggagatataccagagagctgctcagctaatgttgagctaacaaatgaatgtgagctgcctgaatctactaacagaacaataggatgcccttggcattcgcccgagaattgtatagtccggcgcgaaggaatccctgaaactgctgacagtgagagagacagtagctcgcctggtggtgagagcccagtatccacttcgttagtgcttgacttgtcttcaattaattcccacaattcttccagggcatgaagttggactgttggtgcacaacgatgtcccgacacccatttgtcagcacaccggtcgcataacccacgagctctgcgataagccttcaatgatgcaagtttatcatccatctgacgagagcgaggcagggaattcagcttgccagaatcagccaccaacgcttcaggttgtgggggtcggggcaggggcagcggagaataagctggtcttgtggaagaagtggatataaacttgcgatgatctgctcgccccggctccgag

SEQ ID NO: 100014 - DNA, 547 bp, Zea Mays
gctgcacctccgattttgttccttgaaccaggaggtcgtcctctcttgcgtccagctaggttagccaatcgaaccctattatcctctatagttaaacacgtacgactgttgtgaccatcagcgatgccacatttttggcacttcctgctcatcttcttagctcctttcgtgcccaatttaagaacttgttgctcactacttttgatagttcttccctctggcttggccttatctggtcttgctaagtttacaccttccctttgaaactccagtttctacaaatcaaagatattaagttagttttcatttttcacatactaatcatatattatagcaatgttattacctttctagcttcaacatccgtagcactactatcaaccagacgcatatgagtgttatgttccaatgttaatatcggtatattacattggacatcgttagtattgcattcatttgtattagaccccattacaatttcctgtgaaataacacaaaaccagtgaagacacaaatgctaaatagcaacataaataatacattataa

SEQ ID NO: 100015 - DNA, 878 bp, Zea Mays
tttagggagcattgatatgaatggttagatttcatcgaagcgaaatgtaatgaaggaaaccagaggctgaagatttgcatcgggcttttgtagcacgaaaaactatcggcttcttctatcctggctaccctgacatgattcaggattcgaagaagaggaagaagaagaaggtgagcatgaagcagagcaaaattccaaagataaaacatggatcaacaatttctcaagctccagaggagattctggtatatagtgaactttagaaatttgttattctaccgagataccaaagtgttaatttatgttatttttaactttttaaggctgcgaagctaggacgccggccatgactgaggaaattcccttggttggtgcaattttgggggccctggaacctattgcttcaaaagcctaagaaatgaagatcgaggatgccattgctatgattgcataaggagttactcctctaaaactgctctcagatggtgaagaagaagaagaagaacgaatagctccggtaacgagctcataattcgatgtggacgaagaggagttcaaggaaaaagatactgccagcacaaccttggcgcctactgtgatgtggcgatatcaggaagtccgaaggttgaaatgatgcctgcagtagtaacaccttgaacaatcataatggccaaggatatagtagttcttcaaaggctatgctggcagaggataagggtaaagggctcgaaaaatttgaagaggccaataaagctatcgaagatgacacgccgcttggtgaggggccttttaattaagagctgggggtcaaagatatagagttcatcacgctgctgggaagattatgggtgccaaacagctagccaaagccattggtt

SEQ ID NO: 100016 - DNA, 553 bp, Zea Mays
cggaggatgaactccggcgagtgcatagaccggccgagttgggctatgaccggtgcctagctttggcgtaaaccaaattcactacctgaagagcgtttcccctaatttaattgcatgaaagatcaaatgttttgctctggccacggtgaccgtgaatcatgcgggcagatgattgtgttcccggcaatatacaaggttctaacttaattaaacgggtcagtgatcatccatagcaagtaagaatgtcaaaacaagcacgcagaggacaagtgtggacctgaattgggctggccgcggcgaggcttgtttcacggtggcgaagaacgaagttgggggaaatgagcaattctctggctaggggggttaatcggagacgggagtgggtgctacagcttcacgagtataaggcgcaactatccccgccctcaatttataggcttcaagggcggcggctctcaatttgaccgcgatgtgttggcggccggagacggggaagaagcctggcgcgcgcggttacgtgtccctagccgtggcgggctcatcggcgatgatg

SEQ ID NO: 100017 - DNA, 478 bp, Zea Mays
ggcggatccagtccttgaagttgggcttctacggctgcaatcctggcatgggcattctctagctccaagtgcaccctagagagatccagggtggcactgtccaagtcggtgttgagaccggccactacacaagctagggtgttgaggcaatcctcactagcttcacctggaacgatgctgatctggcttcctccactcagacgcagaggaagatgcctgaacctcgtgtcctgcagctgctgtcggtaggtgtggctgagcgaccacagggtccgtctggcagcgtcgctgaccgaggcagcgtaggtggatagtggtgtcaggtactcgtgagcagacagagtcctgaatcccctataccttgcatccatcaccctgacatggatgtgagtgatgtagtagcaagcccggggaggctcgctcactcgccttgtttcgtacagggggcggacgtaggttcctagcgcgtgcaacactt

SEQ ID NO: 100018 - DNA, 1044 bp, Zea Mays
ctaatttcaggagtctagtaaaattggtcctctgattttatcaattttctactatttttgatggatttctcaacctagcagtaaaaagaaaagaataaaaacatgaatagtacgaggttgaattcggtccagtcgtcccaagcccacgcgaaaccgcgcgcttccgcgcccgcgctggcggatttacgtggaggcccctggcagttcaaaaaattgggaaagagtttaggtcctgtttctatgtctctctaacacttttatctctaccctctgtttctttcgtcttcctaaatcccgtccccgacccttaccggcggcggaaagcttgagcaccatttgaacacctactaaacgtaacactggcctaaaccgaatgatctcaaggcatggatttagctagcaagcagtacaccgacctactcatacccacaatagggttccgggtccgtggcacccattcctgagacaacaacaccgtagagctcaaacgaagggaacagggagcaccagtaggtcatgtagtacacgatgcttgcgtgaaccagcttaggaccgacgggaatcggttggtcgacatatggacagttcgcagagttagtccatgatgtcgagatcgtgtttcgagctagctataatagtaatgaccaaatgtccactttggtgagcttcaccaacaaacatggacactagaacgctagatcagaggcgttgaaccataccgtgctcgcttgaccacgtgaggttgctatgtcggtgacatggtcaccaggcttgcgaaagcactgagcaagaaacttgagtaaaccttgggtgtcatttggggaagtgaaggcgatagcactgcgcagatgtgaaccatagtgatccacggtgatcttggctgggcttggagatgacaaggaagtgcaaattaggacaaaaaattgttggttgtgttttccttgggtatgcttttcacagcattggatatatgttttaaattataaactctagagtaccggacatgttggttggtacaattatggagtccagagttgctacatt

SEQ ID NO: 100019 - DNA, 463 bp, Zea Mays
gtagaggtctcaccaccaaattcaggcactgaggccggttcgatgaagcgcggtcggtgagtaaggaccttcacctttttcctctttggtgagacctcacttagagcaactgaagcatcaccttttccagaagttgcgctttttctcttttgcctttcagcgggtagcggtagtcagggtacataaacccaatagcatcgaaaactctattcagcctcttcttcttccggctccgaaggtcgcagatagcgcgttatcttctgtctttgaatatggtccaagcagtttgtcgcttgtagcttcgatgcacttcagccaatcatcatctggctcaataaacttaccctcgtatctgacggtgtatttcaacctaaccagtccaccttcgtcagatttgctgatagtttcctttggcatttcccattgctctacaagcggccacactctgaaggctatgtgctcc

SEQ ID NO: 100020 - DNA, 794 bp, Zea Mays
gaagggtcatattcaagttttgaagaatactaattatattagcaacattggcattgttagactcagtggagaagataatatctcgttcctaaagaagaatgaggcggtggtattctaaagctttctgaaagctgagcctcaattctcactccacagaatgcttgtagaagtgttgaagaaattggacatatatattcatgaattgactcccaacgcaataatgaggctaggggtctttatctaggctttaaggagccaaggtgttgaaccaaatgcagaatgcttctgctagattcatgagctccattattagatgaaggcaactaggaaagaatgactacataataagtttagatgttatacctttcaatacggaaaagaggcccactacccgactttagcatatcgcaacaaatggtcaaactcctagacgacggagttgttttatgtgaagaatgacttggagaagtggctagatatcagtggtattattctgtggccaattaagtataacttcgactttaagatggcaacatgccatatgaatgacaaagctcaggttgccctggtcgtctttaatgttgtgtgcaactatgttgggacaagggacctggtccaaaaacacatggccttcaacatctgaccgcttcaggccgagtgggcaatgccagagccgaaggctgatgactcaacaaagcaagaggtgggaagtgggagtcttttgagactaaattatacatacaaatttaggaatcaaatcgaagagttgtgtaatgaatggttatatggtattg

SEQ ID NO: 100021 - DNA, 318 bp, Zea Mays
gaaaccgatactctttgatagagtacagataaccttcgcaccggtctgatcccggacgcagcccaacctttcgtcatcaatgccaccgaagagaagtgctcccaaccgatatccacaagatatagcgtattcttttagctcttatttttcagcctttgtcagttcctgaccaattaagttttgaaagttaaaaacgtcatcttccgaagtgtcttcggctatttctttctccttctcgggctctggggccgtagtctcttcggtggctgcggcagcttcttctacggccatgtctagcagtattttatctatatcagc

SEQ ID NO: 100022 - DNA, 379 bp, Zea Mays
cgcagaagtcgcctaagggtgcagccggaccagcacaacaagtgcgaaaaaaccgaagtctaccacgaagactatccgcgcagaagtcgcctaagggtgcagccggaccagcacaacaagtgcgaaaaaaaccgaagtctaccgcgaagactatccgcacaaaagtcgcctaagggtgcagccggactagcacaacaagtgcaaagaaactgaagtctaccgcgtagactatccgtgcagaagacgcctaagggtgcagccgaactagcacaacaaaagcaaaaacgacaacaccaagccgtccgcgccaagaccgactatacgcgcaccagcacagcataacaaaacacaccagaccaagtacacaacgccttcgcag

SEQ ID NO: 100023 - DNA, 467 bp, Zea Mays
gaatgattgaacacaataattcagtcggctaggtaccaacagaccttgaggcgctaccatgacaaagttgtgcggcaccgatcttttgcagtgggagacttggtccttcgtcgaatactaacgggggaagggcggcacatgctatcaccactatgggaaggaccgttcatcgtatcagaggtcacacggccgggatcataccggcttactcagatggacgacacagaagtggggaactcgtggaacatagaacacctcagaaaattctatccttagcaaaggcctcaaaattcttgaaggaacattgtactctgtaatatgaggacttcatcagcaataaagtttttgttttccaaaggcattcagactcttgacttacagctgacttcgattgggctgggcttgaaatcagcatacctacctgacatagggtgacaactataccctgctaacggagcaatcgactt

SEQ ID NO: 100024 - DNA, 642 bp, Zea Mays
gcgagcccatcagaggttcaaacccggttgcaatgataaaccaagcaaagagtttatttttagatgacccatatggtttccaaataagggagattgaaacaagtgtgacctataaattaaatctggtaagagaccgtagaatattcacccgaggcgttgtatatccaataaatacgatcctccatgttctgcaccaagaagaccgaaccggcaaaggaccagaggtccacaagctgctttaggtgatcaaccgtgtggatcccgtggagatcaatgcggctcacacacgcgctaccagtgaaggcctcccgaatagagagcctgcggttatagaagacagtgacaagatgtcaggcgcaatgtccttagtttgtggaccgttgaccataaaatagattttaagattgatgattaaaatagaatgccaaagaggcatgtacataactgtgaaaaagagcggaacggataggaagaaggctctaccattttagttccatatttctctatcggaaatgaaattgctatggtatcgctagaaacgagaagagtgtcaagattttggtagtgccgaacaggacgctatatgatcgaaagtatatcgataataatcagaatttaacaaaacaataacttaaaaataat

SEQ ID NO: 100025 - DNA, 607 bp, Zea Mays
gtttccgctgtggagatgcgcatcgccgtgcagagtgccagtggagtggcaggtgttctatctgcagtcaggaccacaaggatgtggtgtgtaggaggaatcccaatgggaagctcagatgggagccggtgacttcctcctcttctcagggcactatcaacatgatgtcaagtgctgagcagcagttttcagttcctcttcctccacagcagctttatgtgcctcggacttctcagttcgtgccgatgcagggttttcctcagtatcaggtcacgcctactcctgcaccgtctactcctatgtcgtctcagtttggagctccgcacctgcctcatccagtggctcagtggggttcttctgttaatttcactccgggggcttcctcttctgcgggtatttctggagcttatgtgctacccgctacggatggcagggagcaaggagacgtggtgacaggtacgatttcagttgattcgtttgcagcccatgctctttttgactctggcgctagctattcgtttgtttcggaggattttgtgtcgcgggctggtctttcggtgcagaggttgggtcacccaattttggttagatctgctaatggctccat

SEQ ID NO: 100026 - DNA, 408 bp, Zea Mays
ctcggattccggtagtgtgtggctgtgagtatagatggtcaacacgacactggcactattaagctcggtactattagtcattacactattagtaaccatgtcgtgacgtgccggcactagtgtttaactagctagcggcatagtcactacactatagtacttaatcatgccgtgtctgcactacgggtcgtgccatacttagtgacggtccatttagcacgatctatttggctatctgtagctgctgtgagcaggaaggtaggtgtggacagcactggcccaatacattactgcttgttatcccttcttcgctgcacacagcaggattctgaatgcgtgacaaataaagcgacggagcgagggggaagagagctagctagctttaccctgcaacagcagcacccctac

SEQ ID NO: 100027 - DNA, 749 bp, Zea Mays
gtctgggagtagtaatcactcgttgggcttccctcggcatcacggtgccccaccgtgtcgtggactggggcattcgccgtcaaatcgttggtataaggctccgatagagttcgtcatgcgctaggcatcgtttatcttgtaacgacggcgggtggtgtgtaccagggctcgtgaatgggggcgcgccggtgaaccaccaccgtggggatagagcgccgccgtgttgacagccaggggaggaagaagatggtcctgtagccgttagatgggggttgacggctgggattagaaaccggatacctcttcgtcgtattaaatccatgccacagaactttgatcgggcggataggattaaggcaaacacgtggacgtattacgtccgtggatctctgatcctgcggccatcattgaataccgattcacttaattgttacatctaatcctggccatgtgcatctgatcggacggctctggatgtccgataccctttcgtccagacaattatacaaaagagaccccgtagatgttagatatcaacccgcagtctagagtgactgtgctctgagtctggggaatcttgcgctgaggcacctgcactttccagatttcttgtgcgcagaccagaagtagtgaaattcagttcagaattgatttttagtgtaaaaataattattaaaacttgtttaatccctagaaaatacatattaagtccaaatgagaccattccaatttctataagtatataatac

SEQ ID NO: 100028 - DNA, 1174 bp, Zea Mays
gaagaccaagaattcgtttaagcagagacatgtgagaatatcatggtgaatgcataaagaggcaagcttgttgtacgacatgagaaatgtttggacgagtgtgagttaagtactgcagggcacccgcaaggctgcgataaatggagggattgtcgagtggagtacccgatgaagccgagagcttggctttggtgtcaatgggggtcgagacagggttgcagttagtcatccctgcacggtcaagcagctcatgagcatatgtagtttgatcttggaaaagaccagactgattatgtgtgacatggatgccaataaattgggcgaggggtcctagatcagtcatgtggaactcacgacggagagtaactatgatgagtgtaagggtggcatcagagtttgcagtgagaatgatgtcatcaacatatagtaatatgtatgcaacacgagtaccttgatgaacaatgaagagggacgaatctgctttggatgccacgaagccaattgtgcgcaagaaactttgaaactggagaaactaggtcattggcgcctgtttaagtctgtacagagacttattaagtctgcacacatgatctggatgggaagggtcaatgaacccaactgcctggcaacaatatattgtctcagacaaatccccgtgtaaaaaggcattcttcacgtctagctgccgcagaggccagcaagtagatgtagcaatactgagaacggtccgtactgtggccggtttgatcactggactaaatgtttcatcatagttgacgccatattcctgacggaaaccacagacaacccaacgtgccttgtaccgagccaaagatccatctgcattcaatttatgacaaaaatccatttcccgctaacaatatgaactcctgcaggttgtggaacaagacaccatgttttgttcctcatcaaagcattatattcatcaagcatagcgttgtgccaatgtggatccttgagtgcagagcgatatgatgtgggaatgggtgagatatctatagcagcagagagattcagttttgtgagaggtttgtggattccaaaacgagaacgtgtgtgcatggggtggataggctagctggactatgtagaacggagctcaggagacgcataaagaaagactagaggtaatgcaggcggtagaggcgaagat

SEQ ID NO: 100029 - DNA, 482 bp, Zea Mays
ccgaagcagcaagctcgaagatactgtattcaaatttgtagacaaagctgactagaccacaaataaatagatctggcagtgtcaagcctgttccacatcttacaaatgtgtagggaggatgggaatcacgttgcaaatcataacgcgtgtaagcttttccaggagacaacatgaacaacgggagaaagaaaagggggagacgatggagcttggagacggaaaagacgggcaacaaaaaccacagagccgaccaaacaaaagttggagaaaccatagccgacgaagaaatcgacggatctcaccaaaccatcagtcaccagagcggacgatgcagcgaggataaaagcgatggaagacgagacgacttggagagggaagaggtagagggagcaaggaaaaagagagacaagcggcagtatcgaggagacgtggccatagttaaagcatctgctagaagtcttgagaagcgaagggagtttcct

SEQ ID NO: 100030 - DNA, 691 bp, Zea Mays
gtcaccctgagtcgagtaagcatgcaaaaaacaattcaagtgcctttgagaatgaagtcattttattgatggtgtatctcccaattacagaatacaatgccgtcccaatagcttttgaagtctagctaggggtaaaacttcctgagatgctctatattcgatgagttccctatttccgtgccatccatttgagtaagacgatatgatctagggcgagtgacttctgctactatgaatggtccttcccatagtggcgacaatttgtgctgtccctcccccactagaattcggcggaggacaagatctcctactgcaaaggatcgatgccgtatggccttatcatgatagcgcctcagagtttgttgatacctggctgactgaatcactgtattcaatcgttcttcttctagtatatcaacatcctcgaatctagtagcctcagcttcagctatgttttcgaagatcaatcttggcgccccaaacttgagatcagcaggcagcactacctccgaaccataaaccataaagaaaggagtgtttccatgcaaagcttggctgggttgagttcttaggctctagatcacatacgacaactctttgatccattttcctgcgaacttttcattcttgtcgaagactttctttctgagtgcttccaatcattctgttggctctttctacttgcccgttg

SEQ ID NO: 100031 - DNA, 421 bp, Zea Mays
ggtttgggcccacgatcatggagagcctgggaataccgtgtcatcacttattcccgggcctaccccttgtccaggtagaggtttggtgccaacgcgtggctagacgtacctaacatgagcctctgacatagggcacaccaacagtggatgtagatgggacccatacttacccacatcaatggcaggtagtgtatcccctgcattaaatgcgcgcgatgcaccaagtctgcaacgtgcggcatttactattactcgcacgttaccgaggcaagagcattgacccaatgcgtcgtttgggtgcccttcattatgacttatactgttcttcgtgtgttaccgatgcatgaagatacgagtggaggagacgagacgacaccgcccacacctacgcatgatagtgtatcagactatgccgcaacct

SEQ ID NO: 100032 - DNA, 589 bp, Zea Mays
ccaactgcatattgcacaggggccgagtcatgccgaagttcaatctcaatggactcatcaccatgctcataagcttttcccttttcttctcgtccgccttagcgtaaaaccattcactcgtccaaccagtcggccacttggtgcggtagcctatcacagggcctttgtatcctttcgatatgcgaagttgtagcatccgaagtttttgtgcaggccgttagcccttgccttcatctggtaatgaagctcatgtacccggcagaatccttcggcgttagcactctttccttggcttcggagagcccagatgtaaacactgagtctaacaatggccttcggggtcagctgatggaggtagatctcaaacttcttcaaaacctcacttatcatctcataaagggggaaccgaagtccagccctaaagaagcttttgaagactacgacttcatccttttttggctctagaatcgtctcctcttcagcgaaacgaaccagttcatcatcattctccccaaagtatcctagtttcttcattaaaactagatcatctgcctttactgtggattttccaaattcaacatggctaggc

SEQ ID NO: 100033 - DNA, 454 bp, Zea Mays
cagggagaatcgaggcacctacagaggtgacgggaagagtggacccgtttccaacgacgatcgaggtagggtgtatggaaggaggtgggtgggagtgagatagcatggctggagtgggagtgggagtgctgttatccaactctatgtaagctagagatgttcatatatgataatatgaacaaaaaaaggaacaaagcagctgcagtccagcaaactccaaacaacttggcctcctgccctttctaactgttatgttcaatatgactgtagaatcttctgagcctatattccagtgtatactgtatagcattcctgatttctcaaaaacatgacttttaagtccttataatatagaagtgtccatgaagactcactacagtgaaggtcacagactaaatattttgcacagctgacactacaaagctaagttgtgtctgaagtataaaggacagac

SEQ ID NO: 100034 - DNA, 778 bp, Zea Mays
gcatgatgtggcagagtctatttgcaaacagaggcaagcaacatacgtgaggaggtgagtatggacaagcaacgacgggccattttgagtctatagagcaaaaagtggtgggaaaatataattacaacaatgacaggtgtaggcgtagaagatatgtgggaaccatggaagtggaaactaaaataaaattagaactatgacaagtgaagacgtagatgatatgtgggaaccgttgaagtcttgctaacagaggttgtccgtagcggacgccccttccttccccctcccctatgttggaggctacatgacacctctaagcgatgtagtggttgcctcttcgatgccctctatcgtattgcaatcgtctctcccctctctccccctcaatcgagtgtgaccctgctctatcttctcgcgtcccacagctaaggcctccaagcttgttcgccttcgctgaaccacccactgctgctcgacacaaggaagaggccaagtgggagttgtagatgggtatgcgcgacgaaaggaagcaaatagaagcgggggtgtcgacgctcgccatggatttagcagcgagaacagaagcgtaggagagcgtgccatatccattatcggagcgaaagctcaacctactcgaacttggattcacttgaactcaccccatggccacttcatagagggctgcccacggggacatggcaacaatgtctgacgacggttcgggctggtgtttggtcctcgacaagcgtgggcttgtgttgtaccgacacacgtagat

SEQ ID NO: 100035 - DNA, 514 bp, Zea Mays
agcaaggtgtgtggaggggttggctttatagaccggcgtgcttaattgagacggaaaggcaacaacaagggcggtgtgggcggtgttcgccattaatggccatgatgcccttggggtgtcactagcgtcgttaacgaggaactaggctaggataaggggttggagatgtcgtgtgtcacttctggcgtgagaggacggcggcggggaagctggtagggctctgcggggcgagatccaagacggagtgtccaccggtgaatagtgaagaacacgtgtagctagggatgacatgtgggtctcgcggaccagagagggcgggcgcgagtgcggagtgagggctgacgagtggggacaagctattagcgactcattaggaactggcgagcgcgggcacaccgataggtggtgtccaactgtcaaggtgacggggtgtgcgggcatgggcgtgggttctgggtcgaaaggctgctcggttggctcaattaccattttatcttttttccattttccactt

SEQ ID NO: 100036 - DNA, 469 bp, Zea Mays
gagtggatgtaggagggtataatatggagcaacaaatggaagaggagcaccgtatgatccataaggaggagcatcatatggataccaatatgggcatgaaggaatgtatgtataagagaaaggttgagagggagcgttgatgatagaagctttagtggtaggaggaacgttgatggtaggaactttagtaataggaggagaagcatcgatggtaggattttcattggtaggacaaggagcatccatggatgatcgttgtggatacaaagggggaggatatggatatagaaacaaagtttgtagactcggcgaacgtggatgaacaggaacatcctcctaatgatgatggacgagagaaagacaatcaaggaagacctgcccctacactctacaaagccaatataaatctaacgcaatgttccaatgtcaatctaacacaatatttcgtcgcacacaatttcacgcatag

SEQ ID NO: 100037 - DNA, 1169 bp, Zea Mays
tagtagggtatagtggtcaccctaagtcgagtaagcgcgagcatgttgcaccgtcttaagtcgtcgctgacttaagtcgattgctccgttagtagggtatagtggtcaccctaagtcgagtaagcgtgagcatgttgcaccgtcttaagtcattgccgacttaagtcgattgctccgttagtagggtatagtggtcaccctatgtcgagtaagtgttttgattctgagtttaatcaagtcgaagtcgatggataaccaatagtttgaatgcttttgagagtgaaatcttttattgaagacgtcttttccaattatagaatacaacattgcttcgatagttcttgctaagggtaaaacttcctgaggtgctctatattccatgaattccctacttctgtgccatccattttagtaagccgatatgatcctggccgagtgacctccgataccatgaacggcccttcccatagcggcgataatttgtgtcgtccttctcccgttagaattcgacgaaggaccaagtctcccactacaaaggatcgatgtcgtatagtcttatcatgatagcgcctcagggtgtgctggtatctagctgactgaattactgcgttcaaccgctcttcttccagtatgtcaatatcttctagcttgatagcttctacttcaactatgttttcgaatatcagccttggtgccccaaacctgaggtcggcgggtagcactgtctccgaaccatagaccatgaagaagggggtgtttccatgcagagctcgactaggttgagttcttaggctccaaaccacataagggaattctctgatccacttccttgcgaacttttcattcttgtcgaagactttcttcctgagtgcttccagtatcattccattagccctttccacctgaccgttggctcttggatgtgctactgacgcatatttgatctggatgctccgttgttcgcagaaatcaaagaattcagagctagtaaaattggatcctaggttggttatgatgctattcggtatcccaaacctgaatattatatcttgtatgaattccactgtcttggctgaagttagagaagcaatgggtttgtattctatccacttagtgaatttgtcaatggcgaccaacacatgagtgtagcctccctgagctttcttgaa

SEQ ID NO: 100038 - DNA, 467 bp, Zea Mays
cgcgcgcggagagactccggcgaggtcctggaccggccgattggggctacggctgggttctccgagcggcggacatgaaattggggtcagcctgaccatttcccctaacttaattgcgctattggtcaactatggagctctggccacggtggccgtaagcatagcggttatatggtcgtgttcctggcgaccagagagcccttagttcaattcaatggctcggcaagcatcgtagatgcacgagaatgcttaaacaagggagcagaggggagggactaaccggattatggctggcgacggtgagcttggtttcacggtggcggaaatcggatttgggggaaattctgaattcgagcacacgagtggatgattgtggccgattagcggtggctggttagcttaggaccttacggaactggtggggggctcaatttatagggagcgacagcggcggcgatcaattcgag

SEQ ID NO: 100039 - DNA, 882 bp, Zea Mays
cgtctcaactttctccatgggccgctgccctgttcaagttcctgccatcgttcattaggagagaggttgtgcatgagttctatgatcgaatttactcgatactattctgcctgtgaaaaaaaaatgttgttctgaagatctaaaaaaaatattttgttcttcagttgatcctgcatcaggaatctgataactcagcgcagctatctcaggtatgtgatatggctatggttagctcttcttcatcagagttaatcttgcacaattactgatggcacgacatttccttttccagatcgataccgagcagctcttggctcatttggtagaagcagaaatgaacaagagaacagtaagctccactacactattctttttttttctttcctttctttcttctacagaattcttgtagttctgacgttttcactggtttttctagaaagaagggaagtgcaagggaagaaaattcagctccgtgtgccacttcttcggttctcaggcccgaggatcgctgccatccaacttcgactgcaactatgcttatgtaagaaacaaatctaaacacgttgttttttttttgctcccagaaccatggtacctaaatgtcaaagaatgcaggtccttggccatatctgtgtgcagataatggcggctggattgaatggttacatggccactgtaacaaatctcaaggactccacaaacaagtggcgatgcgctgctgttcctctaacggtatgttattcctttaacctgctgttactgctgtgttagtaaccagtattaggattggaatgtgattgcttaccattctttaacaggcaatgatgagcgtgaggagacacttgcgtggtccaggagctgttccgattgggaggccag

SEQ ID NO: 100040 - DNA, 425 bp, Zea Mays
gtggtggcagcataggccaccattggggaggagtggccgattgctggtttttgctggtgcgtggagtttatggggggaatggttggtgtgtgccattgctactgcgatggtttgaccattagtttcactgcaaggacagcaacagcaacagctgttggtatggactctggagtggtgctgtaggtcaattccatgtgaggtttcgtgtttccttcaacaaaggcgcaggggttgccatattccagctactgtcgttgctggaccggctacaaagttgcacagcaattcactgtcacgaagcaatgaacaatgttctgcagtcaagcttgtcactgattgctattcacgcatgaattggtattcttctttttgataaacgaattgatctttatgatgacgctattaggctgcgtgctacgcctctc

SEQ ID NO: 100041 - DNA, 367 bp, Zea Mays
tgataggtgactgcgcggcatttcacttatcctgttgtgcacctaggcgatatctgtttatgtagtggggatcacataccgcgagtgttgttagtttttccggctgcgcccttgggggacatctgcttggaagttgtctttgtaggagacgtcgcaccttgtcggtggtgacgtgcacttatgcttttgtccggctgcacccttatgcggcttttgctcggatgtgtcgtgtctcgcacttattgtgcttttgtctggctgcacccttaggcggcttttactcggacgtgtcgtgtctcgcacttattgtgcttttgtccggctgcacccttaggcaacttttgctcggacgtgtcttcgttgaaga

SEQ ID NO: 100042 - DNA, 589 bp, Zea Mays
tgacagctcccgaccccgtcgcaagcaactaaccaaagaaattctactgtcttacaggtgaatgttttccacaaattccaaattcccaaagcgcatcacccgaatgaggaaaaagaacaaaaagaataacctccacttctcctctttgcaaaccgggtatcatactctaccccccttaaaaagaattcgaccttgaattctgacgcttctatcggaacgacaaaaggaaaaaattaatgaatcaacaacacttacccacaacaaaaagttccggatatttctgccgcatcagctcctcaagttcccacgtagcctcgcgctcagactgattagtccataagaccttgacatacttaattgatctcttcctcaaaacactctccgatgattccaagatatgtaccggacgacactccaaagtcagatcctgttgcaccacaattggttccatctcaatctgatggtccgaatcccgcaagaacttcctcagcatagagacatgaaaaactgggtgtacccctgccatggaatccggcaattgcaagcgataagccaagctgcccacccgggccaagatagtgaacggtcc

SEQ ID NO: 100043 - DNA, 336 bp, Zea Mays
tcaaggagcaggatcgattgctgtcaatgtcatccttttcccggcctgagttgcgtgcgcgacatctttattcctgacggacacgaactattaacgacggaaggttcgccaaagctagtaggccgccccagttcctgttcgcacagcagggaacagagacatgctggatggatcggccgtgtggagaaagggacagggacgacgacggtggaaaatgttactgggtttaatctacgtgcatgcatgccgaaacgcatcgatcagcacgcatatatgctggcaagcggcggtggagacaccatcgtacgtcagctctccaaagaaaaacaaccggcc

SEQ ID NO: 100044 - DNA, 419 bp, Zea Mays
gctccatggatccccggtgccttccatcctttaatttgctagggtgtgggttggttggttgcctgctggctgctccagctccgggagatctcatgacctgtacgcgtgatacgtatgttgcattgtcccccccgctgtccgattcgctcgcatatatgcatctactgtgcggccgggccggtggtgtgggtctggtactgcacgttgtcccgttgctgaagcattcaccgtcagttcgttgttgcaagctaagagggggcgtgcttttactgttgcgatactgtgctccggtctcctctttacctgcaggggcgatgttaccgtgccagaaccaacatctccttgtcatctcatctctgcccgaattcctcgtgcagccccatgcatgcgccccaattgtattgtatcgcatggcgttg

SEQ ID NO: 100045 - DNA, 536 bp, Zea Mays
gggaggtggctcaggtgctaccataggctttataggtcgtaaaagggagggagacgaggtgtcgggtggagatggggaggtgtcgagtgacattaatggtggtggagggaggacatattttggcatgttagtgggtaggggattggaacataggtgacctctatgggggggggataagaagagcaggtgcatgctggctcgaagcagggcgtgtagtcgtggagcggcggtggcgcgcgaggtaggggagaggttggaaacaggaagaagaagaactgaaaggtgggcccacaagcagtgacagagaaaggtagtgcggggtgggccaggagaaggcaatgtgggtggggtatttaatttatttttttaattcttttcttttctaagctctctctctatatatattctagaaatcaagatacatccaaaaaattactaacaatcaagacattcaaaaatcctttgccaagtgcccgaaagaaaagcacacgacaaagaaccctttaccgataaaatatttgccgagtgcaaaaaag

SEQ ID NO: 100046 - DNA, 468 bp, Zea Mays
tggaccaagtgtaattttttcctttgaggggaatttcctgcaggcctaccgaactaataatttcattgaatgtgaacacatctgtcatattaccaccctccctgtttctattttctgttgaacggtacatgttgaagtcacctactatcatccaatcttgatcatctgcgatatgaaggttgtatagccagtcaataaaattttgtttctcctgcccttggcacggtccataaaccgtagtgagattccattgattagcattgtgcatcgacgtgaaaccaagagtgatttggaagtttgaggagctaaggacctgcccggtgaagatggaggcattccagctgatcagaatacctccagaagcaccacaggaaggaacaaaagcgaactgattgaaacgcttaggtgccatttttttgaacattgtcatatcaatgttgctcattttagtttcttgaatacagaata

SEQ ID NO: 100047 - DNA, 343 bp, Zea Mays
catttttctctcttcttccccttttctcctctaccccttcctcaatggagtgtcatagaagtaggggcctagagcccctagcccaccttaagatctgcccctggtattgtgtctgtgctttaatggaatgcaagagctggttgatttttctgcagggtgtcactgttgtatacatagtgactagttagatgcacatgcattactacaacttcaatatatcatatagatagacgttgtttaatgggtatttgtttacatatgtttcaaacctttataatgagcatctgaaagtcctgagtggtttgctaggatggtggcggcaagacgggtgcctgcgtcagcg

SEQ ID NO: 100048 - DNA, 388 bp, Zea Mays
ttgagaatggcttaccgaagcaacagaggtcgtaggctgttagttgcctacatactccgggacataaggagagtagcacgaagcagtgtggaggacttgcttcggctgactctgtcgcgcttcagcttcagcaatttccttctgcttttgaattgtaacctggcatgtccttgttgtgtggcccttgtcctcgccacaaaaaaggcagtacaactttcggggttgattgccaaaccttcctccactaaaacttcttcctcctcttcctctcggagctagtggtctgaaagaggtctgctgcatgcccgaagactgagaactttgatggctatgctgagcattgctggccctttcatcgttgatactggagttgtgaatggatcggaca

SEQ ID NO: 100049 - DNA, 577 bp, Zea Mays
cccatatttaagcacacattttttctattaattatttgtaatagaaaataaatagaataaaagatacgaatcatgcctacaaactcaactgaaatgcagtagaaaaagtgcatgcaagattttctattcacggtgcagtgatggctgaaacatgcgcgcatggacgctttgcatgactgcatgcaaggaaccgctttgacaaggtaaaaaaatgccgctagtggctttcagcatgcaaccatgcaggaggagggggtggtatgcggtagataaagctgatgccctttttctctcaacaatgtgcatgtgcctgtggcctacctggccttttggaattgcagagccattgccctcagctcttcgtcttcggcaccgcgctgcggtttctccttgtcctgcggcttctgatgaactgctcagtaatgcgcactcatcagtaacataaacgcccccaccagattgctaagccaacaatgcaacattttttttcattttccttttgaaatggtcgacggaagaatctacccagcttgtattgatatcgaatgaaaaaaggcactatggaaggaaagaccgg

SEQ ID NO: 100050 - DNA, 344 bp, Zea Mays
cggtgaggcaaagcttgctggtcgttgtggtgagaaagtcaagggagccgaagctgatgcgacttcctagcacgaaggtctctccaacgttgagggtggatgattgagccatcagagtgaacaaagttgcttggcacactaacggacccctacctggcacgtgaactgtcgtgatttcgaaaaccagagacacagtagaatttgtgttcagtgggggaggctagtgtggactcactctaaatggtgaataaagggattccaacagagggtttatactagttcaggcttgtgcactggtctagtgtaacgttgatcgtagtatacactgaggaacgtgttagaga

SEQ ID NO: 100051 - DNA, 332 bp, Zea Mays
gaagcgacaacctttccagaagtagcaatctttcgttttaccccttgccctcgcagtgggtaataatagtcaaggtatacaaagccaatagcatcgaataccatgttcaaccttttcttattctgacccccgaaggctgcggacaaggcattgtcttccattttggaatacactccatgtagttcatcacttgtagcttcgatgcacttcagccagtcatcgtttggttcatcaaacttatccccaaacctaaatgtatacttcagccggaccaaaccactttcgctagagttagtgatggtctccttcggcatttcccagttttctacaag

SEQ ID NO: 100052 - DNA, 391 bp, Zea Mays
cgacactgcccagctccccgcggtggaggttcatcggcgcgccccaaatccggccatcctgttcaccattctctaattcattcgctctccgcccaacggataacgttatgaattcatttcccttaccaatttctgccatcgtcgagcgcatggctcggtccatggaacggttaaatacacggcggggaagattgctccggtgagcgattgcaggcgccctaagctacaatccgactctaacctcagtgcaccaggtaaccgcgataatgagaaatccggggagaggagtcataccggttgaaaagccgagaaggcgctcggccacgttcgtgcggatccaccgcactaccgccgagggatcgagcagatgtcggtcgaaagtgcgattggc

SEQ ID NO: 100053 - DNA, 568 bp, Zea Mays
gtcaataattagcttattcttttttatatggttgtatatatcctagcaagagaccactctagtcatttccttagtttcttgagagctgggaccacacttatagtgaagaaaactatgttcaactaacagaattaacttggatgcacctatgcacaatcatatatgtacaagttttggcggcatatgcttatttaaaattaggcttgtggtgttagattaatatattcattggatatggtgtgaatttctgagggataccggatgatgtgtacacctgtttgtccttgtcagaatgttatcatgcattttgtttgtctttgtcaaaatgttatcatgcattcagggtaaaaaatgttattatgcattaacctgatgctttagctataatttactgatctgataaatccagcagttgtataaacttacaggctataacataaagaaaaattactgaattcttaaacgtagataattactgaacgatgtaataatggttagtgagccatataaaaattgctataaaatgggtaattacatgatggtacacttattactgcaattcttactg

SEQ ID NO: 100054 - DNA, 653 bp, Zea Mays
gtggtggcatattgtttgagagtacttaattaatactctctctgtcttaaactttaagatattttaacttttctaaatacatcaattttattgtgaatctaggtacgtcgcaaagcctatgtatctagcaaaaaacggatggagtagttaatagtccaggactctgggtgacaaaagcagggtatccattatctactgacagagtcggccaaaaagtgcaggcacagagaaacatgtattcagtcaagcaacagctctacctattagaagcacaattgtggttcatgcaaaaaaaaaaattctcgaacgcggcggatgcatgaaaacgagtcatgcatacccggtacctcgaggaggacttggaaggagatgagctgctggtcgcgttcctggaggaggacagcaaggacgcggcgctccctcatcttgtgcaggatgccgacgctcaccgcggcggctccgacggccagcagcaccagcagaaggtacgggggcactctcttgctgctccccattgcgtggtttcttgatctatgtttgcatgattccatctccacctctgagcatgcaccctcttatatattggcaccctttgcattgcaggcggattttgtgatgctgtttactgcagaatggggcaaatgctgtggcag

SEQ ID NO: 100055 - DNA, 295 bp, Zea Mays
cctcaataaacctcaaccatccatccgaaggagccttatatgaagactgctctatgaagtcaaaagccaatgtaacaagttcgtcatcttttgatttcacctccttcgaaagtttccatccagtccgagtcagatatatataaaaagcaagagactcttgaattagatctcgacatccaatctttctgatgactgtattgaaggctttgtagcattcatcagtagcttcgttcatctcacacttcagcctctttagggaaaagctaacctccaaagggctcatcattataccctt

SEQ ID NO: 100056 - DNA, 458 bp, Zea Mays
taggcgacttttgctaggataataatatgtgtctctaggacgacttcgcagctgtttcgcagttgtattgattcagctacactcttgggtgacttttgcttggactgtgcttgtcacatgcaacgactgttgagactggccgttgcggtgactattttagcgtcgaatgccgaagaccaactctgcggtctttttcaacatcccgatgtcttggtgccgcttttactttttgggaggatttttgcggcgatttatttcatgtctccgcctcattaaaaacctcaccccctgcaaggaaaagagtgtgggcccgactgaaataatgtctgtggaagttacaaaggcgcaaaggccttaggattggtgtcgtagacaaaaaaaaatttgtcaggttgtctacattccacgaatgctcggggtctttgccagattgtgatttcagtctgtaggcgtttggg

SEQ ID NO: 100057 - DNA, 547 bp, Zea Mays
ccggtattggctcaaccggacattgaaaagccgtttgatgtgtattgtgacgcatcaggcaatggaatcagatgtgtcctaatgcaagagggccgagtcatagcttatgcttcaagacaactacgctagcatgaggagcactatccaactcatgatttggaattggctgcagttgttcatgccctcaagatatggcgtcattatctgctgggaaatacttgccatttatatacagatcataaaagtctaaaatatatctttacccagtcagaactgaacatgaggcagagaagatggcttgagctcattaaagattatgacttggaaatccactatcacccaagaaaagccaatgtggtggccgatgcattgagtcgcaaagtttcctgtcattgtcttaccgcaagggcctctgacaccacactatgccaagaaatggagaagttaaacctggggatgatacaacacggaactttgacccaattaaagcttgagttagttcctctacagagaattgttgatgcccaaagaaccgatgagggtatga

SEQ ID NO: 100058 - DNA, 356 bp, Zea Mays
agtcatcgcgtacgtgtgtctctagatcaagtactagtaggggctgtaaggtgtagtaggagaaatgatggtctagtctatagggtgcagtacaagtaggtggccagggtcaagtcgagacgatctggcctgagccagtaacccacccatgccccatgtccatcgcccgttgcttccagccatgtgggcctcatagtgacacggactaggggtgaaaacgggatgggtactcggaacgggtactaaaattatctaaattttcgaatacggatacgtgtattttttgtcggtaaggatacgggtactacgcagatattgaactcccagatacgggtaggatacgtaatcgttgttac

SEQ ID NO: 100059 - DNA, 481 bp, Zea Mays
tgcttggttcctactcctaccttataaatatttggcaatgggcattgctcagtatactttgataactgacaaatggctataaatatagtttgatcccataagctgcctttctgtttttttccagctccaataaaatcttcagcatttctttcatagccttagtcaagttcaactgtttaagtagtctccatcaaatattgttctatccgaaagagatgagaagtactttaagacaaatgttatggttgaatagaatgattgaactgtagtaatgttcaaaatttagattacaataatagaatgtcattttgaaatttttatccacttgttgagttccctttcaattaactggggatgagggatatatgctctgtgtagtttattatttttcgtgtatgaccaaagcaatagcaaacctaaatggtccaattgatgttctgttttttggtgcatgcacactactgtataactttagtattac

SEQ ID NO: 100060 - DNA, 572 bp, Zea Mays
aaaaaaaccaacgagatgggtagaaatcaagcctaaaaagggtatcatattcctgtggggttgggtcccttgatcgacgctagaattcataaagaaattgctccatgtatggcatcacctcttcaaggttggtcaatagatataacatgatatggtgccacacttcatgtctcagggtcttggtggttgaaccacttgcgcttccgagttgcactcgaaaaatgctgaggttcgattcatttttcgccatcattgtaacgagggggtggattatgcacactagggagtttgtcaccatagtaagttgttgtgaagtttgacacctccagtacttatgcctctgcaatggaagcctcgattttgcatttatttctacatttcttttgaatagtctttagacatctctcgattagatagcaccaacgttcctgcatgggcccccattcgtgtctcatatcggagatgaagaatgaaatgctgcatcgtatcgaagaagccggtggaaagatcttctccagcttacacagttaacacgagtgccattctttctgagtctgcaaccacgatgcatg

SEQ ID NO: 100061 - DNA, 418 bp, Zea Mays
gttttcattgatgatattctggtttattccaaaaatgaagctgagcacaccaaacatttgcatactgtacttcagaggctgcgtgatcatcaattgtatgccaagttgtcgaaatgtgaattctggttgaaggagattaaattcttgggtcacacaatttctcaggatgggatatcagttgatcctgagaaggtacaagaggtgatgaattggaaacccccgactacagtgaggcagattcggagttttctaggtttggcagggtattatcgacgatttattccggatttttccagaattgccaaaccaatgactgaactgttaaagaagggagtcaagtatgattggagccaaaagtgcgaagatgcctttcataccttgaggcagcatctgacaacagccccggtgctggctcaac

SEQ ID NO: 100062 - DNA, 321 bp, Zea Mays
tgctcagacctctatgcttccattgaatccattgccatctcactaaagtggggttgctatctaatcagcatataacacctcctctgtttcaagttatattgctcatgatcacatgttggaagcgcatgaactactttggtcaatgctagagtggaataccgatcccttccatggcaatctgatgcttatgggattcttgaagagcggacagctagataaggcatatcagattttcaagaggttgtctgtctggtctcatggaactcaaatgattgcaggtgcagtaaggagctcgcacctgaaagaagcaatgaatctttt

SEQ ID NO: 100063 - DNA, 676 bp, Zea Mays
aaaaaacgagatgcaatatgcatgctaaatgggaaaagcaactaagcaagtgcatcagacataaagttgaagtccagacgggaagtgtcaaactaaataagccactggtcacattatatttaaatagaatcaatatttaaataactaatgatggggaagcaagtgcctcacacgtaaaattgaagtctggacaggaagtggcaacctaaatgcgcaactggttacattaaatttaaacatcgcacatatgtataattttacgtgtgatgcacttgccgttttagaagaatgatttagctctcaaggaaatccctttacatggtcgcaaatacacatggtctaatcaacaggataatcctgtcctggttaaactggacagagtgttcagctcagttgattgggaaataatgttcccaaatgtcctccagagtgcagcttctctggactccgaccactgccccctgatcttgggtcttagagataacaagtttgggaaacgaagatttcacttcgagtccttttggaccaaaatcgaaggctttcatgaaactgtccaggcagcatgggactcggttgaaactggcagttctcctttcctgacccttgacatgaaacttaaggtgacaactaaaagattgcagggttggagtgagaagcgggtgggtcatgttagatc

SEQ ID NO: 100064 - DNA, 347 bp, Zea Mays
caattcttgtccagttaagttttcaaagttgaaattttctttctctgaagtatctttggctatttccttctctttcccaggcactgtggccatggtctctccggcgactgtagcagattcttctacggccatgtccaaaagtattttatcaatatcagaaagtgtactttctaagttttcaccttcggcagttgcagcttcagcaggtgtagcttcggtagctgtagcgctctcgacagctggtgcctttgacgccgaagctggcggtggtgtttcttcaatggcctctgtcacagtaataatccttcgttttttcggcccagcagacttcttcgctgccgagggct

SEQ ID NO: 100065 - DNA, 373 bp, Zea Mays
gtcgagcagcatcacgagcacacagggatgccaaaacaagagtgaagagggcatgatcggacctgtggagaattggccacggcaagctcacacagtacggtgttcttagcagatttgggggaaatcccaaattagagctctctggtggacaatccgaggtacaagtgggtgcgctggatgcgtgactacctagcggagctgatggcacgctcaatttataggacccgagggcggtggctcttgaattgggcatggcgcgctggcggccggacagaggggatagcactggtggcttagtcgtggcgttcaccggtgcaacgactcaaagattgtaatcctaagtgtgccacggttactactgcacagtaacgag

SEQ ID NO: 100066 - DNA, 320 bp, Zea Mays
gctcaccatacgggatcttaccactcgtacagtggttgctcgctatgatagatctggccccctatactccattcgcttccccaccccaccttccttcgcccatgttgtccaaccctacactctggcctccactgccgctgcctccacttggcaccgtcatcttggccaccccggccacgacgtcctctctcaactctcgactcctcggccattccttgccctcgcggcgataccacctcgctttgccatgcctatcagcttggaagtcatactcgcttacccttctcttcttccatgtcccatgctactcaccccttcaa

SEQ ID NO: 100067 - DNA, 407 bp, Zea Mays
atcttaagtcattgccgacttaagccgattgctccgttagtagggtatagtggtcaccctcggttgagtaagtgttctgatttcaagtttaatcaagtcgaagtcgatggataaccaatagtttgaatgcttttgagaatgaaatcttttattgatgacgtattttccaattacagaatacaacattgctccgatagttcttgccaagggtaaaacttcctggggtgctctacattccatgatttccctacttcgatcctggccgagtgacctccgacactatgaatggcccctgccatagcggcgataatttgtgtcgtccttctcccattagaattcgacgaaggaccaaatctcccactatgaaggattgatgtcgtatagtcttatcatgatagcgcctcagg

SEQ ID NO: 100068 - DNA, 326 bp, Zea Mays
cactcaaccagatctcaacctccatcagcgaagatggttggagctgatcaaggattatgacctggaaattcattatcaccccgggaaggccaacgtggtagcagacgccctcagtcgaaaaccattcggaataaagggaaccaactttttagaagattggaagaaagaatcagctcaactgaatacatgtctgggaaacagcggcagtctcgaagtcagaccaatgctggaagacctcatatacaaagctcaacgcctagacccagagacaacaagacttgtggaaaaagcccgcaacgaacaactcccggacctcagggcagatg

SEQ ID NO: 100069 - DNA, 445 bp, Zea Mays
agaaaattgaagtgaagttcatcagaacaaaagagtaattgggggatattctcaccaagcctttttgcaagaataagtttgctgaattttgcaacaagattgctatgtgtatcaaggattatggggagagttgctaaaataaaccttggacacacttgtttcaatcttcagtttgtctatctattcattttcattctattgccggtgttcgatttcagttttgtttatatgccgctcctatcagtcttgtggtcaaagctagttggttgttagtgtaagcatgatctgatcgtgtgtagtgaggaagttagtgtgtatgcatggtgttgtgtttgtgtgtgaagtagaatcgcactaatgtaactagtgtcttttagttgttgcattcaatcaatgcaatatgaaaaaagctactgctagttagagcatcaccaatctgtgttct

SEQ ID NO: 100070 - DNA, 304 bp, Zea Mays
ctactaaaacttgagcataacatcataagcattggcattgcatatgtttgacacacttagagtgcattcactaggcaaaaatttcaagcaagttgtattgttttggtgttttgccaatagaaccctggaataggctacttaatcctaaatagggagtaagggggtaaaacatgacccaaattgagaaaacccaaaagctttagtagaatagtcataaaatgctcccaagaatgaacttgaattacatttgtacccctgggataccaaaaaccctaattggaaccctggaaaaccctaaatccaa

SEQ ID NO: 100071 - DNA, 568 bp, Zea Mays
tagtgggtgcagcgacatcctcatctaaatgtatttcagccaatgttccaaaaatcactgttccttcacttatttctttactgattatgacatctgtggcacctattttgatgttgtcgccggctgtagttttctctattttttagaacttgtttatagtcagtgacttaattgccacaaatgtggggggtttcccctatgccccctgccagaattgtcggcctttagggccaaatattctagcacgcttgctgatcttgtgcctgaataccgaattatggaattttcaatcggtcttgtactggtggagctagcctatcaaatactaaagcttatggtaccccacaagttgggtgaagtagaattccataaggatactatgggtgtagcgtcgctcctccccacacaggtggataagcaggtgggtaggcgagtatgggtggatatgatactagtgtatatgtgtatggtggatatgcaggcggtggatatggatgtggtagataaacatgtggtgatgtccttggtgttggtggtgtgggtggaaccagctggactacatctttgg

SEQ ID NO: 100072 - DNA, 361 bp, Zea Mays
ccggaattgtgcaattaattgtggggttaatgtcgctaggggttgaattagatgtcagccgagtcaggggcccggtcttggcatatttcggccagatcatgctcgctggagggcgcgctcaccactgttcgacgtcggggacttgtgtttgtaaagaaatagaaataggaggagctttacgtaaatgtcagtgaaacataggaatagtgcgtaggactctttaagggttatttaaaagatcagggtcctctacacaaagtgaaccccgcgggcgcgcgcggacgcgcgttcccctggacttgggccgactcgggccagtttcagcccaccactattcaccatttctctttttctttttctg

SEQ ID NO: 100073 - DNA, 668 bp, Zea Mays
gcgggggaccaagtcgtagatctttgccacccaattgtgtcgctggtgtgaccggagcatggtgaatcgctcgccggtgaagctttgctgccgcgctgcatgtgcagagacttccgcggcataacccaccgtgagtttcacttctacgagttcgcggtacttagggcattacgacttaccttgggattcagcgtttgggtgctgggtgcccgggcgcgttctcgccggagtttgtgctggcatggtctgtgtgggcggctcgactaccactcccgcgtggagaagatgtagtcactgccgtcggatcaccaggcaacgagtaggattagatgagatcctaccgcttcgattagttaatcgagaccgtcggtccgatcggatggcatgcatttaagatcgattgggtctgttggatcttgatccaaaaggtcatgacgggcgccagtccacttcggagtgtattaaatcctggtgctcggttatgatccaacggtccaggcaggccaatacccccttgagccggtgactttacagaagagaccccgcgcaaaatagaaattaacccgcagtacatctcagagatagattgagtctggagaagttttacgagttagcccttgtgcttttcggtattctgcgcgcaatccatagaaactgataaaggaaat

SEQ ID NO: 100074 - DNA, 461 bp, Zea Mays
taacaagcatccatcaaaaattaagcaaactaactctaactaagactgactagactaagacactgaactaagcattattacagactccgactgtgtcgatctagggatccaaatctatccgggtcctgcagtctggggtaccatagtcgaagcgaccacggggcggtgaacggtaagggtgcagaatcccgacaggggcgggagaaccaccatccagatagtggcgtgctgcgcactcagcagcaattccgcaacctccgcctgaaccttgcccaacttgtcaagggcgtggtccaactctatgttgagcacggcagccaagttgaccatgctgttcagcctaggattgccctcaccaactagcgaggcaatcacacctccagcactgtcagtcgaatggcaagggtagtacttcaggtcgaggccatcagctaccccgctgaacaacgagcaatactgag

SEQ ID NO: 100075 - DNA, 506 bp, Zea Mays
ggccggtgggtaagaacctttacctttttgccctttgacacagactcaactggggtggccgaagcaacagttttcctctttttttcctgtccccgcagcgggtagcggtaataggggtatacgaagccgatggcgtcaaaaactctgttcagtcttttctttccccgacctccgaaggctgcggatagagcattattttccgccttgtaatatgctccaagcagttcatcacttgtagcttcgatacacttcagccagtcgttgtttggctcatcaaacttctccctgaatctgaaggtatatttcagtcgaaccagtccaccttcgctagagtcggtggtggtctccttcggcatttcccagctgtctacaagcggccataccctgaaggctatatgttcttgaattaaatctcgtgtcccaataaaggagcaaacagtgctgaaggccctctgacacgcttcgactgtctcatcaatttctatcttcggccttcgaaggccgaa

SEQ ID NO: 100076 - DNA, 419 bp, Zea Mays
aaagaattgtccgaccataaaaggaagtaccaagggcagaccagcagaaacactcgacaaaacaactcccaaggttctcagttcccctctggaaatcagagtggaaacaacaactatcaagcacagcgctttggacaacaaagccagaggaacaatcaataccagaaccagcagagaagcaatactcagaccgaccgaaggtctagtgggcaacaacagaatcgtcatggaagcacagtgaacacaccagccaagaataacaatgcaactagccccagttcaactgaatggctgtttcaagtgtggcgaacttggccactatgcccaacaactgccccagacgtaacccacaaacaccccagaagaacaacaaccagaggaatgatcagaacacccctgctcgtggatctgcatagaac

SEQ ID NO: 100077 - DNA, 345 bp, Zea Mays
tacaggcatctcaaagtgaacttgcctttcatcgttggggagatcaccaagtgaagcaaccagagcctcgacttcttcgggagagggtcgcactctaatacccaagccactgtcgctagcaggaggattggacacaaaactgaaagaagtcttggaaggtggcagattccaggcagaatatgcaacaggagcaccaatattcgacaccttgcctctaaggatcatctccagtcatcttaccaaatccatagcaggaatcctcctgttggtaacccgggttgagttagtgacaccactatacaaaaaagtcgggtatgctctgtccttaagtggctgaatgttctt

SEQ ID NO: 100078 - DNA, 1019 bp, Zea Mays
gaagacttcagttttgagcatttgttgtgctagtctggctgcacccttaggcgacttttgcgcggatagtcttttgaggacgacttcgattttgcgcacttgttgtgcgaatccggctgcacccttaggcgacttttgcacggatagtcttttgaggaagacttcgattttgcgcacttgttgtgctagtccggctgcacccttaggcggcttttgcacggatagtctttttgaggaagacttcgatctagcgcacttgttgtgctagtccggctgcacccttaggcgacttttgcgtggattgtcgcacgcgagggtagctagcgctgcctctcgcggtgactttgtattggtcgaatgtcgaagaccgtcgatgcggtcttttttcgacatagatttttgcgggggatttttcgcttgtatattacatggctccgcctcgttaaaaacctcaccccccgggaggaaaagagtgcgggccagaataaaattgttttgcgaattacaagggtgagctggccctaaggagtcaaacaaaaaatttgcggagattatcaatgttccaggaatgctccaagtcctcgtcggatggcgttgcgagcctgtacgcgctgggggacgccttcgtcttgacgatgaaagagccctcccacttggactccagcttgccccgggactctgtccgagctgtccggacgagtacgaggtctccttcgctgaattccctcgggatgactgtgtggtcgcgccatgcttttgtttgggcttggtatttgtttagagcctgtagggcgaagacgcggtctccgtcgatgaggtccttcgaagtgggctcgtccacgtcaaggacagctgacgggactgtccgtggggacccgtgttttatttcttgcggggtcatggcctccaatccatatagaaggcggaaaggggtgaacccagtcgccctacactcagtcgtgtttaatgcccagaccgcttcaggtaacaaatcggcccacttgccctttttatcgtcg

SEQ ID NO: 100079 - DNA, 559 bp, Zea Mays
ttcgctttcgctgtgcagggagggacgaaagtgctaacgtgcccatgtgctggctacctagaggatatgcacgaccacctgtctacctgtgactgcacgagagatagagatgaaatgtcgttgtctagttgtacactgtgacactgggtacctgggcctaagactatgggctactactagaatatgcaaatcaaaattgatgggatagtgctccttgcttgttgttgccttattgttcacttgtgattaggccattaaaactttatagagctagcaaggcctgtatgctgaatatatgtactagtgtttagtacctggggtgaggccctgttgatctagggcctaggttagagtcactactcgaccccgccagggccagcgctaacaccaaagcacaggtctaaggcccgaccatggttgcgatttttctcacatgggctatggtgatgctgtgtatgggtagggtaggggctttctcgacttgtgcccatgttgaaatagtttcctggtggattatgaaacatgggtgttttacaataagaaatataccacatttttt

SEQ ID NO: 100080 - DNA, 481 bp, Zea Mays
gcatggcacatttaaattcaaattatctaaaactatagttgtcgttgtaacatatggacgtcgtaaatggattaatgatgatcttggtgcggtggcttgtcctcctgctcaactgggcaaatgccgtggggagttggccggtcaaccaaatcgggcactgattctccatgctgcctttgccggtttctccatgtgcgatctgatcgcgtgtccaaatcatctgcgcggtgatgtcattgcaagtcctgctgctgcggccgccaccaccggcggcgatgtgaccgtacggggatatttcttctcatcaccatgaacatttgcgtgaatattttttctcatcaccattccctacggggataaatctccaataaggatctatgtccctgtttaaattacaattaagacatacaccgtttatcattaatgtaaaacattttcacgttgttggacaccaaaatgagcggacggtccggcccatggg

SEQ ID NO: 100081 - DNA, 357 bp, Zea Mays
tgtatcctccttgagctttcttgaaaggtccaatcatatccagtccccagcatgcgaagggccaagtcactggtatggtctgcagttgttgtgctggtagatgttgttgcttcgacaagtactagcaagcttcgcacctctgaactaactcggctgcgtcattcttcgctgttggccaatagaatcctgacctaaagaccttcctgactagtgtcttggatgctgcgtgtattccacattgcccagcatggacttcatccagaagtcgtttcccggtagatgagagaatgcacttcatgaagacgcctgatgcaccccttctgtataatgtctccccaatgagcgtgtagtgagccg

SEQ ID NO: 100082 - DNA, 342 bp, Zea Mays
catgagtgagttaaagaaagtgtgtgttgcgttgttgtgcggagttgtaactcctattcatttgtaaaggctagcgagaggctcccagtttgtggagtacctcgtggagactccggtctctcatccgatcaaatagaggagtcaagctcgatcagtggaattccttgagtgtgttaaaagagactcggtcctttggaacacctcaatagagacgtaggtttcatttggaaaccagacttcggtaaacaaattttcgtgtctatttgtgttttttgcttgtgatttattttcctctctcgctctctaaagttatgttacttgatcttcatccgaatcattttg

SEQ ID NO: 100083 - DNA, 415 bp, Zea Mays
cttatcgggagaagaggtgttagtagagttggtcttgtcaggaccaaggaaagggagttgtcaccaagtcaccgcccgtattgaggagattaaaccatcagaggctatcaatgtagtgtcagaatttccagatgtgtttcttgaggagttaccaggtatgccacctgaaaggaaggttgaatttgccatagagcttataccaggcaccgcccctatttccaagagagcctattgagtgtccggcccagagttggtggaactcaagaagtagattgatgagttgacagagaaaggctacatcagatcgagtacctcaccttgggcagcaccagtgttatttgtggagaagaaggatggaacaaagaggatgtgcattgactacagatccttgaatgaggttactatcaagaacaag

SEQ ID NO: 100084 - DNA, 1142 bp, Zea Mays
ttgttattagatttttctaatacattttattatataatatggtcaaaattatactttgctgatatgcctatctcattgcccaaagcatctagcgttttccacattagagtgtatatagagattgttcggttgtatagtgttgacataataagtaataaaataacagataaaaggaaaatacatagaagaacaattttagccagtgaaaccagcgtgacatggaaatgtgtatatatgtacagctttattgatagtagatagttcatagtaatagtacacagagagcttgtaccgtcattatatttatcatattttgttgtactttcctatgatcattaaattacagtgtggagacataaagcatagttcatgcataaaaatggtctatatatcgatgatatgaatttgcattaagaagaactttgaagaatcctgcttactttgtgaaatatatattgtattaaaaatgcaattcgtgtgcacatttgtaaaattgttcaaattaattgtttaagaatgttgtgggaatgtgccacgtggtgcataaagattatgtcatcagctagccagagtagagcttgaccataggatttagtggtggtggtggattctgtataattcaggattaaacaataaagaacagaacaaaatcactatttagaaaacagggatcacattgaccaagggtgaccatggcctagcttagccttaagcaagctctacccctgcaattaggccagggataactgtcattgtagtggcactagctactagagttctttgtttcaactttggtttaatttacaagttagaaaatgcaattatccaaaagctatttacattgtttttatatggatgagccgcaacactagagcatcatgcattataatctacaaaagaaactccaaatcaaataatggattctaatacacccctaccctaccccaccggtaaaagagacttgacactacatttgttaccaacagttttcttatccatattttatatttcattatgctcaaaaaaattttctaaaattttcactagattgtgaacgatgtgtgtatttcacttgttttaagaaacgagttttgatactcaaggtttcaaaattttgatagtacactatcagaaattccatg

SEQ ID NO: 100085 - DNA, 1277 bp, Zea Mays
ccttaaatataggttcagctttctcatggaaaactttacttgatctaccatgtccagatcgagggttcaatataacaagtactctttgcggagatttgcatttaatcggtggctggtcaaataaagactcactgaggggattttctgagtcttgattgatactagatgctccaaggcgaggtagtaagttaacatatatactttgttcagcaaagcatgtcacccacaaaatggcctcgtcaagggtagaggctataaagcagaaatctttctgaactctgcatgtctttttaaataaagactttttagttgagtatgcatgcaatgtaaaatgtttgactccagaattatatgatacctgccaaaatataagcagagacaaaatatcagtaaagtgatgaaaaagatctaattaataatacagacacatgttattatctgacttacagagacaacatcctccagtaggagtacagagctgccccagatcagagctttacttgtgagtctagcatcaattgcatcagcttttccgtttgacggtaactgattattatcactcgcacttctatttttcttttgaagaatcagctttccagcatacacttcataacctagaaaattggacctctcatctgccacgtcaattttgtggtcatgttttttcccttttttagcctctttgtcgtcaataaccaagtgtttctgccttgaagatttcgatttgcttcttttctcttgagcaccggtcaaagaatgctgtccagctgacttttgagaacgcctactactcgaacgtcggctagatttctgggatgagcttctagaagtaggattttcaagctcggatccatccatttctgactgttagatagcacttcagaacactgattcaggcaatgaattccaaatagcttcaggaatggaggaggcatcacggatccaacgccatatgagaaggtcagtataattaagtaaactgcagttaaaggaaacaattattatatgcaaatgtctggtacatatataatgttatagtgggagcaagtgaactcctaagtgtcgttcccacaaaaaaaaaaacaagcaacctccttgaccaatctcagactctccgcattagtggggaagggttgcatcagtgtatcccttccccagtcccttttttagtatgaaaaagagcgacactatgcatatacctgctcaatctgaaatcttaagctcagcagtgacgctattaggtcatcatgcttagcttttcaactgccatcgtcaga

SEQ ID NO: 100086 - DNA, 380 bp, Zea Mays
ctggaaaggaaaacttatgtcggtaggtggccagttagtcttgattaatgttgtcctcacaagcttagttatgtttatgttgtctttttttgaagtgcctaagggtgtattagaaaaaatagactactatcgctccaagttcttctgtcaaggaggtcatcataaaaaagtatagacttgcacggtgggatattctttgtcaacctaaagaccaagggggtctaggtatttagaacatagaggttcaaaataactgtttgcttggtaaatggttatttaaattgattaatgaggacggtctatggtagaatttacttaggaacaaatacctcaaaccctgtaccttgtcaaaggtaggtagaaaatctggtgactctcat

SEQ ID NO: 100087 - DNA, 667 bp, Zea Mays
caacacttagggtttaaattttgttggaattttagagaagcccaattcaccctctcttgggtatcgtgatccttttacagatgataaacaatattattatgagatcaatgcaactggaagagataaaaaggagttaaaatggattaattatgaatttaataaggttatggaattatttctataatagaaaccattttcctatattaattacttgatttatttaagtcctgggctgtgggtataaattccagagagcttgggattaaattcgtaaatttcagggctcagttttaaatattttctaactgctgtggatggcaggttgaatccctagaaactcaatggctcttttagaaattctgttgtgcgaaggggtacgcggcgactcaggttgtcagattaaaatttcacagccacgattagttttccctgagatcaaatcggtctgtgccctgacccgctggatcaaagatcaatggcacacagtggcccgcgcctactcctaattcggcctttagatcccgatcggacagtgctaagcgtatgagatctgaaacctgcccaactccacacgattaacatccaacagcccagatcccctaacccgaaccgttgcacatgatccaaaccgaggcgttggctcgaggatcaatggtctaggcccgat

SEQ ID NO: 100088 - DNA, 938 bp, Zea Mays
gttttttgaatttccatagtggagttaagttgccaggttatctaataggtcagacaatttgccttctgaaatcagtagatacctcttaaagggtaccaccatcgcttcatattcaaaaaaagaccatcctaaaagttaactatgaaggacacatatcccatgatatttaagtccactatacaagtcaacctaaactgtacagatacataaggaaaatttgactaactgatgtatcagaactaagaatggagacacaattcaaggcatatgtgaagctacatacctgtatacaaagaatggcagctaatctagccttcgaactccggaagcggtctccactttttgcataaccatcactatcactcaggtctgagtctgatgagctcatatcataccaagaatactcactatctgaattttgaccttccagtgaatcattctctcttctctccttgttcctcaaatgaggtggtctatatcgtccacgtgaagctctgggttttgaatctgttctagtttcttttggagctagtgtaggaggtgaagatgacctcagcccatatacgaaaaatatctgcagatttgctacaaaccctgcaaccttgaagttttatggacattgttacaatcagaaaaaaaaacatgtagaaaatttgtttaaatgagaggactaaagttttattttatacttacatgccctgaaagtggtcctttgggatccacaagaaccaaatgtagacaacgaagaaaagatgtataaaatctgtaaaaattggttagatttgactttaccattcattcagttcactatgatctgtaatccatgaaataaccgaagtactaaccttgacatgatgctactctctataacaaggttccttgctgtgacaaaatccataactttcctcaagacctagaaagtaggactggagtttggg

SEQ ID NO: 100089 - DNA, 621 bp, Zea Mays
tagatcaggccttcaggggagccacccctcgctagagataagcgtcgataacaaccgctcctgtgtcgcctttctctcggaggatacacacccccaccagatgtctttggatccgaactttctctttaggtgtgacatcatggctccaactgaaggaaccctcggacataacagttcaatcaacaccaagaagctgcgaccccgataagggccctcgaccggtgcctatgccagcccttattagagaaggaaatggggatcgagatatactcatgtgacctcccgctacaacgacggatactggaaaacctaatttaccatgattctattgttatctgttcctccttccgcaacagctcgacgtagaagaagtatcgccataaagtgtagttgggcctagcgcctagatacccttcacacaaggcgatgaaggcaactatgtgttgaatcccatttggattcaaatagtgaagtttctgctgcaaatgcttgaagagggtcacgacgaaaggataaagggggaatgcgagccctcgcccgtggaaacaaacaaacgaaaccacgtaaccaaaagatagggtcgaggcctcctcaatgctcgaaatcagccatccgctatcg

SEQ ID NO: 100090 - DNA, 471 bp, Zea Mays
aggcagctcgagttgataggccatttccccaactcgcctaaaaactctaaatggtccaataaatcgaggggacaatttgcccttgacttaaaatctcctcattaaacgaagtggtgacaccttgaggtacacatgatcaccttcctcaaattccagtggtctccttctattatcagcgtagctcttttgcctggtctgagctaccctcaagttctcccggattatacagacttgttcttctgcctcttgaataagttgaggcccaaagaactgtgtttctccagtctgatcccaatatagaggagtcctgcacttcctaccatataaagcttcaaatggtgacatcttcagactagcctggtaactattattatatgagaactcaacataaggtagacttttatcccaacttcctccatgctcaagggcacaatctctcaacatatcttccaacacttgattagtcctttc

SEQ ID NO: 100091 - DNA, 472 bp, Zea Mays
ctggaggcaataaccaatggaaggtgggtctctaatgttaagggagatctaactgtaggggctctagtggtttacctccatatgtgagttacttttagaggtgacctgatatggaagacaaacaaattttcagtctagtagcagatgggaactactatgccaaatcagcatatgagggctttttctcaggttcaacttcatttgctcattatcatagggtgtggaaaatcttggctcctccaaaacgtcgttgctttcattggctcacagcccataggagatgctggactgctgacagattggccaagagaggattggatcattcattaaagtgtctcttctgtgatcaagtaattgagactttggaccatatcctggtggcctgtgtgtttacaagggatttttggtttcatttgctaaggcaatttggcttccaaaatttagccccacaatctgcatggatatcttttat

SEQ ID NO: 100092 - DNA, 301 bp, Zea Mays
gtagaagcaaaaacaccactactgaatcctgtactttaaacggtgatagcagcagttgcgttcttcgatatcttagtgtgttacttggtgatagcagcagctgcgatctccaatattctagggcatgtttgcctccctcttctaaacttagagatctaaaagctttagaatattttagctttcttttgatgtccaaatctctaatgtaagatgggctaaaggttaaagccaactttagaccacctgatgcatataaggaagaagggtccacatgcaccattctctgtggcataacaaaatc

SEQ ID NO: 100093 - DNA, 327 bp, Zea Mays
acaaaacctaatcaggaaaaggggcaccgcaagacctcaactaagccgacacagagctcagaacattctgcaactacaagaattagcaaaggaatctatttgtgaacacaagtaaagtagggaaaaagtcagctcacatgaaggttagaaaggaacaaaggaaatcccaaagctagaggcatcgacgtgctgtcgaacggcggggtactagcaaaagcaatattgagagcagactcgagccccaaaagaggatcagagctcgcacccaaggcagcactcagtgaaacctcagctccaacagcgtgcagcgaattcctagtgcccagg

SEQ ID NO: 100094 - DNA, 449 bp, Zea Mays
ctagcgtcgaaggtcagtggcacgtgtgaccacttcgtttgcacgactgggccggtgatggcgacgtggttgatgctgaggtagtggtccctcttttgtcgcttcatgtcgaagtcgacgctggaccctccagtgatcatgtgaatgactccgcgatatggttgatcatcgaagtattcctgtttcggtgcttggggtgattttggtggtggatgtttggctgatgcgggtgcagaggcagaagtgggggtggtacgacttgtacctcctggtggtgttggtatgcgtggttgggtagatgctaggcggggccgtggttgtatggttgtgggaggtggtgttgatatgtgtgcgcgacaactctggggttgtcggcgggctgtgcccgagacatcctgtccctggtagccttcgtttccgggcaattcgttgggtgcgcgcagtcttcg

SEQ ID NO: 100095 - DNA, 494 bp, Zea Mays
aaggaagtagatacggctattaaaatcttcagagtggtgggcctcatccagtcattccaacacttcatatatatacacatggtgtgtaatagatttccaagcgcaatagtatacagctctcggctgttgtcttcacctcggcagcttcatccccgaaacccattcacaagatacatactacacaagtaggctttgtaggtttgtaggcagcagcagggcgcctccaagcttcgtcactctagtagtctgtgtaagacatggagggggagaggaatgacatcaacgtgcagaggtcagacgagatcctcatgccgggtttccggttccatcccaccgacgaagagctggtgagtttctacctcaggaggaagatccagcagaagcctatctccatcgagcttatcaggcagctggacatctacaagtatgacccatgggatctcccaagtaagaagacaccactttcttcagaacttgacctttctgtggatgca

SEQ ID NO: 100096 - DNA, 660 bp, Zea Mays
gagaaaaataccccacgtgggtcaaaaaaaaccccgaacttctgttctactcatatacagcaacatcataacacatatgagaatggctgcgatcaagattgggtcttgaacctatgttttgttgtgggacatacgaaaggttttttgaccctagccttagggtctaaagaatactaatccgatcacctaaccaacttagataaagaccctttttcttggctcaaagaaggtgatgctaatacaaaattatttcatatgcatgcccgtcaccggaaaagaaaaaaatttgtggcaagattggttgctgacaactaggttttcactggacataatgagaaggccattttgatggatcaattctattccaatctgctgggtgtcagcaatgacagagattgctctgtcaatcttgaagttgtgggagttccgacctttgatctggctgctctggacttgcctttcttggagaaagaagtgtgggaaacaattaaattgctgccttcagataaggctccgggtcctgatggtttcacatgaggattttataaggcctgctggtctataattaaagtggatataatggcagcagtttggagtaggagatttgcgcagttcgataggctgaacacagcatacatcacattgatcccaaaggagggg

SEQ ID NO: 100097 - DNA, 555 bp, Zea Mays
gtgcgaggcaccagcgatgatttgctgatcgtcggagtctatgtggacgacctcgtcgtagtgggagcaaaccaggcagaagttgtcaagttcaaggacgagatggtgaggctcttcaacatgagcgatctcggaccactccactactacctgggcatagaggtcagccagagcgcaaggggcattacattgtgccagagtacctacgcacgcaagatcattgagaaggcagggcttacgggatgtaactcatgcaacactccgatggagccacgcctcaagctgagcaaggcgagctcaaatccaccagtggacaagactttgtaccgcagcatcgtcgggagtttgaggtacctagttcacacgcgtcctaacattgcgtttgcagttggctatgtaagtcggttcatggagaagcccacgactgagcactggagcgccgtcaaacatttgctgaggtacattgccggaacaaagacccaagggtgtgtttatcgccgcgggaaaggaacattggagttgatcggatacagtgatgccaatcacgccggagac

SEQ ID NO: 100098 - DNA, 477 bp, Zea Mays
aacaagtgcgcaaaaccgaagtcttcttcaaaagactatccgtgcaaaagtcgcctaagggtgcagctggactagcacaacaagtacgcaaaatcgaagtcttcttcaaaagaatatccgtgcaaaagtcgcctaagggtgcagccggaccctccgtgcaaaaaccgactacaggtacaaccagaccaacacaataaacgcgcaagatcaagtgcacaagtcttctacgggcgcggccggatcagcgaaggcacacaacctcatcacacaaattatagttacatacatgcagcgagggcatcacacattacatcggctcaaccttcgggatgatacccatctccctataattgaacaacattatcctcaattcatcgccctcaaacagacttcgcaactctccctcacctacactcgccccagccggcgaggacaaaaattcccgtttgctagccccgtccacacaaagacaaccac

SEQ ID NO: 100099 - DNA, 408 bp, Zea Mays
tctttaggtaccacaagaatgacacccactgcatgcacgacaaaaaggaaatcttttttatgtccgccgacgtttcctttcggtcaatcatcctttcagaaaagatacaaagtcactgcggaaaggccagagggttagagatgggcctccgaagcgacaaacaggtgaagatatcataagacaacatcatgacctaaaaccggcaaaggaggtgggtttgaagtgtacggtaaataacacaattggatgcacatctccattatctgggagctaccattcacaaatgcattgatcttaccccataacatagatttgacgcatcaggagcataatgttgctaaaagcatcataagcatgagcttcgacttcaccgattaatccaaacataacatccaagcaagaaaagac

SEQ ID NO: 100100 - DNA, 410 bp, Zea Mays
aaccagcatttggatcagggcaatgatgtgtgagtagaagtgaagtcaaatcaaaccgatgagaagaagatagcagcatccttatgtatcatgttgtctgaagattacttgttagagttgcactccagtggccggcaagcaatccacaagtgtcattttctccttgtccatccaggaagcaacaccatgcacagtgcactgtctgcgtaaccagttgtccctgtataatacgctcgctatgccccattggctaaaacctgtttgagtcttctgtatgaatgagtttattcgtgcctataggctataattgagaggccaactacccgggatcgcttgagcctgggtgctctgctcgcaggttgttttctcctaatacatctactaaagcaacaccacatacagcacactgc

SEQ ID NO: 100101 - DNA, 736 bp, Zea Mays
gttcaacatcatcaaggtcacacccattgggttcagcatcagtcgggtcacacccattgggatcagcttcggcaaaaaccggcactggcacttcctcagcagcaggagcataagggccgacatcctgattcaagcatgacactcgacgaagatgtctctttttcttcttcttcccctcagcaggagaagttggaggattggttcggcgaggacgcttcgggcgaatactatcagacctctgagtatccaaagctttgccagactcggggatgggtgctacaaccagtgttttagcaggggctgcatcagaggaatcttcagccaacatgtctagcatggcacttatttctgcgtcactcggattcaaaggcacctcgaaatgaacctatttctcgtcgtcggggatttcgccaagtgaagcaaccaaagcctcaacctcttcgagagaaggtcgcactctaagacccaaaccgctatcaccagtaggaggatttgacacaaaactgatgaaggccttggaaggaggtagattccaggctgagtatgcaacaggagcaccgacattagacaccttcctctgagtatcatctcaagccggctcaccaaatccacagcaggaatccttctgttggtaacctgggttgaatcagcaaggcctcgatacagataagctggatatgctctgtcttttagtggctgaatgttcttgaaaacaaaatcggcaaccacagcctcg

SEQ ID NO: 100102 - DNA, 398 bp, Zea Mays
tgatgatggtgtttattgctactgtattgttgacagatttaaggtatccattccaatggattatcaggagttgccagtgtaacttgtttttccactaagtttttttcagagaacatgtgcctagtcaatggtcaattgttccatagaacgtttaataagttctgaaatttaaacaagttgggtcgctgactcgctgttctttggtttagtttaaaaggaaagtatctctgaccttggaatgctctataacggatagagctatattgactttttttaaatcgacctacctcaattaaactggatctttttgagttgatcttataaaaaccatgtcttaattggatagaattttatgcatacatgagagtaggttaactgattatgtggcctgtttaatt

SEQ ID NO: 100103 - DNA, 497 bp, Zea Mays
attttccctaacacttttcagggacaaatgttgtagcactagtatccttcatagtttactaaccccagtgttgtgccatttgctcacctcatgtcttattattgaggtagaacagaggcctggagaacacgtggctcatggattccggctatttgtgccacatgactgaaaattctaaatggttctccaacctcgaccccatgattggtaaggaatacatcacattcgtggataagtcaaaaggtaaggttatctctcgtggctctgttcgagtgaatgagagttttgtcctcaaggatgttgcttttgttttaaatttgtatttcaatctactttctgtttcgcaactccttaaggatgactacgaagttggttttaaaaatggcctttgtcgggtttggatgcttggggaatcttgtctatcagatatccccatttggttgagtttttcgagttgttttttcacattcttctgggccttcttgatgtcacttggt

SEQ ID NO: 100104 - DNA, 1506 bp, Zea Mays
atttattcttgattgtcacttgattcaaagcacgataatccacacataacctcttgcttttatccttcttctcaacaaacaatactggggaagcccatggtgacctgcgaggcctaatgaaacccttagccagcagatcatccaattgccgcttcaattccacctgctcctttggagccatccgatatggggccttatgaataggatacgtacccagaatcagtttgacttcaaaagccgcatcgcgctccggtggaatgcctagaagctatgctggaaacatgtcggcataatcacacaccacacggatgtcttgcacccgcaaggcagcctcactctccatcaccatggagaaaaagattcccgacttccttgaccgacgatccggaagcaattggacaacaaggataatgtgaactttggagaacttcccaagaatagcacctccctacccgacgacgcctgcaataacactatcttccaaaaacaggatataactgcacgatactaagataaccaatccatacccaagataacatcaaatgcccccaaggaaatcaccacaagattagctgaaaagacctcatcagcaagaatgcgaaacaaccctgacatactgaacaactaataatggagccattagcggaactgaccacaattgggtgacccatcctctgcaccgaaagaccagcacgcgacacaaagttctctaaaacaaacgaatagctagcgctagagtcaaaaagagcatgggcaacaaacgaatcaactgagaccgtacctgtcaccacgtctccctgctctctgccatccgcagagggtagcacatatgctctggaaatacccgcaaaagaggaagctcccagagtgaagttaacagaagaaccccacggagtcgctggatgaggcagacacagagctccaaactgggatggtacaggagtggtcggtgcaggagtaggcacagccagatactgaggaaaatcctgcataggcacgaactgagaagtcccgggcacataaaactgccgcggagggggtggtactaaaaattgctgctcaacgcttgacatcatgttgacagtgccctgagaagaggaagaagtcactggctcccatttgagcttcccattgggattcctcctacacaccacatccttgtgatcctggctacaaatagaacaccttccactccactgacactcggcacggcgatgcgcttcaccacaatggaagcaaaccagccccaacccgggcttaggaacagcccgatacctctgagtactccctcctgtagtacccgaatcagaggattttccacgacaggggtagtgacgctggtgttgtgactttcccctcttgtgggatggacccccagtgttgcccctcctcgcgtcctagccacgaagctgatcaacacccgaagacttctgagactccatgttgtactgatgttgcatctccacacccaatgcctgctccaccgtagtacgaaaatccaccaac

SEQ ID NO: 100105 - DNA, 366 bp, Zea Mays
ggacaacgtggggcctacaatgacatgagaaagccaggttgtacccatcaagcctcgaggctgaaccatggggacccccgcacatcatcatagggatgtcaggcatgaacccatcacaggaacgagagtgataagcagcaccataccacaagcattgttttgcgcaatcgaaggagggggcccaccatgacaaccgaaggattttttctccctcaaactcactctctccttcgatttgtagaaaatagaccccctctgtaagaaccgacccttgagatataaaggacaggtcctctctcttcttaagacacaagcacaccagttgtaacacgctccaagtaatactatgatcaacactcactggac

SEQ ID NO: 100106 - DNA, 281 bp, Zea Mays
agattggttttactatgagttcaaggcaggaagcttcatcggatcaaagcatcttttgtttggtgtggtatacgagctatgactggaaacctggtttcatatttatatataggtctatggctaccatttgcatcaattttgttttgttggtgtaatctaggaggtagttgtctatcaatttggaatcaatccattttagccctttcaactgtccgcttgttcatgcggtctaattccatccctgagctatgagatgcctcgattaccaaagtgtggataac

SEQ ID NO: 100107 - DNA, 380 bp, Zea Mays
ttgctacgacaattcttaggaatcaaaggggaaacttcttcttcatcttcttcatcctcatcaaacacacgtccaccgactctggtgccaccacaaatctcaatatcatcctcaaggttgccgctcgccgggccaccaacaaggactggggcagtagagttagcccccagctctaggccagatgaacaccgaagtcttccctttcttttcttcccctcagtagacacgactgggtggcccgatcgacacaatcatttacaacgagcacctccaggactgcaagctccttcatcctcactaaagacacaaccagttgcagtgctcaccaattcagtacgggcagactcagacgactcgctcgctagcatattaagaacaac

SEQ ID NO: 100108 - DNA, 271 bp, Zea Mays
tatacaagttttacaattatttttatgctcaaaaacaatttctaaatctctttttcctattttcattagttcctggactgggcacaatattatcagggaacacaggggctattctataaaaatgccttagactcagaagtatcccgtaggggacggcgggtttattatgtgatttccaggggggtctttaacaaaatgccaatcacgaaacagtatccaagcacactagccgttggatcatcatcaggcggtcctgaacagcccgcactgg

SEQ ID NO: 100109 - DNA, 340 bp, Zea Mays
agaaggtagtggactgggcaagccttaagactgaagcatgtataaaagacaaaacaaatttggtaactggtttgagtaatagacaactggtgaataggttggcaaactattattcaaacgttacaactattttacttattaaaatcaagctggtaaagcaggatgtcgtagccaaaaaaagcagactgagtaacgaaatcagacatgtctaattgaccatgtagttccattctctaaacaaccttgtagagatacaaaaattcaaccaatcatgtctcaaaatgcttgcagcttccatttttctctagcttttgatttgtcacgacacgcagaaatagaa

SEQ ID NO: 100110 - DNA, 1282 bp, Zea Mays
gcttctatcggaacaacaaaagaaaaggttaaagaatcaacaacattcacccacaaagaaaagttcgagatatttctgccgcattagctcctcaagttccaacgtagcctcgcgcttagactgattagaccacaagaccttaacatacttgattgatctcttcctcaaaacacactccgaggattctaagatacgcaccggacgactctccagagtcagatcctggattccagtgattggttccatctcgatctgatggtccggatcctgcaagaacttcctcagcatagagacatgaaaaaccgggtgtacccctgccatggaatccggcaattgcaagcgataagccaagttgcccacccgggccaagatagtgaacggtccaatatatcttgggctaagctttccggagacaccgaaccgaacaactcctttagtgggtgataccctgagaaggacttggtcacccactgcaaattccaaatcccgcctcctcacatcagcataactcttctgatggctctgagcggccaaagtattctgacgaatttcccaaaccttctcagaagtctgctgaacccaattagaaccaaccagggatatctctcccaaagtctcccagcacagaggggagatataccgcctgccatataaagcctcaaatggtgccatctttatgctaacctggtagctgttgttataagcaaactctgccaatgcaagatgatcttcccagctacccttccaagacagaacacaagcacgcaacatatcttccaaggtttggatcgttcgctccgactgaccatcagtctgaggatgaaaagcgacactaagagaaagtttggtgcccaatgcactgtgaagactctcccagaatttggatacaaatttggagtctcgatcagaaacaatggacttaggtaccccgtggagcctgattacttccttcatatacaaggggaccaattctgaagctgaatttgtggtcttcatgggaataaaatgcgcagacttagtcaagcgatccactaccacccaaatagcatctctgccccgaggagaatgaggtaagcccaccacagaatccatggtgatgtgctcccacttccactctggaatttccaatggcttcaataatcctgtaggcctcttatgctcggccttcacgcgctgacatacttcacaggcgaccacatacttagaaacgtcaaccttcatccgcttccaccagaagttttgcttcaaatctcggtacattttggtttcgccagggtgaacg

SEQ ID NO: 100111 - DNA, 414 bp, Zea Mays
gccagggtaagatccactgctagggtgtctcgtgaaggagaggagaccgaaatcaccgaaacaacaccaatttcagaagtgatgaagcggttgggtctggttgtgtcagaggaagttgctgccgaaggtgcctccaatgccgaagctgaacagattgtagctggaggcaaaagtgacaatgaaagtgaagaagataacagtattttgagcccaacaaagcctagccacattgagtttgggaaatctactgtaacagaggatgacatggttatgatgaggaaacttggctatttcggggaggacgagagcaagcttgtccggtttgctagggaggaaatagttccggaaccaaaagaggacaaagttgtcattttcaagagcttcttcagagcaggacttcggttctgcttaaat

SEQ ID NO: 100112 - DNA, 782 bp, Zea Mays
gttcggacgggactccgaagtggcagtcaatgttttgccagaagaatttttgagcggtcttcgaagttattgtgcatacttccctggcctcaccactttgtgaaatattcaatggcgacgaaggtgaacttgaggttcccttgagctgtggacagtggtccaacgatgtctagcccccagcgttgaagtggccatgtatgggcgatgagcttggtgaattgcgaagggctgcctgagcgaggggagaacttttggcatgcttcgcatgaccttgtgactcgatttgtggtacaaattattgtgggccagtagaatccctagtgaatcaccttggcagcgagggccctgggtccttagtgggagacacaagttccgctgtggacttcgtggaggatttttatgccttcagtttcagttatgcacttcagcatgggctggccgatcccctttttgtacggctgaccctcgactaatgtgaagtctcagcttccatgctttagtcgtttggcctcattgcgatcgcttggatggtagtggccttgcaggtacagtgttattggggcctgccagtcttcggccatgatgaggttgacgatgcggtggccttcggtgtactgggttatttgtagaccttctgggttgtggacagctggcgtgccgatgacgtggtagaacacgtcggagggcaaggcctcgcccttggccgctgccttggccaacacgtcggcctcttcgttcttggcgcggtcaacatgttgcagggtgaaacccttgaattgtcg

SEQ ID NO: 100113 - DNA, 320 bp, Zea Mays
gtttgatggaatgccgcacggggacgtgttcgcacggaccgccgtgatgtaaggcctgtacggtggtggtgttggacctggagtcatcatgtcttcacgagtcaggtgcatcgtctcgtgtgttaagcctgcagcagcgttttgggtgacccatgtatgccttggctcgtcccgaatgctgtagggacttgtgaagtggacactgatgaaagaacgactgccagccgttgccaacagatgcatgcagtgatgcatcatggaatgcccctgctcaatgtcaatggggctggaagtggaaactgggaaaaactgacgctgac

SEQ ID NO: 100114 - DNA, 352 bp, Zea Mays
tgcaaaccttgcagcacccctattgatacccacgccaagttacctacagatggtgttccggtggctgacccaacacaattccgcagtatagcaggtgctcttcagtatctcaccttcactcgtcctaacattgcctatgcagtacagtaggtctgtcttcatatgcatcatttgaaggagtctcatctcaccgccatgaagcgcatcctgtgctatgttcagggaaacttggaccttggttttcatcttaactggacctctcttgatgacctcacagtctattctgatgctgattgggctggttgtcccgacactcgtcgctccacgtctggctatggtgtgttcttgggtg

SEQ ID NO: 100115 - DNA, 308 bp, Zea Mays
cggaatgttgtctgctgaggtgcgagggttcaagattagtccatgcagttttagggagcagtgggaattggtgctctggtgggtgctgcacaagtgcacgatgattttgtgctgtgaattgtttcaggagactggtgcttcaagagatttcacagattcaggggtgatcaccgagtagatggtgcctccattagaggaataccaatggattgaacgtttcgtgttgtgggttggagaatgagtgaactctgagttcatatgatagggtaatgtgacttactggaattggttatgccatggaaagggaa

SEQ ID NO: 100116 - DNA, 570 bp, Zea Mays
tgaaaagcatcatacgctccaaaccatagaggtaggtcctctttagctattaaccaaaagttcattccttgcaacagaaggagaatactcccaatgtttcaaggatccatcagaattgtacttaagcaagaattgaactatacccacacactattgttctttcttagcagagcagttatgacgaagcaggtgaccagttccagaactagatttaccacttaaagtaaccttacagtacctgcaaacatcgccataccttaccctcttaccattgacgatgtgggtcagttcatcaaagtcgttccacactttagatctgggaggatgcttactagaacttgtggtagcagtgcttgtgccggtcggtgtcctgtggttgtctgaccaccgacacaaggaagaggggggcatcatcgatgttgatggcagcactgccaccaaacaaggccagagcatcctcttattcgttatggtctttgagccggtactcctcctccacaacggccggatcaatatcatcgtccatgccatagaaagctagaccagcgaaacccccactgtctgtccagc

SEQ ID NO: 100117 - DNA, 437 bp, Zea Mays
gtagaagcatgttgcatgggctgatgcaaacaagtcattttaagggcatttgactgcatccacccgtacacgtgaaacgtttgtatccggtcgaccaggacggcgcgagcgtgcacgtccacacgcagccatccaatcaggtcctatatatttggactcagtcttgtatatgctcatgcaatgttaacctatcaacataattgcattcttatataacatgataaagcgtgcattgtcaacaacaaagaaaatggttgacccgtgtctccctcttttttccccagaacgtctcacaatgtattttattaagagcatgtagagataatttacatgacgcggctatgaaagactccgcagtgtatattatagaatcgcaaagtctcccattgctgacgttatacatcatttattcggatgatgattaagatgatcacgat

SEQ ID NO: 100118 - DNA, 473 bp, Zea Mays
agctaggattcgggaaaggaagacaagggacctcaaccaagttaaatgaattaaggatgagatggatgaactcttggtgaaaggacaatacatcaaacagaggtggcagaggtattttgacaatcttttcaatggtgagaatgagactatggacacccaactatatgactcctttgatgatttaaatatatgctttgtacgtaggatccaagaatcagaggtcaaagaagctttaaagaggatcaaagggggcaaggcaatgtgcccgacagaggtgtggaaatgccttggggatattgttatcttttggctaaccaagttgttcaaccatatttttcgatctaacaagatgcccgatgagtggagtacattagtaccaatcttcaagaacaagggagatattcaaagttgtaccaactatcgagggattaagctcatgagccacactatgaagctatgtgagagagttattg

SEQ ID NO: 100119 - DNA, 271 bp, Zea Mays
tggcaacatagcttctgatccatataccatgaagaacggagtgttgccatgcaaggcccggctaggttgggttcgcagactccagactacatacggtagttccttgatccacttggctatgagcttttcactcttgtcgaataccttcttcctgagcgcatcaagtatcatctcgttgtctctttctacctacccattagttctcgggtgtgccactaacgcatgcttgatctggatgctcctcttcttgcagaaatcaaagaattctaag

SEQ ID NO: 100120 - DNA, 373 bp, Zea Mays
tcttggggagacatctgtctttttatgccagaaaataaaatctggttcttctgttttgcagtttcactttcatttgcattgatttggcaacaaggaattccatagtactcacaacaacaacatgttccaaggtcacttgtctgttggtttagttgtgcatccttttgtgtcttgaatgtctgttcatcagctgttttatttatagtgttgttttgacttgccaacacaccgcattctttgcacttagtgacatcatttgtagttgacattccaaggtctaacatatgtatgggtatggaagaatggaagggacaaaagggttgagcaaatacagactatagagagcagagaaaacccatctatctaaggtttt

SEQ ID NO: 100121 - DNA, 579 bp, Zea Mays
ctcggccgagccctcatcccatctcaaccggaacgaccaagcttgcccctaggctataaatcgggaccgctcctacccttattcaccatgctcggcatgcgcagcaaggaggaattggggaggagagagaaaaatggatgtcgctgtgccttgattcgtttacaccgcgcctgtgtctgcggtgtatggcttgggcgatccattttgtcatggtgaagatatccctggcatcaaatcaatgggcggaatccccggtggtgcgtcgatttctcgtcggagacgaactccaccacagatctgtctccggtcgtggtcatgttcctgcgcttcatcaatccgggtaagatgccctcttcgaaattctcccttgtctccgttacgatttgagctcgttaccgttcgattacgtgcaccggggctcgagatttccttcaccgtcgtccgctccctgccgtggccgactgtgttccgccgtttcttccagaaaggtaccccaacatcgtgttcggttgcttgtccgcattgagaagaacccttctcttgtgtagtctagctcaccgtgggcctggtaaccatcgc

SEQ ID NO: 100122 - DNA, 600 bp, Zea Mays
gtagaagcacataacatccccatagaaccaatgattccacctttaagagttaaatcagttgggggaaaagtttagtccgataggatgtatccaaatctaaggattgaaataagggggatagacttccccgctaacctagtagtgatgggtactcaagggttagatgtcatcgtagggatgaattggctatatagaaacaaagccaccgtcagttgtgataagaggacagtcaaattggtgtccccatccggaaaggaagtagtaactgaactgtatttgcctgaactagaagaaggagcttgtcactatttgttggtagatgacaaggaggccaacccaattgaggatattagaattgtgtcggagttccccgatgtgtttctcgaggagttaccaggcttgccacccgaaaggaaagttgagttttccatagagcttatcccaagcaccgccccaatttccaagagagcatatcgagtgtccggaccagaattagtggaactcaagaagcagattgatgaattgttagagaaaggctacatcagaccaagtacctcgccttgggcagccccagtgctatttgtggagaagaaggatgga

SEQ ID NO: 100123 - DNA, 432 bp, Zea Mays
attttagagagagaccgaaggagttagggatggagagagcaagtgagctgatgattaccttggagaaggcacgacaaattcttttggctggtacagcgaggagacgggatactcggccagatctgcttgggcagcgaggagatgggttcctcgcccaaaattttgttgccaaagaatgcttgtggtagtgacgggatgacacactaactagttgtggtctagtgtggtgcacagaatgcggtcgatttggtgggaaaatggcgagaggcagcaaaaattaagcgccaattctcaggttgggaatgccgaagaggagagcaagtttggggagaagaaacactggttttggatatgcgtaaatatcaggattaatttagaaaacggttggatcgtagttttttttataaagatatcctaaatcaaagtttaggc

SEQ ID NO: 100124 - DNA, 552 bp, Zea Mays
cttaccccggcccccgaaggctgaggataaagcatcatcttcggctctggtatatgccccaagtaattcgtcgctagtagcctcaataaattttagccagtcgtcatttggtttgtcaaacctgtctctatatctgaaggtatatttcaaacgaattaatccaccttcactggacccggcaatagtctccttcaacatctcccagctatccacaagtggccataccctataggctatgtgctcttggattaggtctcttgtgccgatgaaagcacagatgttgctgaaagccttttggcatgcttcggcgtcattatcaaccgccacgatcggccttcgaaggccgaagcgagaccagatggcgcgttggatgatcccctttatgtcctccctttcaatcaaattgttcttaacataaatccattcctccatccaggacctaggccaccttttccaaaatgttggaaccgggtagcttgcattagagcgatcaatgaatccataacaaccgaagttgttgtgatactgctctttgccagtggccttcgtctc

SEQ ID NO: 100125 - DNA, 416 bp, Zea Mays
atgaaagggaaggtagagaaaggcaagaagcatgtatgggaaggtcctccggtgttgatggttatgaatgcattgatgttatagttgcgtttgctgtgaagaccacctaccagatgagtgttttaatatgtgatataacaaatcctataatgaagatagggagcttgtatgaaggaatttatacttgctatgaggcatcatgaaataaacaatgaattcgagttaggcattgaatccagtgcgccttttcgatatagaggatactgtaaaggtggtgactgtccatggaaacttcatgcaaggccagaaacacatggatcaaataatatcattgtaagcttttgaccattactcgttaagttctaaatgttaattcaagtgtgactttaataagtacattttgatgcaggttacag

SEQ ID NO: 100126 - DNA, 1220 bp, Zea Mays
tccaagatgtctgtcccgtggaaagaggtcgtggcgctcgtggactcaatgaaggaggacggcattgagcgggacaggtatacgtacaacacgctcattagttgttgccgtcgaagggggcttcacagggaggcagcgcaggtgttcgatgagatgaaggctgctggattcgaacctgacaaggtcacattcaattccctgctggatgtatatggtaaggcgcggaagcatgaggaggcaattggggtgctaaagaggatggagaatgccggatgtacacccagcgtggtgacctacaactcgctcatctcggcttatgtgaaggatgggttgttagaagaggctctggagctaaaacaggagatggagttcaggggtatgaagccggatgtggttacatacacgacattgatctctggccttgacagagttggcaaaattgacgcagcacttgctacatacagtgaaatggtgaggaacggatgtagcccgaacttatgcacctataatgcattgatcaagttgcacggggtgagggggaaattcacagagatgatggctgtctttgatgacctcaggtctgctgggtatgtgccagatgttgtcacctggaacacgctcttgtccgtgtttgggcagaatggtctagattctgaggtttcaggggtgttcaaggagatgaagaaagctggctatatccctgagagggacacatatgtttcactaattagttcatatagtcgatgtggtttgtttgatcaagcaatggagatatacaagaggatgatagaagccggtatatatccagatatttcgacttataatgctgttctatctgcattggctcgtggtggtcgctgggaacaagcagaaaagttgtttgctgagatggtggatcgagattgtaagccagatgagctcagttattcctcattgcttcatgcatatgctaatgctaagaagttggacaaaatgaaaactttatcagaagatatatatgcagagaggattgaacgacacaactggctagtaaaaacattggtcctggtcaataacaaagttaataatttacctgagacagaaaaggcgtttcaggaactgaggaggcggcgttgctccctggacattaatgttcttaacgccatggtatccatatacgggaaaaataagatggttaagaaggtggaggaggtcctttcactcatgatggagaattctat

SEQ ID NO: 100127 - DNA, 844 bp, Zea Mays
atgactagctcattgatttcctcaccaaatcacttgggagggtcaagtttcaggagattagcgatagacttgggatggttcaaatccctctagcggcaccacacaacacttagtgggagaatgataggataagttcagtgatgatatgataagtcccgtgcctatgtcagcatcttatctagtactttgacatcttaccttctaccttatctctaatctagtagttgaaattttatctctactttcagttataacagaccacttggtcctatatatgtaaccataaccagccatgtttcaaagtgtggcataagaaatagaaaaatctgccccgaacctgtgctcaactccaacaaagcgtttggtagtgtcgagaaagctcacttttcttggcaagcttgctcggctcagcaaggatttccttgcccatggaggagagccgatatgacgctcccgcatgagcaaggtcttactcgctcgtgttcagccgatggacttagaacatgaaggtgaaacgagtcatggcaccagccttgagggtgcataggataaatcaagttttgatgcagccaactagaggccgcatggtctgaatcaagatcctagtaagtcaacgacttgacgagcagcccttggtagaaacatcgtgctgccccaagtcgcctgctagtcctcaaattgaacgtcctgatgtagaccaagctccgtagtgcccaatagagatccttgatgcccaacttgattcatcttttgagatcttccccacgtagatcaagctgctccttccatctcgccttgaatcaagcttgtctcgtggaatcaatctcttgccaagcagaatcgg

SEQ ID NO: 100128 - DNA, 452 bp, Zea Mays
gtccgattacgaaatccatgcctatttcttcccacttccatttgggcactaggaggggttgcagtagacctgcaggcttctaatgctctgccttagttcgctggaaagtatcacaccgggccacatactgggctatctcctttttcatccctctccaccagtatctggttttgaggtctaggtacatcttggtggtccctgggtggatagagtaggctgagttgtgggcttcgtcgagcaggatttctcgtgcctctccctttggtatacacaaacggtccctgaactaaagggttccttcttcatctatcttggggtctgggagttgttctttccgagcgctttctacaagacttgccgtctcggtgtctcggcgctgagccttgcgtatgaggtcttctagcattggcttgacttctaggctgccattgtctcccaaacaagcatttagt

SEQ ID NO: 100129 - DNA, 392 bp, Zea Mays
ctgacgattggctgcgcacgattaaaagaaagctggaagccatcgtatgcctagaaaatcagcgtgttcaactggccgctcatcaactttctgggatggccttagcctggtgggataccttcaacgtcaccatcagagatgctacctgggcggaatttgaaacggcttttcgggagcaccatgtgccccaagggctcgttcagcttaaggaagacgaattatgggaactgactcaagacggaagatctgtcagtgaatatgtgcacaagttcacggagttagcccgctacgcgccagatgacgtcagtaccgaagtcaagaagatggctcgcttcttgaagggactcaggccagaactcaagacaattctggctagccaagacttcctcagt

SEQ ID NO: 100130 - DNA, 483 bp, Zea Mays
ctcttctattggtcggctggcctttttttattaccttctcaatatctgtacgtcttttcacctactaaatatatattgataacatatttttcaatgtccttttttttgcttgtttctacaagcatacatatgttgctagaattttcatgtatatacttaccagctatttttctgatacacggttgctacaactgcatgtaatgtcacgatccaaatgtttttttacacaatttaattgaaccttaactaattttagttaaaaataaatagaaataaacctgtttcgatctgatccttaaattttatagtacaaaacatagagtccattaccaccccaagctgcatgtggttattacaacaggttgtacttacaaatcgttttgtttttatcagccaacagaggaatttatatttataaaaatctatttctgttagaaagtgtaatgtataaggtatgtctggttcatctttctgaagcaaatt

SEQ ID NO: 100131 - DNA, 334 bp, Zea Mays
gcggagtgtcgcacgcgagggtagtctacgctgcctctcgtggtgacttcggagtggtcgaatgctgaagaccgtcgatgcggtctttttcgacatactgtaactgagtttttgcgggggatttttgcgggtacattacatggctccgcctcattaaaaacctcaccccccgggaggaaaagagtgtgggccggaatagcactgtttggtgaattacaagggcacgtaggccctgaggatttaaacaaaaaatttgcagagattgtcaatattccaagaatggtctaggtcttcgctggatggcgttgttagcctgtatgcgctgggggatgcc

SEQ ID NO: 100132 - DNA, 807 bp, Zea Mays
gcagtttgccttgcccactaataatctgactaaaaatgttatttttcaagttgcacgttcatgtgactatctgatatttttgcctttctggttggctggggcctagggatggacttattgtgatgttgatgtgcctgtctttggttgttgctgtgtccttgtgtgcagacgtatagtatgagacagatccactgagatatgagatattataaatccattgtcagtcattcatagagcaagaatttggtcagtgagaaatttaacaacattatgcgaggaaaacaaaacgaaattctctgggacaaattccatgctgctgggtctattttcttccctctagtgatttctcttctatatcagtttgccttctccgtcatagtaaaacttgtctgtgaagtcacttcggacctcagaactcaaattagagtattgtgtgtgtacatagaacaatcctcgtcaaatttgccggctaacatgagatgagatgctatgcatctgttttctattgtcccagtgcaaacaaaaagtacaatcacatgtcatagatcgcagtacccaacaaaagttgctgttgcgcctttattgtcgcttacagttgatgcatttcttagggcccatgatcaacagaacatgagatagtgacgaggcatttaaaatgcactgcagtttggctcatgatcggacagctttataaaccaattgcatagatacagatatagatctgtagacatttcaaagtcttaaaatgcttcgactaagatatggagaatgactgatctgtaggaatataatctaaccatgatgaag

SEQ ID NO: 100133 - DNA, 531 bp, Zea Mays
cgaatgttagattgaatagtgtgtttgagctgaatgacctccgctatggcccgtatcctgaggagggatccactaatgttggggatgccaaggagcgcaagaagaaaggtgggctcaagtgtggtgaggtggatgaggggttctcctagggtaaggctatggtgtcgctagtgaggaagacgaggaagttggagaccatgacaaaggggccggcgaggatggctggaggtgcggaggcctcaaacaagtttgctgaggagctagccaagatatgcactaagccgggagaggtcatgacttcgcatgtcctgcaggaagcatctgctcggatgctggaagtgactgaggctgagtgttgtagagacgatcacattcctttggcttctggtgaggacgattctacgtcttttctagcttggtatttcaaagtttttcctgatgggcagaatgttggcgttgttgtaagagctatgatagacaagaaccgccatgagcctacgaaaaagaagaggaaggctctgttacggctag

SEQ ID NO: 100134 - DNA, 463 bp, Zea Mays
gcggtggcatgctccctgtgcgacgattcgccttcttcgcgcttcgggccagcttgtatgacatgtgaggcctggcccccgtgtcataggatgggaaccctggtgcgcatcgggggagaccttgcccgtgacgcttcggggcgcgagcggggaaatctgcctttaaaaaggggttcacccctcgagtagcagccatgtcttgcttctctcccactcgcggtgtcctttcacctccgagctccctgcgcccttttgccttcaaggtctctacttcacgttgtcgtagtttgccatggccttgtgacttcatcccgagcacacccagactgagtgagtgctcgaaatggtataccgcctgcttggatggaatacgctggtatttgccgggaggacttgtgctggtgtctctcctctcgacgacctttctgccaaagagtttgtgttctttgtttccaaactcccc

SEQ ID NO: 100135 - DNA, 610 bp, Zea Mays
caccatattgattccataggaaaaataaaatgagctccgacctcatggaaaaaatccaaagaacgctcccacgcttggctcaccctcccgtgcttgggatgggatggaatggagaaacactcgtccataaataactacttgcatttttgcataaggctgcttacatttttgcataaggataggcagcttgcatttttgcataaggccggtcctaaaacctttggtttactgttgttgtaataattataatatatgtgtatgcaataacccaacggctagagagcctgagcccacatgaccaagcaacggctagtttgaaacttaaaaaattatatttcaactactttagttcctttattttttttcctgtggtgccaaacaagtcatccaccaacttccttcggtttttaattccataggatcctagaaaacatatcttctatttcctgtgtttttcctattcccatgtttctgaaatcccatgttccaaaggagctgggcttaaagttgtatgggccagagcacagaagcccatctagggctatttcagagggcttatcccagctccataagtacggctccctgctacagttacatggagctgccagag

SEQ ID NO: 100136 - DNA, 467 bp, Zea Mays
cttattcttgatagtaacttcatttagggatcggtaatcaatacacattctcatgcttccatcctttttggtgacaaacaatactggtgctccccaaggtgatgaggtgggacgaataaaccctttatgttgaagttcggtgatctgaagcttcagttctgccaattttgtgggtgccatgcgggacgatctctttacaattggtgcggtgcctgggaggaggtcaatgtagaattctacttctctttacagaggcattcctgacaactcttcaggaaacacatccatgaattcttctaccacagatatgccttctgctgccaggctgaacaccattggatcttgggtcggcggccgagctttacacgaaactaattttccatggtggtcggtgagaacaatagtcttatctgcatagtctataatgccattgtgccgggtcaaccaatccattcctaggattagat

SEQ ID NO: 100137 - DNA, 747 bp, Zea Mays
ctaaaccgtacctaatcgtgttgaccacttaatcgtgacgtgctcgtgctatcccatcgtgacgagtggcggtctaaacacggtactagacccgtgtcatatcagcactgagacgtgctcatgcgatgccaaagcaggtaataccatgcttagtggataccgacccacttagcacgatccacttgaccatgtatactctccctgcatgattgctatcttttgctgtactttctcctagcttggtcaattcacaatggaaaacggccaacaaatactgcagtgagtttcctggtgctcacagtcagatccgttacaagcacgtcacagtctcaaccgctctctgtctcccctttgctaatcgatccctatcctattcctgttcgtccccctttcactctccctatctagacattatttattcctctcatacggtcacctttggctaaattctctatctgtgtctcaatgcacctctctcattttattcccctagcttactaggtatgtatttgggagctggtcgggacactgccaatcccatcaggccatgacccatgcgtcttctctattctccctctagttcattcaccacccggccccctagcttgtcattacccattacagtacttatgacctaatcactctaccccagcccactactaccacttcctgctgcaggctctccttccccttcctctcctctaacttggaaccaccaagaagctcagctcaccgtctgcaaacccg

SEQ ID NO: 100138 - DNA, 578 bp, Zea Mays
gggggctagacattgtcgggccactacccacggcccaagggaacctcaagttcaccttcgtcgccgtcgagtattttaccaagtggatcaaggcaagagcagtatccacaataacgtcgaagactgcccagaaatttttctaccaaaacattatctaccgatttggagtctcgtctgagctcacagtcgacaatgacaaacagtttgacagccatgacttcagggatttttgtttctccattggcaccaagcttgccttcgcctcaatatatcacccacaatctaacggcgtcgtggagcgcgccaacggcaagattttcactgccatcaagaaaatgcttctcgatgacaagaagggtaaatgggccgacctgctacctgaagcagtctgggcgctgaacacgaccgaatgctgggcaactggattcactccctttcgcctgctatacgaatcggaggccatgaccctgcaggaaatcaaacatgggtcaccatggacaagcgctttagccgtccccgacatagacgaaccaacaaataccaagctcaaacgaaggcctggcgcgaccacaaagtcg

SEQ ID NO: 100139 - DNA, 388 bp, Zea Mays
cttcatcttcggcctttgaatatgctccaagcagctcatcactagttgcctctatggcatctagccagtcatcattcggttcatcaaattggctcatgtatcgaaaggtatacttcagatacaccaaaccattttgtctggagccagcggcagcctccttcggcatctcccatccatgagcaagtggccacactctgtaagaaatatgctcttggaccaagctcttgtgccaatgtaagtacacactgtattaaaagctatctagcacgcttgcacatcgtttccaactgcaatggccggcctcctaatgtcgaagcgagaccatatagggcgctgaatgaccccttttatatcttccctctcactcagatcaaccttcacataaaac

SEQ ID NO: 100140 - DNA, 321 bp, Zea Mays
attattatgccgcctcctagtctcatctgtagtgtgaataacaactcaagaggtgcaacatcaaatgaacgattgaagaaccaaaagaacacagagattaccatctgaagaggtgctcatgtcggttaagttcagaacagactagtgaagtgagcactgaactctgaagtgagcactgaacagagttcagaacagactggtgcaacactggagcagaggcgagcgccggagctgagcagaggcgagcgtgacggagcagatgttcgctagagctgaggaccaccggagcagagggcagggcagcaatggagcagagtgtga

SEQ ID NO: 100141 - DNA, 334 bp, Zea Mays
ttttgcatgcatgttgctggttgggatccggcagatcgatccacttttcgctgcactgcactgcacacagtggctgctagctgctcgatcgtcgtccacatgcatatgcatatgcatgcgaaaggagctagctacgacttgcatgcatatgcacgacggatccaatcacgtaacgtgctcgtcgttcatgattgcaggtcgccgtcgtcgggtgtgtgctgtgctgctgtcggcggcagctagctgcagggacgatatatatcgccgacacgaagttccaaataagcagctagtcatgtactccgtgcacacagtacaccatattcaagtcatg

SEQ ID NO: 100142 - DNA, 412 bp, Zea Mays
aaagaattgcttgacatacacgcgatgccattttcaccggtaacggcattagcatcgcattggactatatatgatctagtgcaaaggatccaggcatccagcgcacaattaactagcaaatgcaatgcaaacccgctaggacaagcaacggaacaatcgagcttgtagaagtggtaacgacgcgcgcttgcatcgcaatcgcatgcatgcaacgatgaggcacatcatgacgtgcccagacaccattaacagctacgtgggcaacctcacagaatcctacaccgacaagagcaatgagcccaacatggtggcagcctccgtcatgatgttcgccctcgccgggctcttcttcaacctcaacctcttcagcggcatctccgacatcagcgccatcctcgaccctaaagtccgg

SEQ ID NO: 100143 - DNA, 452 bp, Zea Mays
gaaaaaacttgcagaaatgaatgaaaatttcgaagttgcaaaggcgaagcaggaaataagtgaaatggaaagatcaagggtacaaaagaatattgaagagcttcgggattccaaagagagatgctacgaaaaatgcttagaatgtgcataaaagctgaaatatagctttgcaaaggtgggagcatactcttcagaacaaaaatttattcgcggtgaccccgaagggattatccagtggatcggcaaagaggccgaagcttttcatgaaatactcagcgatcgtagtgatttatgcgcttccgccggtgcacgaggggtcgcggccattttggagaaagccggttgtcagcacgttaaggccgtagcccagccagaatctattttctcaactgacgacaccaaggagccctcggccgaagcttctttgctgggcaggaggttttactctaatg

SEQ ID NO: 100144 - DNA, 404 bp, Zea Mays
taactgactcaggttgcatagtcccacttgtaagccactgtgtgggcagagttgatagtgtgtctgtccatgtatgtacttaatcacgctgtaatgacccgcaataacccctgaaaggggaatattctggggataacgtaggtaaccaggggcacaaccgtctttgatagggtgaagccgccccttggttacctataaatacccccatacagtaccattgcgggagacgaaaaaacattgttgccctaatacattgtgttaagtggcatcaaaccattttttgttctcccactatttgagctagtctgaccaggtgtcgggcgagtcccaacatttggcgcccattgttcgtgcaacgaaaaaccataccagcgatggcccccaagagagcaacttcaaaggct

SEQ ID NO: 100145 - DNA, 459 bp, Zea Mays
ctgaaagggtatcagcagatcctattcatcatatcctctacggacgatccagattaaaacccatccatgctgaaccggtatggagcctcaaccgttggatcccatctggatgacctagatcaaatcataccgcttaatgtattggcaagcactcgaggccctcggatacgagatcaatggtcatgggagttccacgccttcgactagacctagcccttagatcaacaatctatggcacagattttatttcgcgaagcggtatgcggccctctaatctcagccacacatccacctcccaatggcaccagactcatctacctttttcctcccttttcctcacttcatccccagccagcaacgcgtcgacgccagcatccatcctcgacggatcctcatcagcgcacagccagccaccataccagtgctctaaccatatcgttaaatagtcctacgcgaagc

SEQ ID NO: 100146 - DNA, 356 bp, Zea Mays
gtaaggagacgagtgctggaaacacatctacgaactcgtctacccatactgggaaaaagaatatgactcaaacatatatgcgacgaattctcagcagctccagtacaccagtggaggccattccgagtattggtggatctgatggtttacttctggacacgaccatggagagcatctagcggctaatccctgaggcagcagcaagtatggcaatcaagtgcagtagcaagcgtcgtgcagtatctgtgggagtggattttctctggaccgtgctgaacaattgtgacgatatggccattagacttctcaaaagcatagaagactgtagttgagttgaaggaagttgttatggatag

SEQ ID NO: 100147 - DNA, 582 bp, Zea Mays
gaaagcatcaactcataacaagttgatttgtaagttctgtagcttccctttataatgaagagtgatttcgctccacttctgtgtgcgttatgttgctttctcgttgttcgccaatcttatcaatgcatgaggagcatttgtgatcattgaatcacatttctgtttgccttatttgtaatgatggcgctttggcggttgcggccaagtcatctgaaatcccgtcgtttctttaagaatgacggccgagttatggcaggccgtgtcggtgttttagagataacggccggacggttgctgatgataccggcgttttagaagtaacggccgaatcctttggagctaccttaccgatttagtgatagcggccgagtgatggatgttacatcggtgttttagaggtaatcagccgagtgactgatggcaatgtcagcgttttagaggtaacagccgagtgactgacggctacgtcggtgttttagaggtaacagccgagtgaagtcagataatgtcagcgtttttagaaacaacaaatgagtcaatttgagccgcgtcggccattttggaaataacggccgagtgatg

SEQ ID NO: 100148 - DNA, 395 bp, Zea Mays
tcccatctaacagtcagcctcgaatttgcacctaactaaggtggtactcgctgtcagccaacaaatctgagatcactggcccaaattcggccacgacggattgctgtgtgagcccttggatcagaacgcgatggctcacgattccccgtcaacctctgatccgacagcagcggcgagcgggattctacggtggcgtttcgccggagaaatacccatttaaaggccccgagacctacccaagggctattgcgtgcaagagtatgttaacgcagtaatgaattcgttggagggtgactcacttctaatcgcggcgctgctcggtctggccacgacgtttgcggacaacggtggtgttgaccggccgacgaggaattcctcaatattcggtgggtcgc

SEQ ID NO: 100149 - DNA, 1116 bp, Zea Mays
gaggatatccacgggaaggtaaaatatctcacgggggaatggatttgatcgcggattgaagtttatcaccgtgcctgtagccgttgtgacgtggccggaccgccagcgtcgtcgtggaagctccggtgacctctgttgtgccacgccgtagcttgttactgtgcggtagtaatcgtggcacccttaggagtataatccttgagccgttgcaccggtgaacgtcacggtcacagccacccgtgttcttacctatctccggccgccagcacgtcatgaccaaattgagagccaccaaccccgaatcctataaattaagcgcgccctcggctccgccatgtagtcaagcactcaacgcacccacccatgcctccaattagtctccagagaactccaatttgggattctccccaaatcggtcaagaacaccacagaagtgagctcaccgtggccagctctccacaggtctgatcgtgttcccctcgctcttgttctagcattcctatgtgttcttaaagctcatcggcccgaccaattgctctaaacaagagtagatcgacgggaacactttgatttgtccccggattgcacggtcaccgtggacagagtgattaggagttagaatcttgcaattaggtgaggggaaatgattgtcaggggtagaattaggtgccagcaaagcctagggttcggtccttgcgtatctcggccggcataagctcgatggaagctctgcgcgtcgacgtccaccgtcgtggaccacgtagtgtgaagggatagaaacgcaggggtttattcgcaaacgtcagcgactacaacaaatagtgtcttggactcttttgagttattcaaaaagacagggtcctcgttgcaatgtctgcacgcgggcgcgcgtgggcacgttttcgccagcttgtgggccgattcaagccagtttaagcccaattctgtagcgcctttttctttgtctttttcttctggacttagaaaattcctagaaaattgtagaaaaatgctaaaaataccaaaccaattttattaggctcctcatttccatataatttaataaaaatggtttcatgatttttagttccaatagggaattttgggacatttaaa

SEQ ID NO: 100150 - DNA, 560 bp, Zea Mays
taatatatcacatatagaaatagaaatggaaaaggaaaagatcagaccataataacaatgcattgcagatacagaaaattaatttaatttgggtcacgttacatatacagaagcagctgcatctagccctatataaattggtgtgaaattgctgtccaaatatactccatcaccgttgacctgacaagccaaagctaagaatggccacaagttcacaatcacacaaagatattatgaaaaatacagaatagcatgccccgtcaagcgtctgctaaactacacgagtttctaaataactagtatatggggcgcgcgcttgagctagtttgtaagtcttttgaatgatagtagatatatttgttgtaataaattgtatcattaacttgtgttaaaagtaatggaagcatcacctgtttgaactatttaaagttggatgtatagttcattttaatcaataatagatatatcaattctaacattctcacatgaaaaaagttgttctaagcaactatggatcattagctgcagcttacatactaaaacaatcataaattgttaaa

SEQ ID NO: 100151 - DNA, 849 bp, Zea Mays
aaactcgcgagccaaataagaggatacgaccaagagaaagatggtatgagatggaagaggggcgattttaaagggcatgtatgagatgaacatcaatgcaatatatagaagtgtcaagggtaaaggtgataataacaaagagcatagtaaaggatggagctaaggcaagactcacgaaatggcgagatggagaaaacaatcacaggtaaggtaggtaaggttccaacagaatggtttggtaaaagaaattattaccgagggaagttataaggaattaatgagatcaccaaggatgtgcaaaataaaatgaccgctcatggatcattaagaaacaagggtgatcaagggcatgttaactgaaatgtcttaaacagacattggggtatgaagataagcatacacggaaatataagagtatgcaagactcaaaggatacgagagtactaagaccaaggtaatagaaattgtcgaaagatagcgtcttaacaacagaataagaaaggatctcagaagacaagaaggtcatagacacataaactgaactgtttaaataggtagcagaggtacaagggtaagtgctttagattaagggataagggtaataaaaatgcaatgatacgagcatgtcaataacaaaatggaatagagagggtcaaatggtagcaatttaataatggacgaggaaagagtcccaaaagactaaaggctatggtcaggggcatctacaaagatgtcgtaagcacaagagtgagataagttctaatagactgagagaagtatagaccatgctagaataaaattctttttgacaagggggcatacaggggcacaacatagaattagtcgaga

SEQ ID NO: 100152 - DNA, 393 bp, Zea Mays
tgacacttttgtaatgatctctcttttgtcgctttgtctcgaagtcgatgctggaccctctggtgatcatgtgaatgactccgtgatacggctgatcgacgaagtcttcttgttttagtgcttgggggtgattttggtgatgtggatttggttgatgcggaggcaggagcaggggtggtacaacatgtacctcctggtggtgctgatatgcgtggttggccggcggatgctgggcgtggccattgttgtatggttgtgggtggtggtggtgatatgtgtgcacgacaactctctggttgtcggctggttgtgcccgagacattctgtctctggtggtctttgtttctgggcaatcccttgttgtatgcgcgcagtcttcgccataaaacaggc

SEQ ID NO: 100153 - DNA, 1129 bp, Zea Mays
gcacgacgaagtggaggtggtgaccaaccagctccggtcaagaccgaagacgaagcggccgcaaatccggctccgtcgaggttcgtcgcgagcgcttggttcgtttccccgtccgaccatcaacgccttcatcggatccgcaaaccagctgttggattcctcttctccccgcccaaatcttcggatcttgaggtacgcccttggacccgtattgtttatgtttatcttgcgcacaactttgaacaacttattactacagcaatccactaatcctttcaaccgtaagaaatttcatccgaaaagacccgatgaatccccagttcaaaaatttccgcggatctggtctgccttttagggttacacaattgtatggtactcacccgctgaatgtcgttcatacttggtcgaactaaatttggttgtgcttagtattagggccagaggatcttcaccttccattaatttgtaatccctacactacggactcgcttccatagtgccttaaagtgtcaagtcttctgggaattaattttggatcaacactgtccagaacaacagctcattttactaaatgtaccagactgattcatcgtagtgtgacccaaaatgtgttacttcagccaacgaagtgtaatgttcattgtttattaaacttctgaaaactctcatcgacatatcagatggcccattacttgtgaagttagtatgcctcatgttcattcatattgttaggtgtatgtcaacccttattgtgttcctctacttccccccaatttttttgtcacccttctatacgactggaggatacataactattgtgcaccttcatatagtaggtttctatattgttacaacaactaatttatgttttcttgtagtaatgtgtacaaccctcacgtatttcacaatatctgcccattaacattttgttttcttcagcaagttatggtatgaccagacagttctttattatgtacattatgtttgtgcttccatggagtacatagcttgttttttctatccttcaatgttttctacaaccctcacattacagtaatgtttctgcttacatggagtgcattgtttgtttttttctccttaactgttttctacaagactgacatgaaag

SEQ ID NO: 100154 - DNA, 344 bp, Zea Mays
ctttgtaagtttctgggactcctttgtaactttcttacaacagggatggatggcaggttgttttcacaaaacccgagggtcacttatgcaaaacagcccggctgaaggggtacaggttgatcagggacattcgatcaaccgccaatggactagattagatctcccattcaatgattggtaagcatccagatccatcgatttgaaaatctacgataaagggttcactgtcgccagtgtcgctcgatagccaatcaacgaccagggttgaaagtccaaagcgttttccccacttttaatctgggtcatccaatccctattggatgaacgatctggctagcccctcc

SEQ ID NO: 100155 - DNA, 520 bp, Zea Mays
taaaaagtcaaggcattccctgatcatcctctcgccctgtgcagaggctcagggactgcccttgcacctatgctgcagcagaattgttggaagtgctagtaacccaatgtagcgactcgggggctgcctttgcacccaggctacaactaggtgacgtacaagggataggtaaatgatatctatagagggaaacataaagacctagaaggataggtcaatgatatctacgggttcgctcgcgcgcacctatcaaaaataagtctaccacctttcgaagggttaagcaacatgactacgagaggatgacagaacccccaagcaagtgccaacacatacttggaggttcgggggatactgtcaggtatcataattaggggtacctggattatgcccctaaacatgcttaacacctaagtaccgaaaaatcagaaaacacgttccccatggtcaagcagggttgaatcacgattcactcgaaacttcgctcaacagttgctcaaagctacgcctcacccgagcc

SEQ ID NO: 100156 - DNA, 316 bp, Zea Mays
ttcgatggctcgttgaagctacaggggcaggtgcagggatccttttcattgcacctggaggtgaacaactcaaatattctcttcaattgctattcccaatgtccaacaatgcagcagaatacgaagctttaatccatggactgaacattgccatatcactgggcatcaagagactgatggtatatggggattctctggtggtcataagtcagataaacaaagaatgggactgctcgaatgattccatggggaaatactgcatggccgtccgaaagcttgaagacaagtttgaaggtttggaatttcatcatgtgga

SEQ ID NO: 100157 - DNA, 459 bp, Zea Mays
tggcgatcgagaggtcaaacgacgcgaaaacgacgtttgaacgagaaatagtgccataggaggtttgaaattcgaattgaggcatgaaatgacgtggaattgagccaatacttcacgaataggtttatatgggtaaatatgagtgaagggtgcacttggtttgattttaggtgaagaaaatggaatttgggcactcggctcggaaacgatcgctagaaatggggaattatgtaaaattgaagcctaggatatcggattggcttgagattttgcgaatgtgttactggaggtattatgaaggtgcctaaaaagtttgggttcaattggaacaattttggctggtttgggcatttcgccgagcacgtggcgtgcggtggattagggttttcgagaaatgctcattcgagaatgtgaagccctccctaaggagctaggaacctgcatggaaagtcaatagag

SEQ ID NO: 100158 - DNA, 561 bp, Zea Mays
atattaatttaatgctgaagttcaatgaagcaataagtaatctagatttggttgaaattccccttcacggtttatcgtacacctggtcgaatagatagcgggaaccccttctccagagattagattggtttttcatatcgtaagaatggtcgatcgtttatccggatacatgtgcaaaaacgatgatgcgtgacatctctgaccatgtgccttgcctggtttcttttaagtccaagaatcctaaacctaagatttttaggtttgaaattttttggctggaatttgaaggattcatgaatatctttcaaaacacgaggcttggccttccatgtctgcctgataaagcaaaaagcttaacaaccaagtttaagattgcacggaaggtcctaaaggattagtagagatcattaccaaaaattgataaaatggtgagtgataccaaactgctaatagagtttatagacaatattgaagaacatcgtgatctttctattgaggaatggaacttcagagatattatgcagcaaaaagtggctgaattactaaatattcagaaaattt

SEQ ID NO: 100159 - DNA, 493 bp, Zea Mays
ccaacacaccccggcctcggaccaaatctagttggtgtcgtaccacctcactagggatgcccagacatggtactatgccttcgagcaggatgagagcaatgccgacatggggacgcttctgtgaactctacacactgcgtttcgagtcggtgatgcacgacacgagactgtcgaagcttgctcggttgctgttcaccttcgtggtgcacgactacgccgaacgtttcaacacaatgttgtgccatgcccacaacctctcgatgtcccaaaaggcggagctctttatggggggctcccagaccacataaggatcaacgtcgagctgcgtgaaccctagaacctacaaaacaaccatgcacttggccagggtgttcgaacttcatgcgaccggttcaggagcatttcctccagcacgtggcgagaggagctcatcgcgacccccgctgctaggatagtcccggccaacgcatggactactttcgttaggtccaac

SEQ ID NO: 100160 - DNA, 1825 bp, Zea Mays
aggttgtcgtcagtctcccgctgacgcctcgccagctcatgcacatcggaagatatgttcctgcacatggaaaagaatgttgcaataccatgtgccagtcgagctcccatcccacgaccatgacctcgaccacgaccacgaccacgtggtgtgggagatccacgaccaggagaggaacgcgagggaccggcagcagcaggtccacaagagctggagggggctttcctcagacgccctgctgaattatttggatcaatccagaaggggtgtatgagagatgtcttgttcctttctcaaagcgaaactgagtcaccacttcaatcatcttcatgatgaagggggcgtgaaggcatcccttgagagggaaacatgcagcatgaatgatttcttgccaaatcatatcaaatacattgatgctttcagaactatttggcttcataaatgagagcaagactttgctctctcccaggatattcatttgattacctccttttggaatgagagtcattctgcagagagagttaatgtatctgtagaatttgtatagattggtagactcccaatatttaccagactcagagatatgaagatccctggcttcatccttggtgggaggacgaaagtcatgaatcttaatcttgtcgcctgaaatatctccatcagaaaatccaaggatgtgagcaaacctccggtagctcaccttgtaccagctgccttcaatatagaaattaagataaggaaagttatagagactttcctcatcagccagcttgatccaaagggtagaatagaactgagcaataacttcatcattccagtcgtattggaatgtcataatgttcttcatcctcttcctctcataggccctcaaagcctgtgtcatctctggatcaccaattgcttcacatccttcctagttaatatatctctaatgcaggattggctcatgcttcttgggaagaatcacaaaattataaaaattgacatgttggagggtccagaaccgattaccatcgatcctaacatcacgaacatgtaatgtaggattttggaagcgaatgtcctagagaagggcagaccctccgcttgcagtgaaatcagtgacaggctcattggcagagcgacgggcctccgccctgtgaagaaccaacccccggataatgggtgcgttggcagaagggagatcaacttcatcatctttgccttcgtcatcatcgctagttgtctcccaggcttgaggattggtcgcgggtcgagaccgaccggagggattccgggccgttcgaccgtgagcaccatgagaccctaaggcctcaccaccttgcatcacataaccagacccgcacccacacttggatctagaacgcggaggagtttcttcacgaatctcttgagcgtcatcatcggagtcagactcaactactgacggattcctacgacgcaccatccttaagataaaaaagagaacatatggtgagcgaggaaatcgatgttcaaggattttatcgaacacgtttgagtaaagacaagtatgatattgagtatgcactttaaccattcaagtgagcggtttaactacaacgaacaataccaaactacttaactcaagcaatgttcgagacaaatgaaaatagtttaagtgtgccaagcacctaaaccatacagtatccttggaaagatacacaagataatcaagaacggtgttggatcgaaaaaaattggggaaataaaacaatacctcgatctgtcgattcaaccacagaaatcccaacgaagaggaaggagttgatggaggaggccgaggggaacaagtttccaacaaact

SEQ ID NO: 100161 - DNA, 890 bp, Zea Mays
ggagggcagcggtagcccacagccgaccaacaatggtggtggtggctaggcaggtgactagtgccttgtagtggacaacctagccgactagccactaccgcctgtcgatatgaagcctggcgtgggcatgagtgcctgttggtcatggtcgcaacatggattagatggagggcaaccgctagataaacaacaatgaccgacgacagcatgggtgttagacatcggacggctaggatagaaccaaagaatgatgaggtcaggtcgtggtgcacgtgtgttggatatggcgtgactggtgtgtggtgggttgaggagggggacatttgagctagtttaaagacatgcacctataattcatggcccatggatgaagctatagtcccgacaaccccctctgaattcaccccttattccgacatggaggacgacgacagatagggtgatagaggtagaagaggctataaagcaagtgaagatggagaataggggcagagttacaacatcctggcctaaagcatattaatttgtaggtattacctataaaaaatattatggtcttccttgactcttatacatgtgcgatcatctgcaacatctttgttttgttttttttttgacgcacggtggtggtgcaacacatcaaaacaatacgaacttttgatgactagggctagcaagggatctaaactctagaggatagtagtgttgcaccgacacgggtgcacaacggcatgacattgtgttgtcagggtgattattggctaataattatgttagtctagaagaaaccctaggtacaagattggttatcgtagccaattctaattctttacgatctatttgactctattttctaactatgtctgaacggtttttccaatctagcacct

SEQ ID NO: 100162 - DNA, 370 bp, Zea Mays
gtcaaacaggatctcacttgacatgtaatgttgtgatacatgatttgtcgcgtgattcttttagggcttatttggatgtataaatatttgaggggcatataatcatatgcccatcaatcccctccaaaccctctacatccgagcaagcccttactctcttagaggctctgccgataaaaggcactcgccacaactcacaactcgcttgtctacttcgtatcttttcttcactataaaacattgtttttccagcaaggcaacagatgtcctctgggcattgtgatttatactgacttttcatttaccctgcaagcttatgctttcaagcatgcattataacaggaaaaaaatctgaggcgggctactattt

SEQ ID NO: 100163 - DNA, 495 bp, Zea Mays
ccatgtaatagatcttgattctcaactactggatcaatctctaaacatcacataacaaacaagaagaaacaaacaccacccaataacatacaacattcaccatagacaaagttaaaataaagcataacgaaaagagcattcgcttttcaaaaacatcaaatctagggttataatatacattgtccccggccatagacaaagttaaaagaaagcttggaacattcaccatagacaaagttaaaagaaagctaggaacatagaaagagactccgtccccgaccaacgtaatgtacattatctcgcaacagaatgcgaagacagcagcaaccctcgcacaaacaaaggcaaagatattaatgcacaactacagagtaatgagggaatcaaaacagtccccctcgaccctgtgacccccaagcaaacggttctagtcagcgaagacctcctgccagcagaagaagaaagacttctctcttgtctcaaccgcaacaagga

SEQ ID NO: 100164 - DNA, 743 bp, Zea Mays
tggtggatgaggaaggcactgtggtcactacaaaagtcccggtcatgcagctctagtacatgcctattactccgcggcttaaacacttgtttctaaatcatgagacaatgaagcaaatgagatggcataacgaaggggatcgtcaagacaagattcagatatcatggtgcatccatcagatggcgaggcatttcagtcactggacggttttgatccagaatttgcatgggaccctagaagtgttcgtcttggtttgtcgacagacagattcactcctttcagtagaagttctactccgtactcgtgttagccggtgttcattattgcctacaatctccctcctaccaaatgcatgaaagaagaggtcacatttcttgctctagttattgtgggccctaaggatctgtgtatgaaaatcaatgtatttatgcaaccgttgatcgaagagctgaaattgttgtggcaaggggtggaggcttatgatagccatctaatttgtaaatttaatctacgagcggcatatctatggtcaattcatgatctgttgaaatatggcatttggtgcgagtggtgtgtccacaataggatgtgttttttgatatgtatgagtgagttgcaaacatatgggttaaagcatggcaaaaaggaaacattttttgatatgcacggatgtttccttcccgctaatcatccttttaggaaagataaaaagtcatttcagaaaggaaatagggttagagatg

SEQ ID NO: 100165 - DNA, 316 bp, Zea Mays
tcacaggaataatgaaatcaatttttaatctaccaaagggaaagtggccagacaaattggtgaaagtagtgtggaatcataacactactgtctcaaggtcaacaaggttcactccatttaagcttttgttcggagacgaagcaataacaccgaaagaagcaagaacaggatcgataaggactctagcttcggcaggggatgaagacacgtgcaaaatatcaaaagatgctatagaaggggttagacttcaagcaatagattacatcaataaataccaagctgaaatagtcaagtggtgagacaggaaagtaagact

SEQ ID NO: 100166 - DNA, 470 bp, Zea Mays
gtaaggaggacgtccacagccctggcgcccccgcctgcccccgctcctgcgaactttgctcctgcgatcccgagcctcgacagacgccattacaggacgaccgcatcttccctttccattgacaccccatccatgcgttgcgcccccaactgcccttccattggtgctcgcatctccccttccatccacacgccgcgcctccatccatgcccccacccagcttggaaactctgcaaatccatgcccaaaatcttcggccatcgtcgccccccgtgcctcgctccccttccattcgccgtgaatgtcgccctcatccaaccaccggcgcatcagccagatccgttccatccaaccagatctcggcgatagtagaagaccaaatggtggtgaaggcgattcatgaggagtgcccctgagagtcgctccccaatcgccatcgatttcggctgccaccacgccatcgaccctgg

SEQ ID NO: 100167 - DNA, 639 bp, Zea Mays
taagagcttgtgcccttaagcatggtggtagttgggacaagagtctaccttatgctgagttctcatataataatagttaccagaccagtctgaagatgtcaccgttcgagactctgtatgacaggaaatgcaggatttctctacattggatcagactagaggaagacagttctttggacctgaacttattctagaggcagaagaacaagttcgtatgattcgagagaatttgagggtagctcgaaccaggcaaaggagctacgctgataatagaggaagaccaccagaatttgaggaaggagatcatgtgtacctcaaagttttcaccacttcgtggaatgaggagagttaaagtcaagggcaaattgttcccttgctttattggaccattctgagtttttaggcgagttggaaagatggcctatcaacttgaactacctgataatctatatgatgggcataatgtattccatgtgtattaacttaagaagtgtcctagtgtcccgagaaataaggttataaagatgtgtaaagtacaatggaaccatcatggagaagatgaagctacttgggagagagagaaaaggagcttcgcatagatttttcccatctttccactagactttcctaaatctcgag

SEQ ID NO: 100168 - DNA, 535 bp, Zea Mays
gcatgattctcggtatagatcccttaaccgaaatcgctatcgcttcaatttcgttttgcgctcatcaggacaagttgcggttcaccatggggcgtgattggtgtcccggttatggcatcttcgtcgtggccctgtacagcgccaccgtggtccggtgctggagataggagaggctacatgggctgtggatcctatatctaacggctcgcacgacgtagcggatcgatccctggtaaagctgatcgtagccatagatatagaatccgacggctattgtgccgtaccggttcggcaaggggccgatctaatcggtgtcactcgtcctcaatccaacggccagatttggccagtaccccttcgcgatggcaatttcactaaagatcccctgcatttatcttaaataggacccgccgtccagggtagagatacctgtgtctcggtttcttttacgacagaacccctgcattttccagatattgaggcccagtccagaaaactctaaaaccagagaaaataaaatagaaatagattttta

SEQ ID NO: 100169 - DNA, 337 bp, Zea Mays
tccaactcatgatttagaattagctgttgtggttcatgccctgaaaatatggcgtcattatctgctggggaatatctgtcatatatatacagatcataaaagcttgaagtacatatttacccagtcagaactaaatatgaggcagaggagatgacttgagctaattaaagactatgaattggaaattcactatcgcccaggcaatgccaacatagtggcagatgcactaagtcgcaaggcttcctaccattgtcttacaatgaaaacctctgacatcacattatgccaagaaatggagaagttaaacctgggaatgattcaacaaggaacattgaat

SEQ ID NO: 100170 - DNA, 297 bp, Zea Mays
cttaagcttaacctcaacaccgacttagactcggactcgagtcaatttagactctgacttggatttaaactcatgattttgaagactgcttcatgttcatggcgaacttaggacgctagaatggtcacctcccggaccatgcaaatggtagtgttgattctgcagccatgaatctgaggaactaggaagagttatgggagcgtggccaagttgtccatgattagatctagatggtcaattttcatgaccaacaagtctacacgacaccaatccaaaacatcatgacgacaaagctct

SEQ ID NO: 100171 - DNA, 513 bp, Zea Mays
gccatggagaccgagtcatgttgtttttcgaaagtctagtgttaaacaatgacagattgaagggatgaagggaaatgtaaagcccaaaaattgtgtaatacctaatttgtaatagataataaaagaggagaaaagttattttcctatattttatgtgtatgttgaacctacttatcatcacatgtgaacaccatattcaaaaaaataataattaataaaagacttaccacaaaaaaatgtgcatcatgttgtttctttattttgtgtgcattatgtggcaatataaaagtaatgtgacaagaaatatattaaattcccaaatggaaatttagaatttaaaagaaatcctagaatttagaaaagagaagaaagtaagaattttatggataaaactaagtaaataaaaatatattattcccccacaagaagcttgaatttgtatacttgactcaatggagaaattcgtattcaaaaattcaaatttaaattcaaaatagttaagaatgaaagaaa

SEQ ID NO: 100172 - DNA, 472 bp, Zea Mays
ggtaagctggtaaggactaagccactaacgaggataggaactactcaagtacgttgttgcaagcactgtgctcatgattcatgaaagataattttcctttttttctgttgattcaatggcacatacagaatactcatcggtctgcatctgccgaaaactcgcgcaaggcacgttgccaagcttttgacctccatgctctgccttgagtagggctcgctctcgggggagacaacctccatcaataagacctcctgcccgctcccgccactggaataacgacagatgcaactctaaaggtgaatattgctaaaacttatacatgttattcgcattctactatttttcaatctttcaatacttattagttaactctgattcaccatttacaaatgtagttgatcatcaggctgcaaacagcctcctatgtatagtacaactgacaagctaaaactggtgttctcacatgtgttgg

SEQ ID NO: 100173 - DNA, 374 bp, Zea Mays
cgcccttcacgtgctcggtgaaatgcccaaaccagccaaacttgctccaattgaacccaaatttttcaggcaccctcacaacacttccagcaacatccttgccaaatttcacgccaatccgagatcccaggcttaaatttcaccaaaattcccgttttgagcgatcgtttccgagccaagtgcccaaatccctatttcttcgcctaaattcaaaccaagcacacacttcactcatattgacctatataaacctattcgtgaagtctcggctcaatcccatatcatttcgtgcctcatttcgaatttcaaacctcctatgtcactatttgtctgtcaaacgtcgttttcacgtcttttgacttattgatcgtccc

SEQ ID NO: 100174 - DNA, 356 bp, Zea Mays
ctggttattagctccaaattttcggagctaggggtgtagattcgagtgctcgctttacactttttttggcgctgagcaggctcaacagctggctgtatgggcaccgggatccaaagggtagtagatgagaggggcgggagaaccagtcaaagagcgtgggacgacctagagtatcagtgtgtccacaggacagtagctgagagagggatgagagaacgtgcgtgaggcggactcactgtgtcagcaaatggtgaagctatggtaacaccagatacgtttataatagagtagtaacagatatagcactcctgctttatttaaagacccatttaaataaaaatatatatctctcttcg

SEQ ID NO: 100175 - DNA, 353 bp, Zea Mays
gcgaggatgaagagaaaaggcgatagtgggtctccctgacgcaccccttgcatgtgcttgattgcttcggtttactgaccattaatgatgattttggacgaagatgaaccaaggatggtggcaatccaatcactccatttttgggtgaagccgagggctcttaagacgtctaaaagatatgcccaattaagagaatcaaaagctttttgatatgtctagcttgacgaatagagctgcttgtttgctcttgtgaagttttttaatcaccttctggacgtagaggaagttatcatgaattgatcgcttttgaatgaaagcattttgggtagtggagacaatttcattcatacgcg

SEQ ID NO: 100176 - DNA, 418 bp, Zea Mays
acaggtttgtcgcctactgtaaaaacaaaggagccactgttggctcgacaagtgctactcgatgcatcgacgacaggcagggcatgcagatgcagctagctgaccctttccatcggcatcggcaccggacttttgttcgcggcaggcactagtgctctgccactggccgatagtctcgctcagcagcagtctggtcacccgcgctaaggcggtctatactatcaccatcatactctttatcctatttcctgtcacactacttattttaaaccacactattcaaatattataatctatagtgcagaacaatagtttgcatgaccgtttacacgacttcctggagatgaccttaaactatgttaaacgcttcatagctcgccaccctcaacgctattcgtggctcctccaccgtttctcc

SEQ ID NO: 100177 - DNA, 446 bp, Zea Mays
attcacatgtccgagggtggtttcagcaccctgctaacaaaatgattagttcgaacgtagcacaattacacacacactgaattcatagtacactattttcactagaaagtactaactcaaatgaaaaagtgttttcgattcgagcgaatcactgtgcaggagcatttttgcaggaagcatcagttgcaggagtagcgaaagaagaaggttggctcacgacagtaggtgtggcaagaacatcggcaacaatgtcgtcaggcaccacaacaccaggcctcctcatcaggatctgcccagcgtgaacatccttgtccatggccttgtcgcacatcgccttcagggcgacatggtcatcctctaaggccttgatgttgaggtgagaggcctccagctcttgagcgacaagcatctttgaagcacgccgctccttgatgacagaatccttg

SEQ ID NO: 100178 - DNA, 937 bp, Zea Mays
ctctcgcaatctccgcaataccatcttcaaattatccacatgctcctcctcactttgagaatatataagaatgtcatcaataaataccactacaaacttgtcgagataatccatgaattcactgttcatcagattcatgaagaaggctggtgcattcgttaggccaaaagacataacagtgaactcatacaacccatacttggtaataaatgtcgtcttcgggatatctgaaggtcgaatcctgagctggtgataacctgacctcagatctatctttgagaacacgctggctcctctcagctggtcgaacaaatcttctattttgggcaaggggtacttgttctttattgtgacctcattcagagctcgataatcgatgcacatcctcctagtgccatctttcttctccacgattaggacaggggtagcccaaggtgaggtgcttggccggatgtaacctttctctgatagctcatctatttgcttctttagttcaaccaactctggtccagataccctgtaagctcttttagaaatggggacagttccaggaaggagctctatggaaaactcaactttccgcttaggtggcatacctggtaaatctttcgggaacacatccggaaattctgatacaaccttgataatcttgagtgaatctgcctccttgctatcaatagccatctgatgacaacctcctttcctcctagtgccatctttcttctccacgaataggacaggggcggcccaaggtgaggtgcttggcctgatgtaacctttctctgacagctcatctatttgcttcttaagttcaaccaactctagtccagataccctgtaagctcttttagaaatggggcggttccaggaaggagctctatggcaaactcaactttccgctcaggtggcatacctggtaaatctttcgggaacacat

SEQ ID NO: 100179 - DNA, 383 bp, Zea Mays
attaagtacgatctgttggatgccttatttactcttcatcatggaaacacacatcagttgggacatttgaattcagcttatctcactcttatccctaaaaaggtggatgcttcgacatctgctgattacatgccaattagcctcatccacagttttgccaagttaatctccaagatccttgcaaatcgcctgactccccatttatatcgcttggttgcagctaatcagagtgcgtttgtgagggggaggtcgatccatgataattatatgttggtgcagcaatctattaagtctttgcataggaagaggctctcactgaaattggatattactaagggtgcgtttggcagagctcccacagctccactccccgcgagaatcac

SEQ ID NO: 100180 - DNA, 657 bp, Zea Mays
ttggggtagtaagcgcacccgaagacacgaagatggtcgtaagagggatggatgccgaagagagcgaagtaaggggtggggtgggcaaccgccttggtggggagacggttgagaaggtaggtggcagtggcgagggcctcagcccagtaacgagcgggaagggaagcctggaagagtagagagcgcacgacatcgttcgtcgtgcgaatcagcccggccgttctggggagacgtgtaggggcaagacatgcggagatggacgccacgagagaggaagaagtcacgggacgcatggttatagaactcgcgcccgttgtcacactggacgctccggatggtgcaactaaactgtgtggagacccaagcgaagaagtgagacagggtgggataagtgtcggacttttgacgtaaaggaaaagtccacagataatgcgagaagtcatcaagaatgagtaaataatacttatagccagaaatgctgattacaggagatgtccatacatcacagtgtatcagatcaaaagtgcctgttgctctagaggaggagatggggaagggaagcctaacatggcgacctaactgacaagcatgacagaggtgctcaaaagatcccctacaacctgaaccagaggtgctgctggagagcttggacatcac

SEQ ID NO: 100181 - DNA, 612 bp, Zea Mays
gattaacaattttgttacaaaaggattagctagttgctatatagaaattagaaatcaaagctctgcagagtactcggacagaggctctgaatggggtttcccatggtacagtgcactgaaaagatcttcacttgcattctcctcgccgccgatgacccgtgcgccgtgattcgtgccctctgtggcgtagactatggtcgaccatggaaacatcttcactgtggatgagctcagaaccctgtagccgctctgtcatctatccactcacgccggcgacgtggccgagcggccatcgttgtgttgtacgtcgttcgccgtgatcatgccacaccgtgaccatctcaccacctcactgctagccgtaacaactcaccaatgactgtcgtagctcctcaaccagtgatcgccacgatagatcgccgcggtgactcctccctgtctccggtcgccagcgcacctttgtgaaattggacgccaccgtcctcgggtcctataaattgagcgttccatctgctccgctaggtagtcaagcatccagtgcacccactcatgtctcggattgtccactagagagctctaatttgagatttcccccaaatcggtcaagaacac

SEQ ID NO: 100182 - DNA, 914 bp, Zea Mays
atatcttgtgttcaatacttttttagtcatcccctttgcgtgcaatgcgattgacctatctcaaacagtaacaaatatcgtacccatgttgtagcacatctagtttgtcatgtttgttcacctgatgctctaatgcaatctctttttgtctgggtatttttttatagttgtcagggaagaagagggacactattattatgttccctccttctgatcagcaatcactggaacttcatatgcttacaatgatccaagatcttgctgcttctttgttgatggagtttgagaagtgggtcttgcgtgcagaatccacaggaactattttgaagaccccattggattcacaatccagtcttggctcagaggaggttcatactttaggtgttccaagtatttttttagcagtgttatgttgatgatgcaaattgcccaggattgtattacttatacacgacaacatacttctgtatttttattaggtaattaaggctaaaaaaagaaggctgggtcgtgcgcaaaagataataggagattattgcctcttgcctggatcacctgtggacgccaatgcacattataccactgctatagagcttgcaagattgactggtgatgttttctggcacgctggagcccttgagggtagtgtctgtgcattagtggtaagcttttacataaagtcattctggttgttaaagttcaactatattcatcttgataagccacattccacatatcaatacttcatttgaaaatgtctccatttatatctaaatttcacttggcatgatattcatggcaactgtaacactcaaaatcatttttgtgaggtataaaaatttctccaaaggatttgagataaaatgacttctatagatgattttcttcctttataaacatatctctttaattta

SEQ ID NO: 100183 - DNA, 622 bp, Zea Mays
tgttccggtactggtaagggttggagaaggccaggatacttggctctatctgacttggcctgctggcaaatggagcatgaggtcacatagtcctttactgttttcttgagaccaggccaggaaaacaactgcttgacgcggcgatatgtgaccggaaaacctgaatgaccgcctagagcactatcgtggagggcagacagggcctgctgctggagagacaaattgttgcccagccagacacgacccttgtagcggatcaatccttgatgcagcgagtagggtccctcagtcgttgggtggagtgacaattcagttagcaaagactgggccttgttgtcctgactgtaaccctgaaccaccttggacagccattgtggactagcagccgacacatggaatacttcgagaccttcttgggggcggcgagacaatgcatctgctgcaccgttatctaccccttttttgtacacaattctgtactgaagaccgagcagcttggtgaagacgcgctgctgccaaggggtatggagccgttgttcggacaggtgcgatagactgcgttggtccgagaaaataatgaattccgagtgttgaagataaggtctccactggttcactgcca

SEQ ID NO: 100184 - DNA, 481 bp, Zea Mays
caatcacatgtagatgcgaacactcctctgcatgagttcgctaaacaaatgatgaaaatgttgcatagcaggaaaatgaaagaatcaaaggaggcattgatgagcaaggtatgtcgtgcttgttatcaataatgtatggcatacatgtttatgtaaatacgttgtttaattatgatattaacgtcttatagggaccaaagacaacagatacattgtataggttcgaagtgagagtctctagggcatacaccagagctgttatgaatagatttgaggaatcaatgaaatacaccactgcatacagaatattgaaggacacaaacggttgtgataaagattggatcgtacaacatacaaaaagatctaataaaattgtgtggggacaacatcaattcaagataacagcggacatagaagctggggagtatacatgcgagtgcaaacagtgggaacatacaggtttgtacatattgtgttgatt

SEQ ID NO: 100185 - DNA, 299 bp, Zea Mays
atgccaactcaaatattttaaattaatactcgcttagtgtatttgtgacatctatttaagtatttctcgtatgtagcgcatattgttccgcgcgcgatggcgtgctggatcgcgtgtcgttcgcgtgctgttttgcgctcgtcaccacacgtcgtcttcgcgtgtcgcatgtgcagatcgtgtgcattgccgcacgttgtccacgcgtcgtcgggcattgttcgcgtgttgttgcgctgtttgcgcggtgccgcgcacgttgtttctcgtttcattcacgcgctgtttctgcgtcgtcg

SEQ ID NO: 100186 - DNA, 414 bp, Zea Mays
agaaatttgataatactttgtgtcaataatatataacatgggtactcaaaccaagtttctaaaatatgaagacttgtacaggtgggtccatgggctcaaccgaaagtctagagactcgacaatcaagaacaaaagaaggcataccgcaaggaggatccagaaggataaacatggcaaagagcttatgagattaggagatatgatcgagatctttgcattaatggcaatatcctagaaaataaggaagaaacatttataaagacaaagtttgactcctagatagattcagttcaatccaaaacttgtaattgacctaaatacttatcctataaaccattgtctctccttgtactataaaaggagggctaggcaagccccatgactttggatcatcagatcatattgcatatcaat

SEQ ID NO: 100187 - DNA, 373 bp, Zea Mays
gttttggtggaaagatattctcaaaatccaagatatatttaaggaaatagcccgagtggagattggaaatggaaaaactactctcctttgacatgatcgatagaatggtcttcgcacatctgaaagattcccggagctttggtcttttgcctctgtcagagagatcaacattaatcaagctcggctggcttctccgaatgaattgttccacactcccctctctgctgaagcgttcggacagctactttcacttcaggacattcttgctaatcttcagttgcatgatcacaatgatatttggcgatgcagtgcctcttccaatctgttttcatctcagaaggtttatgctcacttggttggcacccaacagtcg

SEQ ID NO: 100188 - DNA, 372 bp, Zea Mays
tcaaccaaatgaacctaagagcttccttgcaaactgggcatgagaacttaccgtgaacacaccaggcgcagaatagcccatacgccggtaagacatgcatggagtactagtaccaaacatgcattttgaagtttgtcttcatagctcggtcatacgtccataccccttcctctcaagcacgtaccaattcatcgatcaaaggctccatgtacacgcccattttattccccgggtgtctgggaattatcaacgacacaaatatattctgcctttgaaagcacacacactgggggggggggagattgattgggataacaaacacgagccaacatgtgtacggggcagcgctcattccataggactgaacccatc

SEQ ID NO: 100189 - DNA, 754 bp, Zea Mays
cttctctgcacctagggctacctagtttatgtgagttccaagtgaagatctggtctagtttgggagatatggtggcgccaagtcagggttgtcggaactgttcaacccaagacaaaacttgtgtcaaaccatgtcaaacagttctggtttggtttcaaaattttcaggtgtgtgccttgggtaatttggctcccttttgtcaattggaccatgtggatttggtgccagcaactaagtgaacacctttgatctttagaagagggctaatttttgacttagagaaaaattgggttgctctagagtgctctccacttgggggcttaatttggggtttttgtgggacctttttggaataactccctcactatttcttgtagacatataaatgtacttcaacttttgtaaaaggtttaagtcatgaattggtcatttacatagttttcccactaatccaatgcttggggtctaatggctcaagagggtttttctagggttttgagcaatttttcccaatttgaggtgcatgaaaaggctaagatactccttctagcatatccaacacttgattaagacattgcctctaaattttggtgcttcatccccacactaaaccacatgtgataatgggtcacaggtgaatgtgttgagccagggccttgggtaacacctgaggtgttatagaatgcctgccgaagaattggaactcatagtgcggcctgcttcgaggaaaaattatcaaaggaacaaattgccc

SEQ ID NO: 100190 - DNA, 708 bp, Zea Mays
gaagaagggagtgagacccacctccccgcacctccggagctgccattagatttagcccaagttctagccaatcaaacccgactcattgaagtcctcactagaagtctggagaatcagcgcccaaatggtggaagaccacaggacaggatgggagattttctgaggctcaagcctcccacgttcgctgggtccagcaatcccctcgatgccgatgactggctgcgcaagataaaaaggaaattaaaagccatcgggtgcccagaaaatcagcgtgttcaattggctactcatcaactttccgggatggccctagcatggtgggataccttcagcactaccgtaagagatgctacctaggcagaatttgaaactgctttccgtgagcaccatgtaccccaggggatcgttcagctcaaggaagatgaatttcgggaactaactcaaggaggaagatctgtcagtgagtacgtgcacaaattcacagaattggctcgctacgcgcctgacgatgtcagcacagaagccaagagaaaagcccgttttctgaaaggactaagaccagaactcaagaccatccttgccagcccagatttccttagtttctcgcacctctccaataaagccatacaagtggaaagggcaaaggaagaagaaaaaggtcacctcaagaggaaattccaagttctccgagctcagcagcaagaccgg

SEQ ID NO: 100191 - DNA, 504 bp, Zea Mays
aaaatgactaatgtataacatcagtcatcacaatcataatggcatactagctgtgatgaaacttagacaggtctaacatgttcctatgcaaacaaaaaaaatattgaattcatgactgtcagtgcccgagagaaggcataccctaggatgctagcaaagcgacctctaagactccaatagtagaacataggcctgtggtggacccaattgagagccaaaccagtactctcgaggccctacactcccaagggtcaagcttcgaaccagccaagccctaaggtcctccgccctcggcacaagcctcgaactggcaagttttcgggaccctgcaaaggtcccctaatattcctcaagacatcctagagaagtgtagccacaaacggtctggccccggggcccacatgctcccctgaccaaggcggcgctacgcgctaggcaaataagacaaagctctcatccattacatttattatgatgggtgatgttgtcgtcaaaagcaacatt

SEQ ID NO: 100192 - DNA, 537 bp, Zea Mays
tgggacacacaccggtgcgaggacatggcagagcggatcgtgtcaccggtgcgatcgaggactggcgggacacgtgtctaggatgtgggggatgcgtatgtgggtttcaccaagtttgggcctcaaaactaggcggtgcggttccagtgggaatcgaaggcgacatgtggcttcatcgtgaagggtgcgtcgaggtgaagcaatttcgtgtggagcatgtggccgtcggatgcatatttcaagatttggtccattttgccccttataaagtggatgagctctatgtgtctaggggtagtttagactagtgaaataaccccttataaatagatgggaggattgttctgtgcagccatctctttgactatcatttatgttttgtttagaaaacactagttcatatttccctagtttagcctgagatccaaagattctttaaacttgacgtatgtgcttttgtattcttcatcacatcattcaaagaaagggtggccatatccatccacacggtttatcgaatcgcgtgctcagttttgt

SEQ ID NO: 100193 - DNA, 388 bp, Zea Mays
taactatggacatacctgattttgcgctttagccacattcttcgaacattgtggttcattgttgacatgaaagcctctctattaatctcggactcaaagacctccacagcatatgacttctcctcatctgtgaatccatccattgcttccatttccttcatacacttcctcatggaaagttctttaagagcatcaagtgccttgttagtttggctctttttgaactccacatagccttcgagagctgctccaacatgactctgcttacgctttctacttttgctaccttctccctctcttgcttcatgaatagctgacacagattgagcttcacttgtcatctcttgtccatccaaatcaaatggatttgtattgaatggatggagag

SEQ ID NO: 100194 - DNA, 1194 bp, Zea Mays
actatgttagctttgttgggacccaatgacatgtggttaggtgggcccaatcaccagagaaggagggagctcaggtgcacaacaaaatagtaggtagggaactgtagcgtattgttatgtgtgtaccgtccatgtacagtgcaggcatatttataggtaaccgggtaggtaggtggatcccttaagtactgttataccccaagttacctgctacaactctagaatattcctccttacggggtcattacattgatcagaagtacaatcttattagacatactatggaacctaccccaaggaggggcatacaaacggggcccaaatggagacgaagcgcagcctgggccccaccattgagcggcatggccttcgcccatgcagcgcccttcgctatgtgaagccgagcctttgacctctctaggactgtcgtcgtatagaaatgtccgagactatgggggcaccttcgcgaggttgcaacgagcccccttttaaacagtgtggcctttcgctccgacgtctctagcagctctggttggagacctcaatactagtaccgatggaagtactcatcgctttgtgtacctgcgacaaaacctgttcgattgatgttaaaggtctaaccgagggggtgataagccttcactccaacactagccccccgaggggctacttcatcttggtgagctagtcccgaagtcttttctaggagatggtcaaacggtgctctcattaggttgaagtggtccttgagggggttgaaatatgaccgttgggaagtgatgttttattgtgggaccgatggtttcccgaggcgctttcttaggcctataaagactggtcctgaccgcggtgggaaaacttttacgcactggtgcaaagaacccttgccttcttcatctgagaaaactgctgcgtgaattccacttctcgccaccagtgaattggccctcgtgaagcagatcgctcgccgctgcagacggtacataaagacatcttcttcctcgtcgtcgtccgctgcggctgtgccgtcgagcgtgttgtcgtcggagaagacagttagcgattcagcggcggtagtggagttgttgagggggcacacggtggagtctgggacgtcaaggatttactcgggccgcgtgctttagatgcagtgcttggggtattttgaggatagtgtggggtgcccttcgggag

SEQ ID NO: 100195 - DNA, 296 bp, Zea Mays
ctcttgtgatctcgtattcagttattttgcatctattcattccaggcctacaatgagttgcaaataccaaaataagcgcacttaaaaaccaaataaaacatttaataacacttaatcaaattcaatgggatctgggagcagcaaggccaccactgcaaggaattgaacgaagtggatgaacttacaacaaaatctctactactatttaccgtgtctctactcacttgacaattaacatagtaatcagtttctaagatatatctatctatatcttgttgtttcctaggagtatgttg

SEQ ID NO: 100196 - DNA, 408 bp, Zea Mays
cagagggactatgaacacctttgaagcagcaagtgcatgaagataccaggacctcgagaggtcatttcaatcttcggagaccaacaagtggcttgcaacatagaaagggacttcgtcccaaggtaatggaatgtccactaagtgggcgccagcatccagaaaaacactcctaagccacctgccaagatagacaaacaccaaaacaccattcaaagtgacgggtccaagaaagtaaccctcgatgccactctccccaaccatgcagtactgataggcgaaggcctcactttacaaaaagaagccagcttgcttaattgcctacgcagaaacaaagacgttttcgcctagtcatcattaggcctagtcggagtaagccaaagtgtcatcgagcatagcttacacgtcaac

SEQ ID NO: 100197 - DNA, 628 bp, Zea Mays
gaaactttatttatatctagattatggcaataataggataattaaagtaaaacatgccatggggtacttaatattgtaaaacatgtagattgccatagtataggaatgatgaatatacaatctaccatatgagaggaacttcttcaaagaatggtgatataattttaaagatacttgaagtgctttatttttctatgtgactacataagacacataagaaatggtattctaaaatacttgcacataaaagcataaatgttaccatcctttggctttcctccatgttgtaggtcttgacttttcggcataggattaattctttatttcctacaacattaatatcttcccgagatgatatgagttttagacataataatttgaaataaccttgggtcaatcttggatatgtagatcactgtagattgatagcttgagttaataaaaattgaattgactctctcaagcatcccaaagcttcataccatctccatctctgcaaagcttgtcaagcatgttttggtacccatctcttgatgggtccattatggttagttaacaaagatctaggaacccaaatgtcctttgcgctagcgtttggcaaattcattgcctttctagcacaagttgc

SEQ ID NO: 100198 - DNA, 472 bp, Zea Mays
atgttgggcctcagtaatttgcctctgtgttagcttctttcccaaaccgtgatgaataataaaatcaagatcttcggtcgacaccgctttgggtattgacaatgttaacttctctggtagactttcctttccttgctctattggcctagtttttaaaggcccagtctaagcgcagactggagaagcgcttgcaacgacaacttctcccaattcttcagttttgtcttcagaaaccctaatagaattagtggtagccaccttcgaaggcttcagaacaacatctagaacgctggccattctccctcctttcctagaagttgtcgctggaatagttgttgtccttggcaactctggcagtgctagagaaatctgcagctttggctgctggtcactttccaaacttcctgtttttaacttctctagttgagcggtggtagcttcatctgtcgcagcggatattacctccaaagct

SEQ ID NO: 100199 - DNA, 756 bp, Zea Mays
gtagttcgagagctgcactttcacaccgaagaccggcaagatgggtggagaagtgtatgaacccatgtcgtgtgcaaaggacatgtggggcagttggttcaagtcttggttttatattgatttggagaaaatgtactaggtgtggctcgatcggcggccagctctatggtggcccgtgactttgttgcttgccctgacttcgaagtcagggagaatgattatgatgaatgggtgttgcatcgtgtgagggtgatcagcagcgatagagacttggtcgaaaagtatattgcatattaagtatggccactgagtggaggctggacagttggtaaaatcgtgtgacgaaggatgccgctaaagagtgccttttttgagaaggatgacattgttgtgagtcccgccattgctgtttagcttggtaggtgagacggggtggccttcgttagtgatgttgaagcggaggctgttaaaattgttgggaagtattctgcgaagactgaatttacaagaagcatagaaatccaagatggtaatatttgtctcaatagggttttcgaaatgagggagctagagtatgggccatatcccgaagacgtagaagaaggggaggaggaagattcgagtactattgcaaaggtgaaggaggttatcgaaggcagcgaagacatggttggtttgaagcggagggctttgcctactgaaggtaaaatgagaaaaagcgtgaaggggtcgaggtctccgaacaagatggagacc

SEQ ID NO: 100200 - DNA, 299 bp, Zea Mays
ggagttgttccttgcgggctttctctatgagtcttgctgtctcagagtctagacgttgagctttgcaaatgaggtcttccatcattggtttgacttcgacactgtcgttgtttcccagacatgcatttagttgcgctgattctttcttccaatcttctaaaaagttggttccttttttcccgaatggttttcgactgagggcgccggctaccacgttggccttcccggggtgatagtgaatttctaggtcgtaatctttgatcagctctaaccatcttcgctgacggaggttgaggtct

SEQ ID NO: 100201 - DNA, 486 bp, Zea Mays
tcacagtcttacccacgacaccagcatgtttaacggatttgacaaacttatgcttcagtttagcagaagaggagccccagtcactgaccttatgatcctttgccttctctctaagctcatcgtagtgaagctcatctataacatcctctgcctcctcaactgcatccctgaactgccacagccaaagatcaagggcagagctttgttccttgatgtattcagggtcaacgatatcaaatacaacctggaccttcttcactgactgcagcaccctacccttgacatcttccaagccatcagccttccagtagtcagtcaggcaggtgaaagctttgttgatccaaaaggagatggttgcatttgccaccgagctcccggccaacttcccagcgaacatgattgtggcggcggcggccatgactttgtgcttttgtgagggaagatatctgaggagagatcaaagcatctgaaagttttgcatgtcca

SEQ ID NO: 100202 - DNA, 287 bp, Zea Mays
tgatgggttacagcttaatgaacaattggtgtctttgctaaggggtgattttggggtttatgtaattattggtttttctcccccttctctcactttggtgacatgacttggacccttgccacccatttttggtgtttaaaccttaactacttttatgaagtatctagtgagctacaacttttgttaatggtccagtttgggatcaagtgatttggttagtcttcgtattcactttgttttggtgctcttatgcttttaagagtgtaggatttgggtttggtcactcc

SEQ ID NO: 100203 - DNA, 436 bp, Zea Mays
aaatatagagaaagcgatgactactctggcatgtcaccacctctctatttaagccaagacaatttctaccatcgactaagagtcataagcattaaataccttactactttacatgcacaaataaacttcaacttaacacaactgacaccgatggaatttttactaaactcatcatacgcataaccctatctcgcatacaaccatattatggcgtgcactcgagacacttcaatcaatgtggcgcgaccactaatataaatgaactccgacactcatgtcttaacgatacatcctccccgcaaacaagcatttgctaaactactcatcacatcaaccattataactcctatataatcatgaatcccatcacattgcgtagtatttgcacttcaatctcgacttctctgcacgcctcatactcgtttattcaaaaatt

SEQ ID NO: 100204 - DNA, 585 bp, Zea Mays
tcttgtctgctttattgctccattagttctgtagactttctcccatttgtggggtgcaaagaatgtgagattacatgattatcttttcatgatggcaagaacaaggtttaggaagattaggagtttttttcaatagaactacttgttttgtggtgctttgaggtgaggtgtttgatcttcttatacattcatctggtgtggatgtttcaccattgaattaaaatgaattgttgaagttggtaagggttgtgcttagtgcatattaccccttcataaaagagtgttgttttaagacattgatgttgatgtatagctgcatccaaattcgatggtgtgaaatcgtagtgttgattgcatctatgacttgctttgagcttcattgcatgttgtttcatgcttgatatcaggtcgtgtagtttccttagacaattagtccgaggtagaagttcttgtgttaactaagaccaataatgaacccatgttttgaatggtggtgctatatggggtaccttggatgctttgcttggagtggtcgaattcgaggacgaattctttttaagggggtagagtgtgatacccaatttt

SEQ ID NO: 100205 - DNA, 703 bp, Zea Mays
aacaaaggtccgagatgctttgcaccaagctgcctgggtcaatgatatcagggggacctgtcacctcatgcttttggggaatttttcttgctctaggacctgctccaagatattaacctagatcctgacattcgtgatcaacacttatggtccccttctgccaatggtattttccctccaaatcagcctatggccggttctttgtggggtatgtagcttttgattcatatggtcggatttggaagaactaggcttcaccaagatgcaaaattttcatttggctagctactctgaataggtgttggacatctgacagattagagaagagaggactgcctcacccgaaacattgccctatgtgtgatcaacataatgaaaatgtgaaccacttgcttgtctcatgtctgttcgctagggaggtgtggttcagaaccgtctccttggtcggccttcagcgttgtgttcctaggccagatgatctggatctgcaggaatggtggtgctcggctttatccctggtccccaaaagtgacaggaaaggtttcaactcactggtaatgctagtctcatggtgtctgtggaagcatcacaatgcgtgtgtgtttgagagatctaatcctagtattgctaaggtatttcaagtcattagagatgaggttgtagcctggcgtctagctgaattgtccggtctgagtgcgttgtg

SEQ ID NO: 100206 - DNA, 460 bp, Zea Mays
aatgaatcagatgggtctacgtctaagttttctgagtttgacgactctgggagttcggttttgtggacggaagagtcttcggatgaaggcttagattattttgtggccttggatgtggctgaggcggaggcttctccgcgtgttacggatgctgaaattttgcctggtccgagtgttgggcgtaggcggcgaagggcgatgacgaagcgtagagtgagcgggtttgatggtggtcggcttcgtgtgggcagggctggtaggcaggaattgttgtcctcgccggttggggcgagtatgggtgagggggagttgcaaaggctttttgagggtgaggagctaaggataatgctatttaactataggaagatggggatcattccgaaggttgagcctatgtaaggtgtgatgccctcgctgtacgtgtgtaactgtagtttgtatgattaaggttgactgcctt

SEQ ID NO: 100207 - DNA, 369 bp, Zea Mays
ccgaaaaggaataagatgaggtaccaaaggacttgaagttcaccgaataagcacatgtgcattccacgatctttactcatggtattttccactagatgtggaattatggtatcctctaaagccacgatggcagaaacctataaggtttaggtgttactggcaaaatatctccattgtgccagaatgacagactataacgatatatccgatcgatgacaaatccctgatggattacgatctttgatggacttttgttacaccatcatagatgttgcaaaggatgaacgcctggagtgatgtgtcatatttagaatatgtactattgcaactatattatcccctaagtcctattgaaggacatgttatttg

SEQ ID NO: 100208 - DNA, 492 bp, Zea Mays
caaatgcccagtgccaccagcagaatctacactcaactcagttttacaatagtgacatatagcaatataactttttataccatcctcgataatctcccgcttatccatatgcttccagcattctgccctacaaacagatggattagcaccctttactggcacatcaacaccaatatcccccatctgctggtaaggaactagaaccagactcagcccctctactaccatctactggtactggtaaggaaaaggaactagaaccagatacaggctcagtgccaccaccatctgctggtactcgtaaggagggactacaaacaggtcgagacccagggacttcaatggtaggggagaattcgctagaaataggattgctggaatcatctttcctactactacaaaaagcttttctacctgctaccctcttcctccccattgtagagcaaatgaatacagatctagcaagtgagcagcaaggaaactacggtactc

SEQ ID NO: 100209 - DNA, 340 bp, Zea Mays
cttgattgtaacttaatttaaggatctgtaatcaatgcacattctcatgctcccatccttcttggtgacaaacaatactggtgctccccaaggggatgagctaggacgaatataccctttttgttgaagttctgcgatttgaagcttcagttctgccaattctgtgggggccatacgatatggtctctttgtgattggtgcggtgcctgggaggagatcaatgtaaaattctacctctctttccggaggcattctcggcaattctttcggaaacacatccatgatttcttctaccacagatatactttctgctgctaggctgaatactattggatcttgg

SEQ ID NO: 100210 - DNA, 736 bp, Zea Mays
cgaatatgtctggaaggaataccgcaaaaatggaatagagaagtgctctatggcagtctacctgggggaaagccgaagctacccaaaccacccccccttccaagtcaccttcatcgggcaccgcttcccagacacttgccaaagtgttgcccgaaaggcccttaaacagctatgccaaaactacagcagagagatctttgaaaccccccttcgttatttcccacccagcaacaaaaatacccccacctggaggaaaagacttcagactctgtcagggagagaccccaccgaggatgaccccaccattgtctacatggccggatacctccacaccctggatacccactacgatgatctctcctcccactgcacccacctaaactcccgggtggaaagcctagagcagcaagtcaaagagcttaagaaggagaaggcatctctccaagagtgtctcgacatagcggaaggcgaggaggccaacacccgtgaagcctatcgaaccttaaagatggactatgataagaagcttaagaagctcgcccccacaaagaaaatccggaagaaaaccatgagccaaggatgccagacggaaaggaggaagaaagctcccccagcaccagctcccgccaggatggaaaatttgtccgatatcgaggacatgtccctcgctagccttgatgatcttctcaaggaatttggggacactctagaaaaagaattcggtagtacctcaggg

SEQ ID NO: 100211 - DNA, 591 bp, Zea Mays
agatccacatttttctggaattggagaggtgtttcgttggaaaggaattagattagagctagattttttggatcagaacaccccttagtatgtaaacatgcaacctctacactggatgggtgttcaagtttaagtctttaccactataaagcatcggtttctaccatttccactgtcatcatatgtcacgtgtgaagcacattttcatttcttctcatcctcacatgcaccttccacctcctctattgctcgatgagcatgacatatgggtcccacagccatgtctttcgcatgagtgtcctctacttcgatccgctctacgagtactggatccatggttaatacacttctatctctgtgatctacgctgctagattccagttgctagttttgttgttctagggttaaaatgttgttgtgtcaccgcttcctccatgcgatcgtgctccccgatgttgttgcctcatgggtagcagcaagaagccacaccctttgccaaagagaaccatgctttgttgcctcccttgagcaccatcgtgcatcgatggaccgtctagaaactttttgagaaatcgacgctaataccacgcg

SEQ ID NO: 100212 - DNA, 1057 bp, Zea Mays
gttacatcttgcagatgcgcttgcacgcacccaagattttagtcattaataagagacgagcaaacctggactcacgctcagcgcgtgacaaccatcgcaggaagggtacacccataatctgctggagtaccaagtgaacccctaagcaatccacatggattactcggggtctcaggggatacatctagcagaagcgcttgcacacacccaagaatttggtccgcagcaaaaacccatgtgcaactctaaggtgttacatgaaagctcggggcggctgtcgagtactcgggaaccaagtacaataaataggccctttaaaactgaccaactccgatgaccaactctgtgaggcggactgactgaccaactctccgatgaccaactccgatgaccaactctccggtgaccaactctaacgaacaactccgatgaacaactctccaatgaccaacttcaatgacccactctgatgaccttcttcgatgaccaactccaccaaccaactctgtgaggcgaaccagctaacaactccccgatgaccaactatctgccaatctgctccgcccgaccaactcaccgtcgattaacctgtgcaacgcaaatatctggtctagtgctactgatccacgtcagctatgaccgtatgcatcaccatcacgctacgttcggacatatgcacagcacaccgaatgggcaccggggtctctatagtgacccgtacattagaaggacggaacaacacaccatactgagtgtatgcccatgtatgctgacaggtgacaaagggctcatgacgacaggagaagccatgtcacgtgcgaccacaccatgagaatgatccatgggacccgccacataccactacaaagacgttagcgatggactcgctacaggagccagagtaacagacaacgccataccgggagtatggctacacatgaccctatgtaagacccaccacgacaacccgggggagccaatatctctctttactagaaaacagatctcctctataaggtcctacccttgagatataaaaggtaggcccccctccttc

SEQ ID NO: 100213 - DNA, 590 bp, Zea Mays
agaagtttggttcatcaactttagaggattcttcgggtctttttggtttagggagctcaatgagtcctaggtcccgtaagcccataaagaggtcttccacttcttcagcagggaaggaaaacttctgattttgacgctcgctaagagttggcctcctagaagctgatgcaccccctttatttggcaatcttgcagcagtgcccccagtttggaatttgtggggagctactgttgcttccattgcttgcatttgctttggcttggaaggtacttgcttatcccgttggttgtttttgtcaaacggcttgttgaatgcccttgacggacgagacacatgattcatgtagttctctatatccgttgccttcgaggacaactcctcaaaagttattggtctcataccttgcaaatgaatagccatgtccgggctcaaattattcatgcacatccgaactgcctctggttctgtgattggttgtgggcaatggagacttaaattcctccatctatttatgaagtcagcagccttctcatttgccctttgcatggtttgagtcagttcggttatccccactgtcctttgagtgcta

SEQ ID NO: 100214 - DNA, 1037 bp, Zea Mays
taggtagaagacatcaatattacaagggtcaaaggcgataataggcaagggtatgagagaaaagacgaaggcattgaagagccagtgggatgagtacaacaaagaatggagttacgtccaggcttacacgctttgaagaagaggatatcgccaagggtgagataagtaaaacaccgctctcaaattgggttatgagattggagattttagataacatacataacgtgaccaccaaggtaagatcgagggatgagaaaggtaaaggtaataacaaacaaaaacacaacaaaggatagagttaaaaactcgcaggcgacaaagaagaagatacaaccaagggaaaagtaggtaaagtacaatgctcagattgagatggaaaagaggatattttaaaggccagtataagataaacatcaaggtaagatatataggtgataaggataaaggagataatgatgaaaagcataatccacggacagagttaatgcaagactcgcaaagtgacgagatggagaaaacaatcaaggataagataagtgaggttccgacagaagagttgaagtaaaaattcattaccgaagaaagttacgaggaattaacgagatcacccaggatgtgcaaaataaaatgatcgctcatggatcattaagaaacaagggtggtcaagggcatgttaactgaaatgtcttaagcagacattggggtatgaagataagcatacatgaaaatataagagtatgcaagactccaaggatacgagcatactaagaccaagggaatagaaattgccgatagataatgacttaacaacggaataagaagggatctcaaaagacaggaaggtcatgaaaatataaactgaaatgtttaaataggcaacatagtttttagagttaagtatttgaattaagggataagggtatggaagaatccaaaagatgcaccatgtcaataccaatggaatagatattgtcgaaggttagtaatttaacgatagaaaaggaaagaataccaaaagacaagaaagttatggtcac

SEQ ID NO: 100215 - DNA, 406 bp, Zea Mays
ctttcaccgccgaagatgaaggcggcgtttgctcaatcgcttgcattacgttcacaatccgccgtttcttttgccctccaaccttctcctccgcagccgaaggcactttcatcttctgtaaaaggttggtcaattccgatcccagaggacttatcagcttgaatggtggggatttagtcattaccttcaacattttgaccacctcgactgcagtgggtgacgaagggctcaaggtttccttcgacgcttcatctaccttcggttcaacataaggtatctcatcaagtttccttttcttaggggcttgcgccttcggctccggcgttgctttcactttcttcagagccttttcgtccgccttcacggacaaggcagcttccctgctcagaatgctgacaactctttt

SEQ ID NO: 100216 - DNA, 271 bp, Zea Mays
atctcagaagtgatgaagcaatcaggtcttgttgtgccagaggaggctgttgccgaaggtacctcgattgctgaagctgaacagatcgcagttgaaggagggagtgagaacgaagatgaagaggattacactattctaagcccagcgaaacccagccacattgaatttggtaaatctactgtgacggcagacgatatggttttgatgaagaaattgggctactttggggaggccgagagcaaacttgtccgatttgttggggaagaggtga

SEQ ID NO: 100217 - DNA, 303 bp, Zea Mays
tccgttgccgagcttctcgctgaggaggttcttcctctgacatggttggctcgtcgtcggagatgggagatgactctactctccctccgatgaagaggacgtcggggtagaaaggagttgctgtggtgatgaatttctttccgtccttctttgagggcgaaggtgtcggaaggacagcctgatgggcctctatcccgcttgcttctttttttcctcgtaatttgtgtccactcctctgtggatgaggtggacaacggggttcttcgggtaagtgaattcccggctcttgacttgcagagggta

SEQ ID NO: 100218 - DNA, 389 bp, Zea Mays
gggtgcgttccgccacccggccgaagattttcctctccgacatttggcgcaccaggtaggggctttggcattaggttttcgcctgttttcctgctcgacaccatggtccagatcgtcgagcaccgcgacttcattcccgaggacttcccgatggaggaagaggctgcgtcttccatgccacaggcctccaaccgccctacgcctggagctactgttgtgcgatctgcgcggcagcacactcccgcacagacatctagggcttcgtcaagggctgctcctggggtgctgtctgcagccagggagttgctacgccaccctcctagctccacggcctcgccgggggctatgaagcagtggtgtgacgatgtcgaccgtctgcttggcatggc

SEQ ID NO: 100219 - DNA, 316 bp, Zea Mays
acgcgagtacaaactctagcgttctggcgtcaacgtgtgtgtggccatcagggcaacaacaatacaacaagcctttataacaagcgcaattgtggctcggtagtcggggtacacaataagtccacacaacgtgcacaacaggtgcaactgtggcttgatgatcacgacagacggacagtgcctgcagggcatacgaaaaatgtgtgactcgacgatggcggtccgactcaacaggagcggtccaattaagcgagactgcgacatagcaatcacatgacgcagtcaatgcttagccaatgccataactcagtcaatt

SEQ ID NO: 100220 - DNA, 720 bp, Zea Mays
taaacatagaaaacaagtaaaaaacaggttctctaacttaattgacccatgtaaaagttaaaaccatccaaaatcgggtttgctcaaacaggatgtcgatgtgacatatcacgttagagcatactaatcaaagttcggggacacaagtgtcacaagatgctaagtttgggggatcaagtgacaaaaccaaccaaatttggggacccgtatgactctaatgtggcacgccacatcaatatccaatttaagcaaacccacttttggattgttttatatggaccgactaagctggagtatctgttttgctggttttctgattttagggacccatgtgatacatcgtgaagttctaggactgctaatgcatttcactctgcatttttaatcactaaatcgatgaacttggatcctaaactcatcatagaagtgatgcaaccacgaagaaaaaactttatatgaaattagcagaggtccacgagatctaagcatttttaggtaacttgtttatttggcatccttcaagggttaattgctcaagcagctcgtgaactttatgaggtgtgttgcttatgaccatgaacaaccaaattgcatttctgagctacttatgctctttgatggcacatcatacgtccacaccaattctggaggccatgaaatatgcacattagtacccacatgcttgactcattttcttttctaaacctcctcctattattc

SEQ ID NO: 100221 - DNA, 288 bp, Zea Mays
tagacctcggagtgtattcgccatgtcctccttcacgtgtcgacccaacgaatcgaggtttggggcagtgcttggaagagtgtgtcgcttggtaatggcgcgtccgccgtcgggggcgctgttggccgtgcccaggcatcgctggggaagacgagttgatggtcgttggttcggtgatcaacggtgtagcttatttcctacgcgtacctgttcgcggaatgatctgtgccattcaggggtgatcggatggatccaaagtgattgcgattatttaaaacaagaaccgtt

SEQ ID NO: 100222 - DNA, 284 bp, Zea Mays
taggaagttgattaaagaaatatgcatttggttatcaatcattgaattccttttaagcaacaatcccagaagtaatcccaaagttcaccggcagctacatgttatttccaagaccaactaaccaacaaaagcacaactttatctagtgcatgaaacgtggaataattcatctaaaagttgcagtgaccttgttttatgttcataatgttgtgtatagatgtagtgcttacttggcttgtaaagtcatacattggcaattataagcttgaactctcgtagagcat

SEQ ID NO: 100223 - DNA, 339 bp, Zea Mays
aattttttgcgggggatttttgcgtgtatattatatggctccgcctcattaaaaacctcaccccccgggaggaaaagagtgcgggccggaatgatattgtttggtgaattacaagggcgtgttagccctgaggattcaaacaaaaaatttgcgaagattatcaatattccaggaatgctctaggtcttcgccggatggcgttgttagcctgtacgcgctgggggacgccttcgtcttgacgatgaagggaccctcccactttggctccagcttgccccgtgactctgtccgagttgtccggacgagtacgaggtccccttcgttgaattctcttgggac

SEQ ID NO: 100224 - DNA, 603 bp, Zea Mays
tggcagtgaaccagtggagaccttatcttcaacactcggaattcattattttctcggaccaacgcagtctatcgcacctgtccgaacaacggctccataccccttggcagcagcgcgtcttcaccaagctgctcggtcttcagtacagaattgtgtacaaaaaaggggtagataacggtgcagcagacgcattgtctcgccgcccccaagaaggtctcgaagtattccatgtgtcggctgctagtccacaatggctgtccaaggtggttcagggttacagtcaggacaacaaggcccagtctttgctaactgaattgtcactccacccaacgactgagggaccctactcgctgcatcaaggattgatccactacaagggtcgtgtctggctgggcaacaatttgtctctccagcagcaggtcctgtctgccctccacgatagtgctctaggcggtcattcaggttttccggtcacatatcgccgcgtcaagcagttgttttcctggcctggtctcaagaaaacagtaaaggactatgtggcctcatgctccgtttgccagcaggccaagtcagatagagccaagtatcctggccttctccaac

SEQ ID NO: 100225 - DNA, 365 bp, Zea Mays
ctctttgcgaccgatcgcatgaacttgctagatcccattttttgagactagtgtctcctttagctaaacatggaagctatttggcagaatgaacaccatgttgatgtccattgattgtgtcgattcttcatgggcatcttgttgtgtcctttattaccacaccatgagcttaggttggtgtggcggttccacatgttgatgacgtagagcatccatgatcatgttgaccttcctaggaaagcagatatacctctcctccacatgctctaggctctacagtcgttatacccagcgcttctacgattgtgagaggccatcggggcaccaccatggttggtgattgttgttgtgttgcgcctccttcc

SEQ ID NO: 100226 - DNA, 447 bp, Zea Mays
gtcgcctaagggtgcagccggaataacgttaatcgaagtctctcattacaaagacactccgcacagagtcccccacagacgcaggtggaccaacacaagtgtacgaatacggccaacaggccacatcaccatacaaattacaattacatacacacggcgagggcatcgcctattacaaacacacggcgagggcatcgcctattacattggctcaaccttcagaatgatacccatctccatgtaattaaacagcattatcctcaattcctcaccctcaaaaagcttccgaagatccccctcacctatgctcgccccagccggtgaggacaacaattctcgtatatcaacccggtttacacagagacggccacgctccatccccatacgacagcgcttgccactccgcgaaaattcacccacactatgttttcccaccacccttcgctg

SEQ ID NO: 100227 - DNA, 415 bp, Zea Mays
tcttgttcagttgttaagcttcctgatgttggttttggagtaccgtgttaacagaaatgaaagtctagttatagcaacaacgtgtatacgtcatttaggcatctttttatgtttactcgctgcagttagctcttaataacacctcatcgtgtagcctacgagatttaaaaaactatattgtttttgttgattagatttttttaaaagaaagggcatagccccctatttcattaagaaataggtaacagattcattacaaaccagaacggtgggaaacctcccatcaaccaaaaagtagacaaactagtgaaactaacttcaaccatccgaactagaagagaagaagttaatcgacactaatcacctaccaaactgccccacagttttaagctaagcttatttacatagagcaaac

SEQ ID NO: 100228 - DNA, 935 bp, Zea Mays
ctcaaccaaattttctttttgaatgccttgagccacgatgcttgatggtaacggtgtgtcactcttagtgtcctcatctagcactggatccgcattggtaacgctgtgtcactcttggtgtcctcctcatatagcactgaatgcacgtttgagcgacctatttccatcatatgacagattggattgtttgtgtcatataaggacaactctatcaactgtcaaaatggatcctcctccccttgcacacttgtgaacccaattgcatcctttaggcttagcctcaagttgtagttcacatacacaagcttatggggcttctgatgcgacaaccgatttctcacctttgtgtgcaccaaagcaaaagtgctctagttgcactcacaaatatggattgttagctttatgccctggaatcgcctatgtttagaaccacttagcccactgctgaccaacaaaatggaccacattcttttccgccttagagaacgaacctgtatcaatccttgtctacaccatttgtggcttctccttcttagaaggtgttctcccaaatgcgacacgaacaacaccttgggacgagccaccacatatctcatatgtgccactgctcgcgcgagcatgcctcctaagctcctccttgtctctcgacacacacattgcgacctgtaactcagcatcatcatcggaaccacgatacgaacccaccgatgccgacctccatgcctcttccattgctcttgcttcctttttatcgtggaccttgttaatctcccgctgaaagaaatcgacaaagtccagtggaacgttgcgacaaccttgcacatccccccacgcgatgcaaggtgttgcttgaaacgtgtagtactgcccccttccacttttttcttgcaatattttcacttgaaactaggacatatgttgtccccatgttccca

SEQ ID NO: 100229 - DNA, 764 bp, Zea Mays
gtacccggaaatttgtgtacccgataattcgggttcaggtatcaggtactcccgaagtacccagatttaaaaaaacagtcactacccacatgaaacatacaaaggtcactagtaaatacacacagggaaaatatgatacaataaaatacatcaggttctcaggaactgctagactttagaaaatatgatacaataaaatacaataaaatacatacatcaggtgcacacggtagcacactagcaccactgcagtctgcaccagcacacttcacaagttcacattcacatagacagaacaccactctccagtctccagcacactgacacactaaactcggcacgacagcacaccactctccactctccagcacttggaacacacggacacacccctagagtacaccagtgaccagtctacagagggaaacaatctcatctctcaagtagagacacaaccatacagatacaggcagcacgccagcacagacacgcagacacagggatagacaatcaccaataagccaaacgcgcaccacagtccacaaccgtacttatcctatcattctgtacaacatacacaagtccaaacaaaatatatatataagtaaacagttcatagcatgactaaaaagagaacaaagttatttaaacagcgaatagttcatagcagattaacagctcactgttgtgttgcttgagacttggaagtggaagtagcctcggttctttttcctttgccaccattaccaaattcttcaattagc

SEQ ID NO: 100230 - DNA, 776 bp, Zea Mays
ggcagatgcgctaccgcttgtaggggtgcataggcgatgtcgtcctgtcttcttttgccttggtaacgtgcgggctatagtaggcgtcatgatgacagtagcccaagcgacacagggagaaagtgtcttgccttgataacgcgtgagttactgttcgacatgcgtactgtgaacgcaccacctaccactagggcaggcaggtatgtgtctcatccttagttaatgcaaaggcgatccacgcttagaggctgacatcaggctttccccgatggcttacgtcacacgccgtagaacatgtgcagctagggatgaaaacggacggaaaaacccctctcccgtttccgtatccgcatttcatcatcggaaacgggatcgggtccggaatagtcaggaacggaaacggagcgggataaacggaattacgaaaacgaacggaaacggaaatactaacggaaactcataatttaatacaaatagaaatgttattcatgtttgactagtgattgattggcataacaataacataaaacaaatagatatagagaggcaatattctattgttgtttggttgctaaatgtgtacatttagctacatccgatgttgtttaagactttagatcacttgtcatttgaaaagagccggtggttacaatgaccaattgtgctataatttgtcacctaaatacacgaggatttagtttatatactaatgcatattatgctcgtcccatatttgtcaaatacggaataaatacgggttcaatccgaaaaaacgg

SEQ ID NO: 100231 - DNA, 385 bp, Zea Mays
ttcgttgttttgggccacatgtgcgtgatgaccttgacgcacctgctgatttcagttctaacagccatcgtcgttccagctggaagctaacctaggaccttctcgtcccttctcattctctccaatgtgatccctttcttttagacctcggtgcctgtcacgcccacactagtcggcgtcggtgcggccattgttgccctcctttagcttgtatctctccggccactactcttcagttaagtagagccttccttcgctctgagctaggatcaggtcggaggcgtcctccaacgccagcagatgtctcgtgacctcctcgacagagagagtggagatgtttaacaatgtttccatggagatgaccaaatgtttgcacatgttgcaa

SEQ ID NO: 100232 - DNA, 465 bp, Zea Mays
cggacggttcggcctcctggctcggacggtccgcacagggacacagagacaggtgtgcgaacagacacctcaggtagagtcgcggacagtccgccgaccatagaattaagtaattttagtttccgcttttacaaaagactttgactttcgaaaaccgaagtgtcgttagccctcatgcaaattcaacagtttatgctctatgaggcactaagttttaaaccgatcaagttcattgacccctcttaataatacgactatctagcctattatccattcaatttcttctctaaacttctgatgaccgacaaaaacaaaacctatgttatacctttgccttcacttgatccacaaccattggttatacgtctcaaagactttcctgtttcctgtggtccaatcctgcattcttatttctccaagaactgttagtccacaagcagttgtcattaattaccaaaacaccac

SEQ ID NO: 100233 - DNA, 677 bp, Zea Mays
gttgctgcccaattggaacaagtgatcaaagatggtgcagaggaaggaagcgacttacatttctttgcgactcatcttttaatgtagaaacgttatagagatgtatttgctaccctcaagaccaaagaaggaaggaacacttggctgcgccgtgcttacgagaagcatgagaagtcaaattaggtgttggtagccctgttatgcttcaaactgtcaggcttacgagtcttttttccatcgtccagtgttttcacaaacaatctatcgtttttatgtcgtccagtgcagttacaaacattgagtcctatgagtatttttttcagtcggagaagtatttcaaatattcgagtttagatagtattttcaataataattgttgtatatgtgtgagaactatgttggacttatgataaatgtacaatcgtcagtttgttgtatgttaaattgctgattgcagaaaactggttattgtttgtatctatgctgatgtttcagcctgataccgaccatagtgatgatgatagggatcatgaggaattattagtggcagcattgactttggatatttggggtagctcgtcaagtagggtacccagaagaagcatggtcgaaacaggtatccaatgggttgagcgtacattggagaatagtgatgattgctatgacatgtttcgcat

SEQ ID NO: 100234 - DNA, 430 bp, Zea Mays
gtgaactgtgggttgatacttcttaaacaaagaggctcttttgcaattgatacatggtcgaaggggtatcgccgaagatcagctgtccgatcacacacccgctgttgagatcaaatctgaaccgactctctacctcgcccctccgatctaacattaacggtctagatttttaattgactgagatcatcatggacccgtccgatctggcgccaacggttgggatttaaaacgtgaaggggtacattgagctctaatctcacacgtccgctaccagatcaacggtcaatgcagtcttctcccaccaccggtcggtagggcggtggcgcttgcatgcccacggcggcgttctcgccagcgacagccaaaatggctagctggcgacctatcccccacccgagacgacccatacaacgtgtgtacaatggcgagc

SEQ ID NO: 100235 - DNA, 323 bp, Zea Mays
cagtaacatcgcttgcctcacgttcacaaaaccgtaaaacagacatgcatatgcattctatttgaactggttcaagaatgggattgtcaataacactagggaagatgaatggcgatgtttggtctgttcagttggcccagctcccatttagtctagtccaaccgtgatagatgtgttgccaccatgtcacttgcagtcttgcagagcagtgaaggaacattgcaataacactcttggtttgtcattaatttgaatgaaaatcctacagatggtccgcgtaccacttataagcctagaccatcaatcttccagagtcaggacaa

SEQ ID NO: 100236 - DNA, 749 bp, Zea Mays
gtggcggtatggttcgtccgcccgtgtggtgtgttctgtgtgtgtgttgtcagccaatatatgcatggcatgagtgtgtcaaccttcgccctcagccgccactgccaagagcccaagaccccatttggaagcaatgaagcggtcaagccccgagcacccttagaactcaatagtaaaccctagagcactccccaagaccccaacctactaaccatcgctcactccccacagcaactctgacccatacatcctaccactgcatctagattctagagaccaaaatcctccatggcggttgaaatggaaatgggtttaaccattctctcatattgattttggtgttttatgaccatcactacttcatggactaactagtttgactagtctttgattcacgggttcataagtccacaggttcagtctctaggtcagaaacagctcaaaaccaacctaagtgggggtaaaaatttgattaagaggaactttgcctagttccacacttcggttaagttacatatatccctaggaacctattttacacatcaaagaaagttggatagctcaggtttacaaagccacccttttggagctagtttgagcgaaaatagaactctaagttgagaaagtaaaaagtccaaaattcatgacttagactagttggattgtcactacatatttttgtctaagtcttaggaacatcctcaaagatagccaaaaagatttgaagaaaagagtgaaaataggtctgc

SEQ ID NO: 100237 - DNA, 325 bp, Zea Mays
cgggcgggtcgaatgacaagttcgaactaggtatgacaggtcaaaggcatcgtcttccatggcatgggccccaatatgagactagccaacccctcacagggaagtcaacaaaggatgacacataaccagccacaagataggacaacatgtaacaatgatcgaggcatggatacaggactctaatggaagaaggaaaatatagttatgtaataggctccccttgtcttagtccataaaagggagggagggtaccgatccaagacatgggcaacaagcgcacaccagtagccgacacttgtagctcaccaagaactttgcatcaccc

SEQ ID NO: 100238 - DNA, 345 bp, Zea Mays
aaccagctctacaccaaatttagcaagtgtgagttctgcttagataaaataccttttcttgggcatatcatctccaatggaggaatcacagtagatagccaaagtaaaggaaatagtgggatggaagatacctgaatcggttactgaaattcaggagtttcttgggactcacgtgatattaccagcatttcatcgaggggttctccaaaatagtgaagccaatgacctcgcagttagagaaggagaaggaatttaagtggactccggcctgccaggatagtttcactcagctgaagttgagattgatgtcacccctagtgctagtaatgctagatctatagaagg

SEQ ID NO: 100239 - DNA, 340 bp, Zea Mays
cgcgttatttaattaatgaatggaaactcaagttggaaattggttacgttagttaattcatgtagttaatcatctaccttatttaatgttgatcaattgaaaatggttatgattctattagtgcatgtgactaatccttttcgttagagctaagtggaactagagcacgtaacgactagttatgcgtctacccgtaatacgccctgagtatagctttaaccactgcgagacctttcttctctttctagccatggcatatgcaatatcgtatgttatactctatgcatgtttaatctatttgttctcttgtaatgatgtactgtttgtttcctaattcgaa

SEQ ID NO: 100240 - DNA, 324 bp, Zea Mays
ctgtggcgtgagggttcggcgatggaagacctgttgcaatttaatctctctaaacaacccacattaattgtgtggtgtgttctaaatagaagctaccgaatctaaaaaacctaaccatctaatttggaacggaaatcgaagtagaaaaggagtgacaatgtaatatacctttggtcgtgtggcgtgtcaatgctctcccggcggtggtggagtgagaggggttagggttttgccttcccctccccaaatctaatttggttcgatctgatctgatggatggaaagtaaagtgggagggagtggcggcggacctccatggcgcagg

SEQ ID NO: 100241 - DNA, 462 bp, Zea Mays
ttgaaacaaaggagatgttaattcctcactaccggatacaaattctttgccgaatgtgactatcggcaaagagaactcggtgaactatgcatcgacaatagtttttttgtcgagtacttgccatctagtacttggaaaagagaagtcgctgtcacggcgtcaagtgacggtgagtgttctccctgacgctcggcaaagccagtctataccgagtgttgtcgttcgccgagagtggcacactcgacaaagcgcctagcactcggcacattaaatctgttttcggtagtgcttgttgcatgtaacggtcagtcggtctcctaccaaacatgcatgcatatatggctcaaagtaaatgacgattatgttgagcccatctatccccatcccctatttttgcctgtctacaccatgcatgcatacctttgcaaataccaaatataatattaaggaggtgtttgttta

SEQ ID NO: 100242 - DNA, 991 bp, Zea Mays
aacgaattatattttgggacggagggagtagaaaataattctacttgattacatatgcgtccaatgttcaggaaagtatctatacagctggcatctgatgcattgtttccttgtcaacaaaaagggaaacagatatcaactattcccataggtaaaaagggaaatgtatgccaaagctggaaatattgtgatgtaattaatgggttattgctataagataatttatagcatgattagtaagtagaacaagtgtgttttagagagcatgcatcgtcatccactgcctattaatggaaagaccatgagaagaatacccagcagtccaatctcagttcacaagcagcaggaaacatgttatagttacaccaggactgagtctgatagtgattcgaaaccagcacaaacaactccgactacacgctaccaaaccaaaaaaatggggggaaacaaaaggagcgcgtgcgagggtgcgacaaactcttgcgccacttgagcaactctatgtcaaaggcagatgcggaatcaccgcattgtttttcgctcaattgtcctcaaacaagcttctcgacaacaatgctatgggcatccaagtcaaacagcggggagcactagaagctcagcgtaacagtttttagcgccaaaaaaagctactacatgcaagcaatttgaactaatcttgcctgatgcgtttagcagacgctaagcattcgaaaatagcaagtgcaaccaggtctccggtcctccccgagctggaactatcaaccatccatacaccatgcaacgccggacctcagattgcaggcagaggtgtcaattcaccagaacctataacttcgcactacaccacaggctactctagaacttctgaagccatggccaccagggtgctagtatactcgtactaatacacggtacccttcgtcccacgagcaggcagcgaaaagctggcgcgccccgacgggcaagctccagcggcgcgagctcggacgac

SEQ ID NO: 100243 - DNA, 1546 bp, Zea Mays
aagatccactgttgtagaggtggactctttggctcaaagaagatccaagtcttacagagaagcaacaacatcgaaagagtcggcttcaccagcactagaatctagcctaatcgataaggtagctttgttgacatacacacccaccctggctaggtatgctagtgtggtagcaagtaatccatgattgtttgctcaatttttcttccttattcttatagtagggtaatgcactggtaatggtggtgttggccttgtccttgccatgctcctcattacatttgtgatgtccaaacttttcacaaagtttggcccaaatgagatgagcatcctcgatgagctcaccatcataaagaataatccaatcaatgatctctacacacattgttctcaatagtatgttataacttgagcattaagttgcaggcacataatgcttgaaataacaaaatccacaccaatcggactcatggtccacataatttcaagaacatgtgatgaccaagaagagtctgagccatgctcgcggagtagctcaaatggtatctcacatgttgtagacattgattatcacaaacgattaagcttaaccatgagacttcgttttatacaaattggaaggactgatttgatgcctagggatgggtgaataggctctataaaatttctcaataagtatcagcacaaacaaagctaattaataaatctaagtgggaaagtagacctggttgactgtagatctcggcttagctggatttcccttgttagctgaggtacaacccaaacccggcttagctacttggatgtctataaaaagcttcaagcctcctcctcttgcaacattgatacaacttggtgtgtggtgttcttataagtaggtaaatactttcactcacttcctataatcacaaatcaccacatccaagtagcgcaactggtagcacgagtaatatatgcaataaaaacaaatgcaatgcaaacaaaggaggagacctcaaaaatgtgaaaaacatcctaatccaatcaatttgtgcattgtttgccccctacaacgaaaaaagtgaaaaacattgaatccgaaacagtatgtgtatctttatatctatcatttgagaaaatataagacaaatttataactgtaaagcgcatgaaaaaaacatcacatgtgacggagagagcaagggcagatctacaccccagccatcccgtccaaagcccagggcttgatctcattagcttcatatgagtctctatttgttccattaagactagtctggtaactctattttcttaaaggatttatatttttcttgagaaaataaaaattacttgaaaaaatggggttgtcactagtcctaaaggaatgaaattcaataggttaggtctgggtcatacaaaaattctagatctgcccttggcagagagttcctctacctcacgcctcacttgtgtttgattgttgggtcggtcttctattcggtagggtacacgtacaaggaagcccaagttcatataatggaattgtagtcggcctaacgcgaattgagag

SEQ ID NO: 100244 - DNA, 858 bp, Zea Mays
tggaaataccccgttcttcatggtctatggttcggaagcggtgctacccgccgacctcaagttcggggcgccaaggctggtcttcaaaagcatagctgaagctgaagctaccaggctagaggatattgatgtgctggagaaagagcgattgaacacagtaattcagtcagccagatacaagcagaccttgaggcgctatcatgataaagctatatgacatcgatcctttgtagtgggagacttggtccttcgccgaattctaacgggggaaggacggcacaagttttcaccactatgggaagggccattcattgtatcggaggtcactcagccaggatcataccggcttactcaaatggatggtacgaaagtggagaattcatggaacatagagcatcttagaaagttttacccttagcaagacctcgaaagctatcggagcaacattgtactctataaggagagaatacatcatcaataaagttttcattttcaagggcattcgaactgttaactatcacttgacttcgattcgattggacttggaatcaacacgcttactcgactcaggttgaccactataccctactaacggagcaatcggcttaagtcggcggcgacttaagacggtgcaacatgctcgcgcttacttgacttagggtgaccactataccctactaacggagtaatcggcttaagtcgacgacgacttaagacagtgcaacatgctcgcacttacttgacttagggtgaccactataccctactaacggagcaatcggcttaagtcggcgacgacttaagacggtgcaacatgctcgcgcttacttgacttagggtgaccactataccctacta

SEQ ID NO: 100245 - DNA, 483 bp, Zea Mays
aacaacatgcagcagcgctttcaggataatatggaggccttttcaagtcagtttgacaacctgtccacaaatgaaagcatccaggatatccgtcagaggcaacaacagctacaacatgacttcgggcagttcttctttttcttcgacactttcagcacccattactacagcatgtaccctccacctagtgatcagtgagacccctcttttgtggccattgatgccaaaagggaagagaagaagctgaagttagggatgtcataatcagggggagctcatgtggacattgagactttgcatatgcatgtttactatttaaactttttgtcttatggattttttgaatatgtcttgtgtttgtggacgaatgtctagtgatattttgtggatcgaactatgtctgttaaatcttatgtttctattagttcgaattatcctgtgaatggttgatcgaggagcgattaaatttgctgcgcttatttc

SEQ ID NO: 100246 - DNA, 320 bp, Zea Mays
gatttattatgagattactaaacttaagttgggagaagatcccttgatcatccaacatagctaagccctaagccaaatccgacatggttgaaagtgttgaagaattaagagtgcagtaggattcgtccaagttcgaactactataatatttgagttcataaaaaaaccaattgcacttaagccttgatgctgctaaataactaggcatcaagatcatttctgttttatctgacatgttaaagtattagtctaatgagctaggcagttttgcaggaagcatttgagatgattgtatggtgactactaaaattctactgaac

SEQ ID NO: 100247 - DNA, 639 bp, Zea Mays
ctaagagggctcgtaacctactaaccttatatgggtttcaggtagggattacaatgtgtatatacttgtactcgttaaaaaaaatctacccgtcaggttacctatatccgctcacaggtatagaatcttactcatacccatacccatgcatgtaattttacctaacaagtaatccaagattgttagtaaagtctcaaattctaatattgccaatcattcaaaatgtcaaacaaacacacaaaaagttctaacttcaaatacaacaaactatatgattacataacttgatggttaaacacacaattgttagagaaggattttcttttagccaatatgggctttattagatcgtaatagtgttgtgatgcgagtatagtttgcgccataggtacatgggtatgggtagtacccatccatacccatactcgtcttcccgaccgatgggtagagttttttgcccattaacatacccatggataaagaaatcttgcggtactcattcttcattgctaactttggcaacaaatatgaacttggcaatatcttgttgtcattgtttagtggttgcttctatagtgtcaagcattagaggtttgcaaagaaaagactctacagtggcgagaagcctgacaatgttag

SEQ ID NO: 100248 - DNA, 399 bp, Zea Mays
gtcgagcttcgaaactaaatataaaatgtaagtgaaagttgaactggaccatgagtttgtattgcaaacaatggtactcaaaactaagcacatatatttgacataaactttgtcataaaatacacttgtttaaatatgaataacttacttcacaatatccgaaaggttcggccccatggcgtgccttcctcttgtcggctttagtcaatgcttttatgatattcttatcaaagaattttatgcgaggtgtaccaagcttattttgaggggcaacggttgcatgcaggtgatccaggtaatacaactacagaaaatatttcaatgtgcaagggctgtgtaagtaaacataacaaacatcataaaatatgatatatcatgccccacaaaaaaacaatgagc

SEQ ID NO: 100249 - DNA, 293 bp, Zea Mays
ctgaatctccacttcgacgctctcagatccgattatcgtacaagcaggtctaatcctcagaattatccatctccatcgttacctcttgggatcgatcgattattcagcgctgcctatatatatacatatttatccatatggaaacagaaacctcctagtcatgcacaatgggtcaatggttgcttgcgtcacttctctgacgggtcactcgctgctctgaagccaaggtggttgcattgcattgcatcactcaagaacggaacggatgatgagggttgtctctctcgaccctg

SEQ ID NO: 100250 - DNA, 349 bp, Zea Mays
gcaattgttagatgaactgggtaaggctgggaaacgagtactaggggtactcggctgaatagtttgtgtaggggcagcagttggatggatgaagataggttgcttgaaaggataggagggtgggcgaggaaaagagcgatttgggttaaagggacggatcacctactttgactgcttctcggatccttgagaggatccctcacccccttcacggccaaacctttttgtctttccctgccttgaactctttgcctccaccgagagtgctatgctcacggccctactgaaagcgagatgtagacaagtggccattttccgctgtagccgatcattcagacctctcatgaaa

SEQ ID NO: 100251 - DNA, 436 bp, Zea Mays
gcaaggtggcgcgaccgaaggggtatgcaagcgcgccagccgttggatctcaacctgacggttgcgattagatcggtccatataatgaaccggtatgcgattgcggccacaggattctaaatctacggtcagcatttaatgggacgcgattcaataaggaccatccgatccgcccaacggctcggatcaaatcaccgaaagggtacactctgctcttaatcggagccattacttccccgatcaacggctcaaaatccaccgtggaaccatctactcttagccctccgataatgatcctatggcacagaagccatcttctacttccagggcgaggacacagcggcgaccattgttcccgcgacggaccctcgccgtcgctcaaccagtgttccccgtacacgcgccacagattccccaatctgaatcccataatcgc

SEQ ID NO: 100252 - DNA, 315 bp, Zea Mays
cttgtattttgataccggagtgagtatatgtactactcgttttcaagcgtccggttgaagatttccaaaaagggagggaggcaggcctggtctggcctggccccattgctgctaatctaacgtttcatgtcgatcatgctgcttttgatcaataatccgttgccgattcaatcacctcgttcaatctggcaatctgcatcgccaggtcaccaactaactctatttctatctctcagtttactgtccttgtgaccttgtcgaggaattaaatgccttctccatgatttgcacaatccaaatacagctagcctttcc

SEQ ID NO: 100253 - DNA, 684 bp, Zea Mays
gatgaaatggctaccttggtaaggcggtctattattacctagatagagccattccctttttgcgtccagggtagtccggttacaaaatccatgcctatttcttcccacttccattcaggcactgggaggggttgcaataggcctgcgggcttctgttgctcggctttcgttcgttggcaggtgtcacaccgggccacatactgtgctatctctgtcttcatccctctccaccagtatctggttttgaggtctaggtacatcttggtggttcctgggtggatggagtaggttgagttgtgagcttcctcgagcaggacttctcgtgcctccccttttggtacacacagacgattcttgaaccaaagggctccttgtccatctgtcctgaggtccggaagttgttctttgcgagctttttccacaagtctcgctgtctctgagtccaggcgttgagctttgcatatgaggtcttctagcattggtttgacttcgaggctgccattgttccccaaacatgcattcagttgagctgattccttcttccaatcttctaaaaagttggttccctttatcccgaaaggtttttggctgagggcctcttctaccacgttggcctttccggggtgataatgaatctcaaggtcataatctttgatcagttccagccatcttctctgacggagg

SEQ ID NO: 100254 - DNA, 566 bp, Zea Mays
tggagctatccattcaaatactgaggcttgtggtgccccaggctaggtgatgtggtagtctatatggatattgtggtgtggcgttgctcctcccctcatgggtgtttaagcaagtgggtaggcgggtagatatgtagatgggtacatgggtggatttgccaacgatgtgtatgtgtgtggtggatatgtaggtggtgaatatggatgtggtggataaacaggtgctgtcgtccatggtgtcgatcgtgtggctagaaccagttagattaccttttgggccattttagtcagttgtgtttcttttgcttgcttgtctaatattggtgaatgaggtcgctttattggctgatcctttggagcggtcttcttgttgacatatttagaaagaagttgaccaaaagtagactggggtactaatgagtttgccatatgccttagatgtattttgcttctatgtacatatctctagatgtcgttgactgaaggtacaagatcgatgatatctctactcgtccatggactgtccacagtaggtagccggactgttcaccctcgattaggagcgt

SEQ ID NO: 100255 - DNA, 553 bp, Zea Mays
tagggttattgccacgagctggagtggtgttggcattcctcttagggtaagcgttgccgtagtgtccaacctcaccacacttgaagcatgaattttctgtagtgatattaaggacagtaggtctcaccggggtgccagctgtgacaacctgacgagggtgtggtgtctgaggcgtggcctatggtgactgctaaacagggtgttggtatgattgttgcactcctcctaaatgagctggggtacccagaggttgagtataacgaggacgactgatgtagcctccctgtccctgagtgatagtctttctcttcatctcgcttagctaaacaggtatgtgttcaagggctatggtcttgtctagcagtttctggaaagatgggaatgagtgagacatcatctcatattggagtggcccgatgagtccctacaagaacaattcttgcttcttttcatcttcatcgacctcctcaggagcatatctagataactggatgaatttgtctctgtactcacttactgacatccctccctgcctgagtgagagaaacttctt

SEQ ID NO: 100256 - DNA, 345 bp, Zea Mays
gtcaaaaaatattctgggtatgacgtcaatggatactgttttcgcacaacaaactacgacaaaagtcagcccaatcggaaaacaacgtgttctggagtctttacgcccggccttgacgatgtcgattattttggacgaatcgaagaaatatatgagctcaatttttatggttccaaacctcttactccaatgatattcaaatgacattggtttgaccctcaagtgacgagacagacacattctaatcttgggatagtcgaaatttgacaagattccaccttagcaggagacaatgtctatatcgtggcccaacaggccacacaagtgtattatctcccatatgcg

SEQ ID NO: 100257 - DNA, 1018 bp, Zea Mays
gttagtttgttcttgctactcctggcagatcctaggacatctgcattatatagcacattatgtatcgtctgccttgtcctttctaggacttcatgttttagtagctttagttatatcttagcatgcacaataaatttcgtgaacatataaagtgttactagtttttgttcaaaatctgtgtagttgatccaagcccttcaaatgcaacatgcttccatggtgactgaagatcgagcagatacatgtgttggttgctcattgttcaaatgtaatttccaaatttaataatagaagtttgatataatttacccaaaaaactgatgagctcttttactaaactattgaagtgcactcccccttttttggctaaaaatcaaaatataaaactattttataaaactcttgaagccgctcttaacctttgtaagacttgtaccaagtgggatccccgctaacacactaactgagccgtattgagtatttgacatagatcaattcaattgcagccaatgatagcagttttttaggaaactcgagggttcgcgagtcatgactctacaatgaatataaaaccaaagcaacaagggccgatctctaagggcatgattggttgcttggttggtcacgttcaggcctgccgcatgcgttgatcacacacacatatgtgattagttgtctgcatggtacggacgcggtctttacatgtgggcgcaggccaaacattttcccacccctcagcctggacgcacggagacgtgtggaggaaggttccctggtgaacaggcaggcgtgagcgggaacatcaactaatcacgccctaagattctgccactacgagcaattccctaatatgaccactgggtaaagataacttgaattgatgtaatctgttcatgtcggtcccatacaaaatatggcataatgtcctagaacgcacattagtaagtacaaaacccgattctgtattctatcgccaattgatctgggtctgttagtttagtttaaatttgtatcggct

SEQ ID NO: 100258 - DNA, 409 bp, Zea Mays
tcataggaactttggctgctacaattttgcgtatcggaaggatacgaaggccccggttattggctatcgtaccaagtggctgactggatggactaatgaatggttctacatgaaaggggacgagaaaaagagcgagaagcaaatgagcatggttgagtccattagagttaaacttcgtcatgactcgacccttatgcaatatgcaattggggttaccctatcagttggctgaagtagaatttagagtggtagccgagcacatcagtactagagacttagtacaagagtatttgtcaaacagaacatatccaacttctagtggttggggaatgccgaagagaaaagaagtgggaaagaatcatgagcttgtacctcccttatcgctttaagttcgagaaacaattcgaaa

SEQ ID NO: 100259 - DNA, 286 bp, Zea Mays
agtcaatgagaattttagaaggagaggaataaagcatgatcaagaaaaccaagcaacacatatcgtcaaatgaaacacaatctcacactctctagaatctctcacaatgcgcttaatcactaataaatacaatcacaattatcgcacttggattatctttgatgcttgtgtgaggctttggagtggagtctagctcttttgcaattaatgtggaggttggaatgattgggtgtgttgaatgaaggtggctacattgtatttatagccaccaaacacttcctaatca

SEQ ID NO: 100260 - DNA, 369 bp, Zea Mays
cctccgcaaattttttgtttgactcctcagggctgatttcgcccttgtaattcgcaaaaacaatcttgtaccggcccgcactcttttcctcccggggggtgaggtttttaacgaggcggagccatgtaatatatgtgtgaaaatcccccgcaaaaacatgcgtcgaaaaaagaccgcgacggcggtcttcgacattcgaccaatacgaggtcaacacgaggctaagcgctagccaccctcgcgtgcgacaaatccgcgcagaagtcgcctaagggtgcagccggaccagcacaacaagtgtgaaaaaatcgaagtctatcgcgaagactatccgcgcagaagtcgcctaagggtgcagccggaccagca

SEQ ID NO: 100261 - DNA, 532 bp, Zea Mays
tcaccttttgaagctttatatggaaggaagtgcaggactcctttgtattgggatcagacgggagaaagacaattctttgggcttgaattgattcaagaagcagaagagcaagttcgtataattcgagagaatttgagggtggctcaaaccaggcaaaagagctatgctgataatagaaggaggccactggaatttgaagaaggagattatgtgtacctcaaggtgtcaccacttcgtggaatgaggagattcaaagttaagggcaaattgtcccctcgctatattggaccattcctgatctttagaagagttggggagatggcataccaactcgagttacctgctactctatcggatgtgcataatgtgttccacgtgtcacaacttaagaagtgtctccgtgtccctgaggaacagttaccaatggaagagctcagcgttcaaggtgatttgacttacacggagtacccgatcaagattttggatactttgactcgggttacaagaaataaggtgataaagatgtgtaaag

SEQ ID NO: 100262 - DNA, 292 bp, Zea Mays
ctgaggtgggggtggctgctgctgcacctgctgcattgctgctaaggtctgaccaattgcttggactgcctgagtttgcatcatgaacatctgctcaactgtcatcgggggtggcggtggcaattgctgctgctgtgctgcatcttcttggggtgcctgctgttccagctgagcacgccttgcacctctgcgcctgttctcaaacatctgcagaaaccacacacatatcatatctgactctgcagtctttcaacataagaaaagatatacaaaattcttcatagcactgaat

SEQ ID NO: 100263 - DNA, 578 bp, Zea Mays
gcagttcccttttttgtggttctagctgttgttgctatcgaatggccatgatgctatagttttcgttggttctacactattatcgcaaaaggagaatcacaccgactcactcactcttcaacggcaaatgcacttctgccactggcttcttgcagtattagcccttctactgtacaatatagaaatcttttgcagttctgttgtattaagtgaactgccgtgcctggtatgccctgggccctggctgcttctgctatcttagatgtctataaaattttatatatttgcatgctctgaacaacttgggctggcggatgcccatgtccatgccgctacacaacttaggtctgtactagtgtttcaaacagattttcttattggccccctattttgtactccgtttctttcggattcattgtttttgtgggtttgaatttctataaggatttgcgcatcaaatattgatatgacttcaagacaatattgcagttcatgtcctgaatttgcatcctgagcttgattttctgtcgagttgactttaatagctatttatttgtcacttgtacatctattccact

SEQ ID NO: 100264 - DNA, 399 bp, Zea Mays
gacgtagctgctcaatgttccaagcattttcgtagatttcgccttggctattgtagatcttgtaagttcctggtttcaacaccttgacgatgatgaacgacccttcccagggaggggtgagcttgtggcaccctcgattgtcttgtcgcaactgaagtaccatgtcgccaacctagaagcctcaggatcagattcatcgtgcgtggtagctctacagcgaatgctggtacctggcggagtgcagtagtgctatatcccaagcttcttctagctggttgagtgaatcctcacggttgatttggttgctttggtcgatgtatgcttgtagcctcagggagccatacactaagttagtgggtaggatggcctcgaccccatagactaggaagaatggcgtga

SEQ ID NO: 100265 - DNA, 448 bp, Zea Mays
atgagttgtcttggtcaacctatccacgatgacccaaatagaatcatggtgtcgggaggtattgggcaatcccacgataaaatccatgcaaatatcctcccatttccaagatggtatgtgaaggggctgtaaggtgcctgctaccttcaaatggctggccttgactctccggcaagtgtcgcattcagatatatacttagcaatttccctcttcattctggtccactagtacaaagatctgaggtcatgatacatcttgttactaccggggtgcatggagaattttgaaaggtgagcttcatccaatattttctttctgagctcggggttcttgggaacaaccaatcggtcttcaaaccatagaatccctttggtgtcctgacggaaacatttgtacttttccaccttctgtttgatcatctccttaataacttgaacacccttgtca

SEQ ID NO: 100266 - DNA, 342 bp, Zea Mays
aatctatacttataacgaagtctaactagctcaggcttggcgtccgaagtgcctccttttgacatcttcaatatttcccactcagccactaatggccatgttttaaaagctaagaattcctaaacaagatcccttgttccaatatgtgtgctaacaacattaaaagcaactatggcagcctgcgcttcgaaattgatatagcacatcggcttttgtaactaaaacttgtggcaataggagtttgaataaagccttttatatcagcctgcacgatcaagtcattcttcatatagaaccactcctttgcccattcatttagccacttgctttggtaagtgtcga

SEQ ID NO: 100267 - DNA, 572 bp, Zea Mays
attatattgcctcatgttgactgctaacttaataacctgcagctacttactttctttgaagcaaaatgaagtttgtgctacatattaatacatgtaaaagttagagctttgtactttctttaaagttggctggtataactttcagttcaaactctttactaaaatgttgtaaacttatgtatgtcaatatattgttacttataaccagtttgcttttcttaaaggttgagttttgttacgtgttggctgacagatgtagtgatgttctcgcatgttaaccacgactacatcgactgcggtgcctagggccttgaggccttcctcctgctccttgactggaaggtgaattctgtcgcagattttccaactcgctgttaagcctcatgtgtgttttggttccattttgttttgctagatctgtgagattcatgggtgcagattgatactaagtggcttagttgttttgatggcagctcagactctaacgaacaatgccttctcccctttgtttggactggacttaataacaactacatgtttgctaattttgcacaataaacaataaactctgc

SEQ ID NO: 100268 - DNA, 382 bp, Zea Mays
cttcaaccagagtactgaggacttcaaccgaaaagtgttccaacttgaagacgtcacactaaagcgtttggctggggcattgtacgatcgaatctggggccacacggtcgtgttgtcgtccgggagagggcaggtctggcactggtggaggtgaaggccttttcttttgttgagggaggatattgttgtttagtttctgatgatttgttattttctttctgcaagcattgagggacgaggaggttgaggaccttgctagcttggaatgctttatggctactcaggatgttggtgttgagacaggcacagaggagcagtcgtctcgggcagaggtcagccacgccgacctcgacgcggcggggacttcgcagccttctaccgc

SEQ ID NO: 100269 - DNA, 578 bp, Zea Mays
gcttaactcaatcgaattggtcgaggagcatcaagagaacctaagggtgctgaaacaagagagcagggagcacgaacaaacctagaatacgctgaccacggtgagggctctaccacggtggcggaaaacagaattgggggaaatgggaaattggagagttgtggtggctaatcggaggcaggagcgggtgctcatgcttggtgatgacctaacgcagcagaccgtgccttcaatttatagtggcgctaagtggtggctagtgaatttggtttggcgtggtggcggccggagaagaaaggggctactggcgcacgagattagtggctttcaccatggcggctctccggcgatcaccgggcatgcatgacgcgattcactgcgacgtgttaaccctccaagacgcatggccaggccggataacggtgaactccggcgatgccagcatgatcgtccacggtgggacacgatggccggagtgaacaggagctcaagttcatccacacgacgatctttaccaccctgagccacatccggtactttgctgagcccgaatcgcaacggcgacgagaatcctggcg

SEQ ID NO: 100270 - DNA, 364 bp, Zea Mays
cgcgaggggcgtgattgcttagattttgcgatttgactacatcacagcagtcctacgtcgtcgtgtgatccaaacttcacaaactctcaagctaaggctatcttcaaggatatactataaatcccccccaaccgtattgtcggtgtttcgaacctagctttgacaagtaaatttgtgtgcatgttctgggatctggacggtgtgcgcggtggacacaagatttatataggttagggcagaacgtccctacatccagtctttggcggcttgcactacccagacctttgctgatcaatgctcgtagtaggggttacaagtggacgagagagggaggagaggctcccaagtctcttgtgtggaggag

SEQ ID NO: 100271 - DNA, 501 bp, Zea Mays
cacacccattgggaaacacccattgggtgggggacgaccaagaattttcaatagattttctgaagcagtcacatccatatagtatacacaatgaatgtgttaagacaaaaagaagatatcgatagagatcaaaggaaagccaaatatagatactgaactgcaagtctagtcagcagaagcattgaagcacgaagcgaaatgaagaccagccaagagccatctaccaaacgtccaatctatcgcctatcaaataaatttcaaacctaacagaacatgggcagaccacgctgctggtttctaaaagcatgagatgaagacaaaatgctgatctctaaagcataagtcgatgataaaatgctgatctctaaagcataagccgatgataaaatgctagtttctaaagcatgagacgatgataaaatgttggtttctaaagcatgagatgaagacaaaatgctgatctctaaagcataagccgatgataaaatgttgatctctaaa

SEQ ID NO: 100272 - DNA, 628 bp, Zea Mays
ttgagacatcgtttgagatcgatggcgagcctcttaagacgtcgtatctgcgccttgcgctaaatgtcggcaggttcgccccaaccaagctcgctgatggatgagtgggaagtcatatcaagcatggggtcacgctaaggactctgaccccctacctggcgtgccaaatgttggagggaaaatccttcggtcgggtggtggagtgcaccctccctgatcctaagatgaggaaggggcctaaaggtttgcctaaccggaaggaagaatagaagaacacaaggatttagagtggttcaggccaccagagcgtaataccctacatccactataagttgtattgcttgagagcttgagtgtcgtgggtctgaatgtccctccccctctctgcatcgcaagtgccctcccttttgtagtccaagggggcacgttgcaagggagctaggcctcgataggtgggcgcaggagttactataacacgaagtgtgaggcatgaggtagagctggcggtgctagatgttctgggcgtgtatctcctcttggtcgtcgtgcaggctcttggcatcctatcatctttccccatctaatcggaacacaagtgtagaccttagcgtaagttgcagcgtggcct

SEQ ID NO: 100273 - DNA, 395 bp, Zea Mays
gtgcgttccacagctagggttacgcgcgacggagaggaagccaaaggtgctgaaactgccccaatctccgaagtgatgaagcgctcagggctggtagcatcggaggatgcacctgccctgaaacagaacaggctgatgttaaggagactgagtctaaagatgattacagcgcggtgccaagtaaacccagccacttggatttcggaaaatccaccatctccgaagatgatttgcctaagctgttgaaattgggctatttcagtgaagcgaagaaagaggtggttcgttttggtggggaagagactaccccgaagccaggaaaggatgaagtggtagtcttcaaaagtttctttaaggctggcttaagatttcctttgaacaagatgattgctgat

SEQ ID NO: 100274 - DNA, 334 bp, Zea Mays
cggtgatctaacgtggtctagtacaattggctagaccgataagcatccatagcacaaaagggtgctgaaacgagggcaaggagggcatgaatggacctgtagacgtctggccacggcgagctctctcacgacggcgttctgaccgatttgggggaaatgagaaattgaggggctctggtggatgatccgaggcaagggctggtgcgttggatgcgtaaatacctagcgaaactcatgggggaagcaatttatagagttctacggcggtggcgtccaatttgaagaaatcgtgctggcgggcgagagagaggggtgagtcatcgtggcgatctac

SEQ ID NO: 100275 - DNA, 546 bp, Zea Mays
attatcatcgtgtcttttttttgttgttgttgtatcttctatggtgtgtgtgctcggctacctctcttaagacttggttgggagcaatgggaatgagcccaatcttcccaaacacgccgttagggtaccgtttggcgtgagatgcagcaagccgcttgggggcttgggccacagtatggtatttctgtgctagagaatcacctcgtcatgccttcgccgtattgaacgtgttccgaagtttacatgtgaaggcaacaggttccaaattttattactcctagatgccaccatctcgtttgtgctagttttggcctggatatgattggaatgtaacaagttcacgctgcatcatctagacggtctacaactggttgccctttcgaaattgtgcgctgaaaattgcacatttttccagcatgcaacctaaaacaaatgtgagcaacttatttgtccaagcttagctttggcttgtgacaagttatcacggacatcacaccttgtatcagtaggggcaccgcggcggcggtggagtgccccctacaggcg

SEQ ID NO: 100276 - DNA, 272 bp, Zea Mays
ggactttcaactttttactctttggcgcaggctcatctggagtggccgaagaagcaatcttggccgaagcagcaactttcctcttctttccccgtccccgcagcgggtagctatagtcggggtaaacaaaaccaatagcatcaaaaactctattcaatctcttttttcctcagctcctgaatgatgtggataatgcattatcttccgctttggaatacggtccaagcagttcatcacttgtagcttcaatacatttcagccagtcatcattc

SEQ ID NO: 100277 - DNA, 755 bp, Zea Mays
gttcgcccgaagcgttctcgccgagacaatcagccctcttctcctgctgaggggaagaaaaagaagaagagacgtctccgtcgagtgtctagcttggatcaggatgccggtccttctgttcctgttgctgaggaattgccagtgcctgaatttgctgaagctgaccccaatgggtgtgacccgactgctgtggatcccaatgggtgtgctgtccgtgttgttgatgaagatgatgaagaagaagacgaaatccctctgattcggaagaacaaccagcgttacatagctagtggggaaagtagcggtgttccttctcctgctttgtctgccctcattggtctgcaagaattatctctgacgaactttgatcaaactattgaagacatggttccagaagatctgttgtcagagccggcagatggtggcgcgatggatgtttgtgctgatctgcccgatgccgggttggggtcatcccgggcagtgtcccgctcctcatcgaccttagagcgcggtcttgagggttaggaagctggtctagattgcacttctcccacggaagtgactgagggtccttcagccttagaggtggctgttgcagaagattcggccctcaaggatggtgctggcgcttacccagcccccgagggtgttgccggagatgatccggctcggatgggtagcgcgagctgtgacccagcccccgagggtgtccgagtgggttctccctcccacactttcatggatgttcacgtagg

SEQ ID NO: 100278 - DNA, 438 bp, Zea Mays
gttggatgcacttctgttcacagaagtcgaagaattctacactcatgaagttggatcccaagactgtgatgatattatttcgtatcccgaatctgaagatgatctcctggatgaattctactgctttggctaaggtcaaagaggttattggcttgaattctatccactttgtgaacttgtcaatggccaccagcacgtgtgtatactctccttgagcctttttgaatggtccaatcatatccagcccccaacatgcaaaaggccaggagactgggatggtttgtagatgttgtgccggcagatgttgttgattggctaagaaccgacaggcatcacacttctagactaagtcagttgcatctttcttagtcgttgtccagtagaaatctgctctgaatgcttttccaaccaatgtccttggtgctgcatgaaccccgc

SEQ ID NO: 100279 - DNA, 370 bp, Zea Mays
tgcgatttgatctggtccgttgggtttaatcggacggatttggatggctgcgtctgtttaaaatcctcgtcgttaattggtaatccatcggccaccgatgcataccacttcagtacagcgtggctttgatctgggccactgtcgtctaatcggacggctccgggcgggagataccctttcgccttggcatatatactaaagagaccctaggcttctaagaaaataacccgcagtcctgtctgcaggactctgtgtcttaggatcttttgcgccgaaccccctgcactctctaacaatagtgcgcccagtccagtactggcttaaatcgattaaatgatttagaaatcgaatttataatatgaaaataaac

SEQ ID NO: 100280 - DNA, 390 bp, Zea Mays
tgctttgaatttgagctttggttggtgctactttcttagggcgcggaatagcggggccttcgtcctcagagataagggagtggacgttgcactgtcctgggacgaagtctctttcgatgttgtgagtagtttgttggtccccgtaaattgttactgtgtcgagaggccctaggattttcatgcaaaggttaaggccatgaattgctgcttcaattttgttgatagaccctctccccatcatggcgttgtatggatagaccatgtcagctatgacgaaggtcacctgttctgatcttgcattagggtttgcaccgacggagaggggagctctatcttgccaagtggaaatgtcccctttcctccaaaaccgtagagtgtgttgtcggctgg

SEQ ID NO: 100281 - DNA, 745 bp, Zea Mays
tcagtcgatagatctaccacaagatcttccctatccatgatgatgacttttgcatcctaagctaggcccatcaagtgtgacatttccttgcgttgtagggccggcaggcagtatagtgcactcatgcaccaaactgtcagtcgagagatggctccagggtagattgctagatgtccttggcatggtcaacccggtccctccacatcgggtcatcctccttctcagtggggaatagaccgatggggtgaattgccatctccagtaggtgaaatccacaaaagatcgttagtgcgtgcatggctgtggcctctagggtgtcgtgggctcggaaaccaagggtcttagagtacaaagaacgccaccctgactgcaaggggtggggctccaaggctagccacaccttatagcaaggcactgcatgttccttgaacagctgcacggtgtactgtggaggtgtatggtatcctgccttttgcagtacctcccacagaatgaggtgaaagccctcctgtgtaaggctatcagtgtggaaaggtgcctctcctcccttagtgggtaaggccatctgtgtgaaggtgagtgtaagtaagggggaaagaagaaaagtactaaggtgggaaaataaaaggtaaaaactcgtgagggtttgggcttccttgccctttactaaattattattatttttcttagccgtttaagaccctattacctttccaatcagtcattttaatggtttggggcatcc

SEQ ID NO: 100282 - DNA, 635 bp, Zea Mays
gcttattgtaagtggcagaaattctttttcttgtgccactaactattacagtgatttctgtcgacaggtgcaatccgatataaataaaagtctgtagagctttcaagagatgcaacgatataaaatctgattcctatatgtactggatttcgtttgcaatgcacttcacaaaaggtacatatggacaaaatagcttagaactgtgagagtactacgtagctgtggtagtaggagacagatattcaccactcaccaggcatcctaccattgggtcgtcaagctaagatcaggattttaattaacttttggtgcacgattccattcccatcgatcggtttgttggcgccagccctttctgccaatttggcagttaaataacaaccgtcatggcatagatcctccgtgctacaaaggctccaagtcgtagccgcaattcccggggccgtccaagtccagatctctctgtctcgccagcatacggctacgcaacaaccaaagccggtcacgcacggctcgacactaaacaacaagaaggaaacagaaacgtccctctcaagcacagccccagacatctctctctctccgacccaatccagcccccaaagagagcaagcaaaccgcgtcgtggagactgg

SEQ ID NO: 100283 - DNA, 365 bp, Zea Mays
agggcccaaacgattgaaaaccgaagatccagcccgagccacacgctgagcaccaccaggagacctgatagagttgcgaatcggaacaacattggcaccggtgagagggagcttaacaatatccgcatatgaaggattcttcctgccctggaccttcaaccaggaagcagcttcctcatccgaaaaagcctgaattcatgcttccaattaggtccaccacgattccaaaggttgaagaaggccctgaactccttacgctcaatggaaccagagttgtaaatatgaaaacccaccgccatcgaagaaaccgaaaaccgaaaaacccggtcagccagctgaagcacctcaaagcccgcggcgaaccc

SEQ ID NO: 100284 - DNA, 763 bp, Zea Mays
cacggcgatgcggtggaaatgcctagacatgcggcacaaagccggaaggtggcggtcaccggcgtgcctatcgggttccaccgcggcaagttctgtacggtggccggaatactttactggccggaacttatccacggtgatgatctttttacgacttcaagtgttatccagttgatccaatcgcgaatcacgccggcgagggcatgaatcatggcgggggttcgtcggcggtgagatgcgctggtgttctgatcttgttcaggcactgtaccatgagagtcaccatcaaccgacctgacagagaaagttcaggtccagatttctccaaatcttctatggtaccaagcccgaacatctatagcaaagttgttctactacaaaggacctgcaactttgctatatcgacctggggcaaaaacctcataatttgaaagttacaaagctccaaagttgagcccatatcactgaatttcagacttaggtgaatagggtttaagtggtgctttttgcaaatagacccaaaacttagggtttaacatgcaaatccacatatttgtgatccatatgacttaggacactttattatcatggtttttgcactttagtccaaaagtggactaattttgcacttaactccctagggtttggatttagggttttccagggtcctttttagggtttttggtatttcaagggtgtgaatgtaatgtaagtcccttcttagtaacattttatgactatttttcttaagctttagggtttt

SEQ ID NO: 100285 - DNA, 347 bp, Zea Mays
agaagatgggctagaagggcgatttgagatagccttaaccgaagctattggaatggaagtagatattgaaatggttgttgatgaggaggatgtggtgcagaatgagaatgacttagtaatacttgaaggcaatgaaattaatgacgaacttgcgccttcagatggtgttgactatgaaatggttgatagtgatgatgagacttatgatccggctaaccccgacacatatgaagattatttttaatcgatgtaatgctatattatttgttatttcacacctatttctaaatacatcttttttatatgtgcttatttgcttactcttaattgcaggttgttggacaaag

SEQ ID NO: 100286 - DNA, 471 bp, Zea Mays
gtgcgaagctagactccacttaaatccgggaaaatgcatattcggtgtcggacaaggcaatatacttggttatctagtgtcccacataggcatagaagcgaacccaagtaaaatataggccataagggtcatggctccaccgtagtcgacccaagatgtctaatgactaacaggaagactcgcaacattgaacagatttttctcacggtccgccgagcagagtctacccttcctaaaaatgctacatggagccaaggacttcgcttggggccctgagcaggctgcagccttcgaatcactaaagcagtacttatcggagctcgcaacgctgaccagcccagacccggtgtcacccctcctactatacattccagcttcgcagagtgcggtcggcgcaagttaggtacaagagagatgcaaaaatggcaagccccaacagtacctgttctactttgtatccgaagttctcac

SEQ ID NO: 100287 - DNA, 367 bp, Zea Mays
taatctccgcaaattttttgtttgaatcctcagggccaacacgcccttgtaattcaccaaacattatcattccggcccgcactcttttcctccccgggggtgaggtttttaatgaggcggagccatgtaatatacctacaaaaatcccccgcaaaaactaagacacaatatgtcgaaaaagaccgcatcgacggtcttcggcattcgaccacaccgaagtcaccgcgaggggcagcgctgactaccctcgcgtgcgacactccgcgcaaaagttgcctaagggtgcatccggaacagcacaacaagtgcgataatcgaagtctttgtaaaagacactccgcgcaaaagtcgcccaagggtgcagccg

SEQ ID NO: 100288 - DNA, 347 bp, Zea Mays
gcttgtgacaatatagtctatttgatgaatgacaagcagtgtttattgcctcggcccaataagaatccgatacattatattccgctaacatagacctagccatatcaatgagagtcctattctttctttcaacaataccattttgttccggggtatatttggaagagaattcatgtttaatacccttgtcatcacaatattcatcaattcttgcatttttgaattccgacccattatcacttctaactttcttgatatcaaaatcaaattgattttgagccaatatagcaaatgacttgaatgtttcaaacacattagatttatctcgaagaaaataaacccaagtg

SEQ ID NO: 100289 - DNA, 530 bp, Zea Mays
ccaactttgaaactaaaaatagtgtttctatggtaatgagggcattgtattcgaatgagagagtattagagtacaacacactgaatgaagacattagtgggctagctatgaccttttgtgataatatgtttcctataatcccctctattcaaggcatactcaaatggtgtttaagtccactcaagtaaaacaccacacttcaatttgcaacatcgtttctcaaaataaaataaagaccatgaaaattttagccaaattgcatgggagacctgtccaaacataggttaacattgtaaggcatattttttaaaccatgcaaaaagttggaatataaagaattcaatacaatagataaccttttaaactacaaatgacgtttcctgatgtcaagggcattatattagcacgagagggtattagagtacaactagtggatgaagacgtcattgggctagctaatgaccttttgtgattttaggtttcctataatcccctctaggtttcctataatcccctctattcaatatgcc

SEQ ID NO: 100290 - DNA, 552 bp, Zea Mays
cagcatctgactcaaggttgacaagtaaggaaggtatagtattcgaaccctgcaatggtgtattggtatttgaaggaggataggagtcaccaaaaggaggatgttccactgaaccgagaggattcctgacaaagttgaggtaatggttccaataaactgcagactgtgaggcaggaatcatggttgattgggaagtagaatttccagtctgcatgggagcccacattgtagttggaccttggccaggattaggaaaatttatgttggccatcatgttgtaatccattggaggctgctgcatgaagcccgtaggccataaagggggttgagggggaaattgatgcgtacttgctgtgtttgacatcggctgagaagatgtcgcattgtttgcttgctccattctagtatatgtgcacatgccatagatgtagtgaaatattttaaactcaaagaaatggacagtactatgaaaacattataacagatcaagcatttcaacgaggacaatattatgtaaaggtcggcatgaactgtctgagtagcaacagcagc

SEQ ID NO: 100291 - DNA, 276 bp, Zea Mays
caactgggggcaattattcttgtagtgactggggtctccgcagtgccaacaagcattagctagaggttggttgcttgtaacggagggggcctgaaaggagctttgaccctgctgactgaaatgtgacggagtgggtctagctggcttgttgaagcttggtcccttgggtggaaacccaatggatcaaattatctggtgcctgtcctgctgctgagctcagaggacttggaatttcctcttgacgtgacccttttcttcttcccttgccctttccac

SEQ ID NO: 100292 - DNA, 485 bp, Zea Mays
gattttgtgacaccattatagtcagtaaaggcatcagtcagattattagcaaaacgttgcaattctataattttctgaacttgatgtttagattcctgggttcgaggatccgaggacaggatggatttgtcctcccaattgatttactggcattcattaggatacttgaattctccccctaatgtcggaaatgatcctcgttaaagatgcaatcagcgaaacgagttgtgaacaaattccctgtaaggggctctagttatttgatgatcgatcgggattgatatcccacatagatgcccaatttcctatgaggtcacatagttgttcgctgaggcggtgatacaggggtgtaaaccgtacatccaaatttccgcagatgggagatatttggaggatttcctcgtaccaggtgcaacggagatgtggtatgatatgcagttgggtgaagttgaataagatcaacagcgtgtaaaacggcatgaccc

SEQ ID NO: 100293 - DNA, 513 bp, Zea Mays
cattcggctcatcaaactgatttctgaaacgataggtgtatctcaagtaaaccaaaccaccttcgttggaactggcagcagtctcctttagcatttcccagcctttaacaagcggccacaccttgtaagaaatatgctcctgtaccaaatccctagtaccgatgtaagtgtagaaagtgttgaaagccatcaaacacgcttgcactttgttcccacttgcaattgacgacctcctgatgccgaagcatgaccgtatgggacactagataatacccttcacatcttccctctcactcagatcattcttgacatagaaccattgtttcatccaagagcctggccacttctttcggaatgtcggcacgggttacctcgcatcagagtggtgcacaaagttgtagcacccgaagttgttgtgatactgttcctttccaattgcttttgtatggtaggataattcatgaatgttgtagaaacacttggcatctggcaccagcccttggctcctcatgg

SEQ ID NO: 100294 - DNA, 568 bp, Zea Mays
ctggagagcttggacatgcatcatgctcggggggcctgacacgacgatgccaagtcacagaagaggcggccgctacaagaacatgcaaggcagaggtcgatgtagcggaagcaggtaggcaaagcgtgaagagaggcccgggctgtcacaccgagcgagaagggtcctggtgggcggtggctagatccttcacaaacagaccaaacgggtcaaactccatagaaaaagagttgccagtagtgaactgatgaaaggaaagaagattttgaatgatgctaggggcaacaaggacgttggttaaacgaaaaggaccgggaaggactacgtcacctactgaggtgacgggtagggcatacccgttttttgacgatgatggaagaaggaagggaggggtgggggaggttgaagacagaatacctgcgtccgaagtggtgtggtaggaggcgtcggagtcagccacccagtcagagaccgaggtgggtggggccagcatcatcgtggagaaggagctagcgagagactgcacgtcccacccattggcctagggctggttcgaaggccccaagag

SEQ ID NO: 100295 - DNA, 364 bp, Zea Mays
cgataaacgatcgatgaggggcaggcgccagtcctgtgcaaccatctcgcgagtttgtgcccgtggggtagcttggtcattagcctccttgccctgctccccttttgtctctttgatctttacatatgactcgtagagatcgaaggtgaagatcccatccggatgggttttcgccgtgacactatggtcaaaagtttgtcagcgttcgcgttgaagcatctgtagctgtgatgtagttcgaagcctttgaacttctcttctagcttttgcacctcgctgtagcacgcgcacatctgtgggtcacatggcaccatcgccttcatgtcctggtcgacaactaacttggagtcgcccttgaccagga

SEQ ID NO: 100296 - DNA, 383 bp, Zea Mays
gtgcttttgggtaggacggtgtcgtggatcgtaactcgatggttcgcgcttgggcacaagagagagcgacaagcggattttagcaggtttgggccgctttgaggagcgcaataccctacttcctatgatgactttgtatgtgagtggtgttataggtggtgtctaccgagctgtgagatgctaatgagatgaaaatggaggggatcccccttagccttatatacacgaccataggatgcttcccgcgtacatgctgatcataccttccctatttatctcctaatagcaaacaaccttcgttgtcccgaggaaaacctagcgcctccgctccgagctatctccggtgtcacacccgggttctaggggtccaaaacccaggcgtg

SEQ ID NO: 100297 - DNA, 547 bp, Zea Mays
cccaaaaattgttggtgcagttgcgtctggatcctttcgtccgatttcactccaaggttgtccagtaaagattgtgggtaaaattttgacatctcgcctccaacagcaagtcacatcgcttgttgatttggaccagactgggttcttgaaaggacgctcaatttctgaaaattttgtctatgctactgagcttgtccaatgctgttacaaaaggaaagctccaactgttgttctgaaacttgactttgccaaagcttttgatagtgtaagctgggatgctctactcactgttctacaggcacgtggcttccctcctctttggtgtgactggattaagctactgcaagtctctgctaagtcggctgtccttttgaatggtgttccgggcagatggatttcttgcaagaaaggccttcgtcaaggtgacccgctgtcaccctacatgttcatactagttgctgatgtcttacagcagctgctggccagagatagcaccattcgacacccccttacagctgaccgttcatgcacaattctccagtatgca

SEQ ID NO: 100298 - DNA, 528 bp, Zea Mays
cgggatgaatagaatagcgactaagatgtacttcatctagaatttgctggcggatctcatcatttttaggcacaactatgcggttgttaaaccatacaataccttgatcatctcttctgaagcagttggcttttccagcttctatcttctcatgaatgtgcttcattccctcatcatttctttgcgcgtcaattattctttgtaggatgagtgactcaagcttcaaatgatttgaagttccatgctgaatcattctcaggttcaacttctccatttcttggcataaagtaatgttagaagtctttatggtaaggcaatggcagaaagccttacgacttaacgcatctgccacaacattagctttgcatgggtgatagtgaatctctaattcataatcctttattagctcgagccatctcctttgtctcatattaacttctgactgggtaaagatgtacttcaaacttttatgatctgtataaatgtgacaaacattccccagcagataatgacgccatatttttaggg

SEQ ID NO: 100299 - DNA, 290 bp, Zea Mays
cagactaaggcatgacgtgacaacaatgttgtcccaagagaattcagcgaatgggatttagtactcctaaggaccaccagaacagagtcccggggcaagctagagccgaagtgggaagggccatacatagtcaagacaaaggcatccccaaacgcttacaggctaacaacatcatctggcgaagacttagagcattcgtggaacatagataacctccataaattctttatttaagatccaaggcccaagcgcctttgtaattcttcaaacaatgttactcaggcccgcac

SEQ ID NO: 100300 - DNA, 336 bp, Zea Mays
ctaaagttgaagagcgctttgaaaagagccttagcagctggaaagggaaacacctgtctatcggaggatgcttgaccttgattaggtcagtactcagtagcttaccgatgtatatgatgtccttcttccaccttcctaaaggagtccttaggaagctcaactatttccactcaagattcttttggcagggtaatgataacaaaaggaaatatagacttgtcaaatgggatattctatgtcaacctaaggatcaaggggccttggaatcctagagttgaatacgacgaatactgccctccttagtaaatggatatacaaactactcacctctgatgg

SEQ ID NO: 100301 - DNA, 302 bp, Zea Mays
ggagcaggtgttgtatgcttttctggaagactttcttccatcagctttactggcgcagcttccgaagatcccgcttcagcatgaacagaagaagcgcttgcagtgaccacttttcttgcatcttcaattttcccgccagaagcttcagtagaagcaggagttggtgttttcacggattccaaaacaacatccaaaacactagccatcctcctcttcctcggagttgttgttgcagtagctgatagcttcggcaatgctgtcaccagcacctttgactgctctgttgccttctctgattccgg

SEQ ID NO: 100302 - DNA, 532 bp, Zea Mays
cttttgttgattttattgtgttggtggttaagaatgtggttctgtggagctctatgccctttgataatgctctacctgctacattaaaagatgtgatgttagtttagtttatgtgttaagcaagttaaatttgtaaaacgggttagagagctagttaaattacttctacccatagtctaagtttaggtgtcaaaaaatgatgagtctaacctttgtgtagtctttggtgtcattccctcactaagaaaaatataaaccgataatgtgtttagtgttttcataatgaaggagctaagcctagtttaacaggtaacataggatggatgtgctcatttgtatgttgtaattatagtgcaccaaatgacttgaatgaaattagtaagtcgacttgttggttcttatttggttgttttagctctaataaatgaatgagtgttagagtattctaaatatcaagaacatgataactatagagctaaatatgagctaaatttgaatatttgctgtttggggctgcaagcactgttttttc

SEQ ID NO: 100303 - DNA, 636 bp, Zea Mays
ccacttcttagggatctgcacagagaattctggcttaccagcgggagcaaaatagttagcccagatcctatagaattgggcattccttttcctttccaagtgactcagtaaaacagggtctggctgccaatcctgggagaacatatagttcaacaccatattgttgggaccattgttgatttgttcctctggctgggcatcagggataagaatatcccccggcacatggagatctccctggtttggtgggccgtcaacctcctggagcccattcataggagcatcacccaaagcagggagggcaggggcattaaagcgtagcaccggcccaaccacgtccaggtcatcaagaatctgcccattctgcaccggaacaccatgaatgggactagaagaactatccgaggacaggcccgaatgctgattgttgacttgctgctcgtcaggtggcaggtcctcctggggctactgcgtaggtgggtcattaacaatccactggtcccaatccccttgaatattgtctgctggctgaacttgaacattgccttctggcgggaaattgagatcccaccccgcagcaggcataggctgacccagaccaaagaacgcgagagggagctgctgaccatcttccgg

SEQ ID NO: 100304 - DNA, 334 bp, Zea Mays
gatttgtctaggggatttcttcccaactttggatcagcgcacatgctgcagatctgtagctatatagtttgaagttggggctccattgaattgaacttgaaaggtgggggtggccaatgaaaatcgcattgggaaccaactaactagaaaaatcgtggtacaagtggaaccactagcttggtctatcactaagggagtactcctctatgtccaaattataagtcgtataacacgacgacacagcctctgaaatatagcttttgaccaatgtgttttttaaatacaaatgaactcttaatacaattatagttatgtactttctaagacaaatcgg

SEQ ID NO: 100305 - DNA, 857 bp, Zea Mays
tgaccacatcatgacatcattaataacgtgcgggacaatgatgaaactgaaaaaggaaattagaaagtggaattggaagttattgtgagagatatcaagaaaagagaaggtacagtgagaccattttaaatccatcttctttaaagaacacttattcatagcttcttcaatctaaatgcacaaaattatagttcattccgtgtttcactaatatcttctggtgctacattcagtatcttactatcttattcaatttatgcatgtcatttatggccagcatcaacatgctggtactaagaacaattccagtggtattaactatcttttctaccatcttccaacatcaagcacttcaaaagcactcaaggatgatatcgtgttcacattgctccatactacccagcagaaagatattctggaaatattattcagcaaaattatcggaaaacatagctagaagttctgctaggacagtacacataacatgagagcaacagagaaggtaaacaattacagctaatgttttcaagtctggtagcatatataggattcaaaaaattacttcattaaaccagtgtccacatatacaattgtgaaacccatgacagatcacagaaccaatcaaaaaatttgctagactataaattttcgctttgataaagtgaaagatgggaattttgagctttgctactttgaagcaaaagcttacagcttagtaaatgaccaatttccttgcaatttcagatgcagtctatactcagtttatagttcatcacaagaatttcaatagaaattaactgacagcacaaaactgcattgacattatacaatgtacacgacaaacagcttcagcatgc

SEQ ID NO: 100306 - DNA, 316 bp, Zea Mays
agggcatgagcctccgtcactaggagcgcgattcaccgtcaaggggcctcggtgatcgatccagttggtggtgcaggactagtggtgggaagtcgaggaaatccaatggcgcgaaaaagtctgggtgacggtgaattcctcaccatcgatcatgcgccgccggggatcctcctgacaccgtggatgggtacattcgcgccatctctctggtgagaacccctcccctatgttcgtcgtgttattctttaagcatatcgtgccttggattagggtttatggctcggcagcgtagcaacaccgctctccggcgaggccg

SEQ ID NO: 100307 - DNA, 550 bp, Zea Mays
gagacaacattctattgttgtttggttgctaaatgtgtacatttagctacatccgatgttgtttaagactttagatcacttgtcatttgaaaagagccggtggttacaatggtcaattgtgctataatttgtcacctaaatacacgaggatttagtttatatactaatgcatattaggctcgtcccatatttgtcaaatacggaataaatacgggttcaatccggaaaaaaacgggatctcgtaaaaacggacggaataagtcatctctcatttccgtcccgttttcatatttttccataaatacggaaacggtcgagtcaaatgtagaaaacggtacgggtcgggacgggattttttccgtccgttttcaaccctggttgttataggaaaggttggccactgttaagaaccatatgaaactacaagttgataaacatcgaactaatcgtgtatgattcagttcttttgaaacaacaaccatatgtttagagcttggaagtcaatcgacgctgtctgaagttggcattcagatactttggaccatttaca

SEQ ID NO: 100308 - DNA, 336 bp, Zea Mays
cttatgcatcccgcttgctcaagccacacgagcagaactaccctacccacgatctggaattggcagccatagtgcacaccctaaaaatatggaggcattatctgatcgggaacaaatgccacatcttcactgaccacaagagtctgaagtacatcttcacgcaaccagacctcaacctccgtcaaagaagatggcttgaattgatcaaggattatgacctcgaaatccactaccaccccgggaaggccaacgtggtagtagacgccctcatccgaaaacctttcggaattaaaagaaccaactttctggaagattggaagaaagaatcagctcagc

SEQ ID NO: 100309 - DNA, 312 bp, Zea Mays
gagaaaaaaagagttaaatagacagttaaaaataaaaagtatcttggagatgctattatattttttctccggcccgggcagatagactagtcatcctaacaaaacaaaggaacatcaaagctaggaggtgcaagaagcacctggccagtggccatgtcccatgtcacactttttcaaaagacaaaacaagctttcgaaaatctgggccagtgggtgttgatcatgctcaacacatcatgtgaagcatctaattccatggtgcaatgggaaaattctagttgcgaccaataatataacgaaaaccgaatctaa

SEQ ID NO: 100310 - DNA, 315 bp, Zea Mays
attggttctaacaacctgaagagatggctagcgacgacactaaagggaaggcaaaggtgatcgaggagaaggagaagatccccaccgacgatacgacttagagaagagaaaccatcgactcgggatctgacaaaaggaaggaaggcaagaagaagaggatcaagaagatcatccactacgacagcggctgttccttttcttcacacaaggatgccgctgactcctcctctacaaagaaaaatatagtcaaccatgattactctaaaatgtcttttaattatcctcgcattccttagaattcaaatgcacatttgc

SEQ ID NO: 100311 - DNA, 626 bp, Zea Mays
cccacacacacagcaattggttcttctaatgacatgtatctacaattcggtcgattacagttggcctttcaaaaattctcaattggttcccatgaaatgtgtatgtacaatttatgcagtagcttttgatcttcttccactgaagatttctaaacatcaacacatgccacatgtatgaagataggcaagttgaaataagactatgaacaaaaatagaaccaggatgtgatccttccgatccttaattagtgccttggttctttctatgccatagtattgtaatatgttactaatcagtcatttcttgctgctttgtgcctttgtctctaattcttttatcagaaaattcaaatctcatggttaacatggcttgttcttgttgtgtcatctttcccacccatttcctgttaaatttgtctaactcctgattgggtaaggccgtaagggcaatgtgggtatggacaaattggataagggtggaagcatggaatcgatgttcaaataagggtggatactatagtgtggtaccatagctcatgagcccagtttagcaaagagttggtttagaaaatagaattggtttgttagaaaaggagagtccaaatctataaggattccttctctag

SEQ ID NO: 100312 - DNA, 553 bp, Zea Mays
ctttctgctgctctgccccccaagagaattcggcatcattcttaagccgaagggtaggggtgaaggcatcaatcttcccggctaggttagaaataaaccttcgtaaataattcaccttgccgagaaacttctgcacttcaaccttataggtcgaaggtcccacattccaaatagacttaattcggtcagggtctatctctatgccatgttcatggatgataaatcctaaaaacataccagccgacaccccaaaagcacatttatatgggttcattttcaatccataccgacgcattttatcaaaggctttgcgcaaatcagcaatatgagaactaaactcagccgatttgactacaatatcatcaatgtagacttccacagtgtttcctaacaactcatggaaaatcaaattcatagccctctgataagtagcatcagcatttttaagaccaaatgtcatgacaacctattcaaataaaccaatgaagcctggacatatgaaggccgttttagacgcatcctcttcggccataaaaatctgattatatccggc

SEQ ID NO: 100313 - DNA, 1444 bp, Zea Mays
gtacttgatcgttatcgacgacgtttgggatacaaaatcttgggatacaataaaattagcttttgatcaaaagaataagcagagcagagtaatcacaaccactcgcaaccgacaagtagcttccagtgaggaggtttacgagctacatccgctctctcatgacagctcaaagaagctattttatatgaggctgttttggggtgaggacaaatgcccggctaatcatcctgaagaggcatctcaaaggattttggacaaatgtggtggtgtaccattagctatcatcacaatggcaagcttgctagtgggtaaatcgagagaatattggttggaggtgtgcaactcacctggtttctatcgcggtaaagataccaacgaacaagtagacgacaccgtgtggatactgtctctgagctattatgacctaccttcgtatctaaaaacttgcttattgtacctaagtgtgtatccagaagattatgagatcgagaagcatagattgatatggaagtgggtagctgaaggtttcatcgagaagaatgcaggaagcagcagcttgtttgagcagggagaggaatacttccatgagctcataaatagaagcatgatcgaggcgatggagttcgacgaagggtttggcatcataattggttgtcgcgttcatgacatggtgcttgatctcatccgtgacatatcaaacaaagaaaattttgtcactgtctcatatgatgatggtagaagaggcacaacgtcgtcatcgtcacgaaacgtggtgcgtcggctagctcaccaaaatagaagaatgacagaggacaatcctgtggagggcagcatgacacatctaaggtcactggttgcttgtgggtgtgatatggatggttgggtcatgcactcgagctctacgctgctattgcgtgtgctagctttagagcaatgctgcacaccaccatctatggacattggtcatcttggaaaactgcttcatctcagataccttgggctacgtggtactctcgtagacaagctcccagacgaaataggatccctcaagcttctgcaagcactggatttactaggcaccggaatatcacgacttccacggaccgtttgcctactaacgcagctgaagtacctatacggtgatgcatgcacgatagtgcccaatggtttcctcgggaaggtgacgtcactggaagagttgcatatacatcctcctagcgaaggtgacgagtacaaccaacaacagtttatgcaggatttgggcacccaccagggagaaattagggtgctcgatttgatgaggttcagagatgagtttgacgatctgagcatggagtctggtctagtgcaggccctaggaagtctgcacaagctgcagaccctactagtgagcagtgattacacgaagcaacaagtcgcacagtacagctgggacacggcggcc

SEQ ID NO: 100314 - DNA, 365 bp, Zea Mays
ccaaagtggacatcccgtgttccccagcagattcatatatcaggtggtctggaagtagttgtaacttgatcaaggccccagaaggaaatgaagacaccaaaccttgcaaacagaccgacgttccctgataggagataatcatccacttgttgtaccagcccactttcatcgtgctatgcacttgtaaccagttcctacccaggttgagatccaccaatggcaaggatagaaatatcaggtcgacgacgaactggtaaccagacatgggccatctagtttgtggtaactgatgagaacaagagatgatcggactcttggccacttttacattcagacagcgctccaagggttgaacaccagtcaac

SEQ ID NO: 100315 - DNA, 462 bp, Zea Mays
gaatatttctggttattgtggtgcaaggcctcctatttggattgaaaatctccatgtgaagaacctggtgtcacttgagttagcaagatgcatgtattgggaacagctgccttcactcggagaattagaatgtcttaagaaacttttgttggagtgccttcctagcctacaacagattggtcaaccatctcaactttccaacattagctgtattggttcataccttcctccacatcttgacacattgattataagacattgcaaagaactgaagcagatccctatcctaccaccctgcttggttcatttggaaatatgtagggttgggttgaccgaattcccaagtataggcaatatacatggtgagagtatcgaaagcaggccatctaaaatgcagtttgtcagtgttgaagaatgtgaaagtctgaccttacctaaaggaagccctctgttgcaaataca

SEQ ID NO: 100316 - DNA, 415 bp, Zea Mays
gttgtttgttcctagaatgttgattccttattactattgctatcaatagggtccactgaatgtagtagccacgtgtggacctaaaaatatgaagttaaaaattgtcacggtctcatggacctaaaaatatgtgaactttgagaaaaaatgtgtacttactagcctttcatcatgtatcttcatccatttccttcaccattggaattgtggagcatcggagtaagtagattgattcaaagtggcatcgttgtcgttgcttgggggcattgtcgtggttgcatgaggacgaaatatatgaggaacactatatgaaggaggagcactaaacgaggcacataatggtggaggagcactatacgatccatatgaaagagcaccatatggatatctatatgggtatggaggtgggtatgga

SEQ ID NO: 100317 - DNA, 636 bp, Zea Mays
gaggagataatatgtgatctcccataaacatgctttgtggcatgtttgttcctacaatgtgtatggtcgttgggccccttggaccctggttggtactaaactctatcacggtctgaggggcgctataagtgcgactttttcccattcaccatactcgtgcgaggcgagcccccgagcctctgctcgatgcagagatccatctaggcgtcatctcgtattttttttgttttactctcccccgcgcatcccttccacagcgatgaggggaggtgacccgaaccacacttaccttgatggtcaagcaatggtgcgtagtgagctgcaaatgggtaatccaagtgaggccctaagacctttcgtaggatccaagcgcgaggttcgctaggggaccgtcctcatactcctagtcaccgaatcatatagttgctgactctgttcgaccggactcgacggctcgttgcgtatcttcgtgataaatcatgagtcacacattccaaggactcaaacacaagttggtgatgcccttcgcgctttgcgcatcagggtcctggtcgctagtgtgctcgtcacttgcttgcccctcactctagttttcgctgaggtgaccacgagaccttgtggactggcctttcggac

SEQ ID NO: 100318 - DNA, 527 bp, Zea Mays
caggacctggctgagcggctacatgggctccggaccaccctatggaacggggtcccgttctctagagccggcccccaagctgtcagacctccctactttcgcatcaggggtcctaaactgcaagcctggctgttcaattcgaacaccgccatgtcagacagatggaaaccgtacgggtgggttagctaaaaagtattatctagaaaactgtgaggttggacaatggagcagcaagatggaactatcgcaagagcgtagctgagggggtagtttctctttataacttgtcgtgcatgtgtgtagaccaatagtccgggtttatgggggcaggccccattgggtcgttgtacacgtatgcgttatctagtcacaagaaaaggaaaccgactcgaccccttagtcttgctctatggatagaacttacagagatacttggtctcggggtaaggtgctcctccagtcgtagctagatggttccccttgggtcggtgcactcccgttaccttgaagggtccttcccagctagg

SEQ ID NO: 100319 - DNA, 284 bp, Zea Mays
aacggacctggaaacggtggtcaacgatgcgacggctcacggcagtgcggagaaccgaattgggggaagaaaggaattggagcgctatggtggctaatcagaggcaagggcgggtgctctggcttcgtgacaacctaacagagctagcggcatactcaatttataggatccgagggtggtggctccaaattttgaaggagaaagctgggcggccggagagaggggtgagtcaccggagtcgcataacatggcatttactgggtgttggggacttgttctcaaat

SEQ ID NO: 100320 - DNA, 425 bp, Zea Mays
catcaattgatcttcttttttggtatagttgcccaaaatttcattgcacatagtctcaatcatctccagccattcttggcaaggctctttaaattgtttctcaaacttgaagcgatagggtaagcgaacaagttcattctccttctttgtcccttttagcttcggcatactccatccactcaacgttggagataccctgttggccaggtattcttgaactagatctctagtgctgatctgttcagccaccaccctgaattctgccacagctcgttggcatggtggccccgatgtcaagcggcacaggggcctagttagtccgaagcttagagtcagcggactcatcaccatttgcatcaacttctctctcttcttctcatcggccttgaaataaaaccattcactcttccagccggttgaccact

SEQ ID NO: 100321 - DNA, 373 bp, Zea Mays
gcgacacatgattatttgtcccggccgagtagatgaggaaactagatttttctccttgcatgcatccaatgccgcaatgcgtaatgtctgaaacacaattaaagccgaaaataattaccttacattccatgcagcatgtgcagtaccacctgctgatccgttaagccaaaacatagggcaccaaagaaaagataagtactataaacagctgcactaatattcgtgaaaaaatatacaccttatttttttgggataaagggagtttgcaatagtctactccacctaaaagtagctttagttgcctagataattgggtttcaacgcctgactgttcctcaagctgaagtgtcttagccaaaccatctaatgagtg

SEQ ID NO: 100322 - DNA, 635 bp, Zea Mays
aggttgaagacgaagccatgaacaccgtctttggtgcttgttgtaagaaaaggctgaatatagtttttgccgttattggttttatgtaccccgattactgctttccggcttggaagcaaggggcgaagaggaggattggattaactgccccttttgctacgccaaaatccaaaagaatgtagattgtaactcattggccaaagctggagaaaactgctacactgtctgctgcagaaggttcaaaggtagagggtgctgaatctgccgaagttaccctctcagctttggagataataccctatgcaatagctgaagctacatcgctcaattggagaagttaaaattagaaagtttgaaaagtgaccagcagtcgaaggtacaaatttctccagtactgccagagttgccaaggacaacaaatattccagcggtgactcctacgagagggaggaggatggccagtgttctagacgctgttctgaaaccttcgacggtggctactcctgctcctactagggtttctaaagacataattgaagaattgggagaagttgttgctgtaagcgcttctcctgcttgcgctgaagccgggcctttgacaactaggccaatagagcaagtaaaggaaaatccgc

SEQ ID NO: 100323 - DNA, 454 bp, Zea Mays
ctagtctaaactaatgtagataaatctaatcttacctaatactagtctgatctaatcaaaactaattagatctaatctaatctaataagacctagtctaattggttcacatttcttgcactaatctaaagggtagagcaaattaacccagattagttaatagattaaactccacacctagaaactcttttctcacctagttcacttaatcctaaattggtgccttagaccaacttggccatgaacaaatgacctaaccaacatgttcatgatgaccatccataaccaacatgttcatgatgaccatccattccaacctaacatctaaccagattttcgacccaccgaatgtagtctatcctactcacagctattttaactatatgtccataactccgacagagacaccaagaccaaggaggatatcaaccttgtttaggaaggacagaagccag

SEQ ID NO: 100324 - DNA, 299 bp, Zea Mays
tgggtcccttatgcagtggctgtatagaacgcctgcccgaaggccgttgattgcatagtggatggctatatggtcatcgaccaaagacagttatgatttttgtaagagaaactttttgtaatatctcgaagagtttatttctcttgctacctacagagtgaaagttctgccaggtcatctatctcgggtttgtaaccttgaaaattcagcaagaatttgtcgtggagtgtcttccatgaatcaattgacaatgatggcgatcttgagtaccatgtgagagctgggccttcgagggctat

SEQ ID NO: 100325 - DNA, 614 bp, Zea Mays
caatttgagagctgacgacattatcaacttcaataggatccccatgggtgtcatcgaaccccagaaagtacctagcatcctgcgcctcattgtgatcctcaagccgacgctcctcctcctctacagccgcatcaaggtccatgaccccgacttcgaccacgagcccgaggagctaaaccagctagacctgtgaactgtcgcctccggttcctcaatgactgcaatgtaccaaaactgaaattaaactaaattctacaaataggctacattaaccagagaggagtaaacattaaagacatacctttaaaagtcggagaactagagacgacaagtcgacaacaaagaggctaaattctaggtgctactgtgctagcttgtgaggagtctgggactgggagacagccaaatgggaataggaattaggagggggagtgaggaggttaggactcaggaggatgatgagttatcagtatagatgtccaaacaagcgacggtgaggaggccacaacagtgaaccatcacccatcagtgaatcacactgacaccgacgtacagcaagagaacaggcatagcacaaccacagccactgagccaccagcaagcgaacagcaaca

SEQ ID NO: 100326 - DNA, 368 bp, Zea Mays
agcttgttctgctttggtcctgtactgcgactgcgatatcgatgcgtttgtgtggataatgtggggaactctagttgtttaaattttttatgaatgaccaaacgcaggttcggtttctacatttggaaactgtttattctatcaatgatgcacttccatgtaggactgaatgctcttggttgggtgactgaatgctcttggttgggtagattatacacggctaggttgtttgttgggatttagttggatcacacggctagattgtttgttggtgatttgggtagattacacggctagattgtatgttgcgtttctcttactcaataacctgaaatagccttggatatattacttgttgctgaaaataa

SEQ ID NO: 100327 - DNA, 448 bp, Zea Mays
gttctcgctctatctatcttctcatcctaacttgattttagttttcactaacacttattataaaccaagtttgtggggtttagagttcatttttgcaggatcacctattcacccccctaggtgctcttagttaggcgcacaacaacaatcttcccaaggcaacttccgcccatcgactccaagaggaggaagaggaggccgaagcttcaaggaaagatacaatgttcaaccaagaaagttggtttgcctttttgtggagaaaacaacggccacctcacgaagaatagtcaagtaaccatacaaaacaaaaaagagcttgttgaagcacgagaaaatcagatgaaggaggtctttcatacgtcttcacactattccccctatatcccacatcatgtccagcatcagcaatcgaagccacaaccttcgatttctattgcttcgacaagtc

SEQ ID NO: 100328 - DNA, 292 bp, Zea Mays
cagtgatcatgtgaatgactccgcgatacggctgatcaacgaagtcttcttgttttggtgcttgggggtgatttgggtggtggatgtttggctgatgcgggtgcggaggcggaagagggggtggtacgacttgtacctcctggtggtgctggtatgcgtggttaggtggatgctgggcggggccgtggttgtatggttatgggagatggtgttgatatgtgtgggcgacaactcttgggttgtcggcgggttatgcccgggacatcctgtccctggtggccttcgtttccgg

SEQ ID NO: 100329 - DNA, 886 bp, Zea Mays
tcctttttagggaccactgaagccattcaaggcttaagcctagcgggtggagcacttagctggtgggaattccttgccagactctggaacattgtcgtcgtccgcacctcaccaaagatagggctctgcatgagccaataactggtaataactcctctgaaccattcgcctgggtttcctatacatgtagcattcctagattcgatgttttgtgcgcggggttgaagattggctgtctccggtgatgtctgccaccgtagcatcgggcgacaccgccaggctcttggcctatgcggaggaatggtcagggttaccgttgatagcatcaagagtggtggagatttgatcaccgtgtaccgaactggtctaatcaatctgtaccatagatatttcaatgaacgcacgggaatagatccaaggtgttttaaatcctgatcgccgatcgtggatcggatggctgtcgttgcgtactggttcacgtaaggatcgatctaattgggaccgttaaaaccagatcgagcggctcacatgtcatgataccccttcggctgaggtagttttgtaaaagaacccctttaatctttactattcaacccgcagttggcttcaagtcaaaagaaattacagttgggccctgtttttaatactttaaaccctggattacctcataatagtacctgcggtacatataaggtataatagtacccgcgatacatataaggttcggaatttataagatgaagcagaaaattgattctcaatataaaaataaacagttgtctaaggatgaactcagtgtgtggggtgacctaacctatatagactatcctatcaagatcatcgatatcgtgacccgagttacccggaacaaagtaatcaagatgtg

SEQ ID NO: 100330 - DNA, 652 bp, Zea Mays
ccggcccaactctaagcgtaatacgggagcgcgcccgcggcagcgcagtcggtttttcacaaaggtccttgccagagccagaattaggaacgaagtcctcaaccaattccgcgagtcactggcactttacttccagcccccctaaacttcttgtcttctaaaatggaacccccaacgtcgccggcggcgcggacgcgtcctccccgcgaccccccggcgaaggagatcctgagcagtcatttagacagcggccagatcaaatcctaacctgacccgagcagctatgggcatgaatttgtctcctaaactcacagagggacatgaccgcgctcatgacgggatcccggtaccgtggcgcttgcccaactggtttaagcacgggatgtttcaaattaagggcatcagaaacacgagtaagacacggacaacgcggcacttatagaaattgacatcggaccaactaagctttcgagtgggttgatatcagggcagttcatgcggtgtcaaacccatgttccgaccaaactagggctgtaaaggccaaacgggcttttcggtgagcttcaccaatgtatggggatgctagaatatcaagtcttagggcttgagtcataccgtaatcgcctggccacgtgaggttgatgtgttggcg

SEQ ID NO: 100331 - DNA, 691 bp, Zea Mays
cgttgatgaaggtacttctggtgccgaagctgagcaggctgatattgaagaagaaaatgttgatgaagaagaagaagattttagcattttgatcccataaaaacctagccacctgaattttgagaaatcaactgtgtctgaagacgatgtgcccatggtgatgaagctgggttacttcggagaagatgaaaagaagcttattcgttttgccagagaagaaactacgccaacgccgaaggatgatgaagtagtagttttcaaaagctttttcagagcaggattacggtttcccctaaactagatgattggagaagttttggataattatgaaatttatcttcatcagctgacccctaatgctatcattaggctcagcatcttcatctgggcccttcggagccaggggatggacccaaatgccgaagcattctgccgagtgcatgaattgcactatcaaacgaaggctagagcagacgggctgcatgaaaattttggctgctacaacttcacgtatcacaaggatacgaaggctccggtcctcagctatcgcaccaagtggccaaccggctggaagagtgagtggttttatatcaaggccgatgagaagaagagggagaaactgaagacgatggtcatgagcccactgtctttaagcttcgggatgaccagacccttgtgcaacatgaagcca

SEQ ID NO: 100332 - DNA, 432 bp, Zea Mays
ggatagactggtggatacatgggtgcataattaagtggaggtgtctttgatgttggcggtgttgattgtggatttgggttcatctagacaacatcacaggtcgatttattcagccttaccttttgagatgaaccattttcttccgcttgtctctcttgggtagacgaatgaggtcgctttgcttgctggtcatgtgaaacgacctttttgttgacatatttagctagcaatggatcaaaagtagggccaacttcaatcagccgaccagatgccttaactgtattttgattccacatacctatttcaggtcattggggtttgaatgtgtgtggtcactgctatctctagtcgccaccaaatcgtttgcctaagttagccagaccgtctgtcgtggagctggactgttcgcgctggtgtgccggaccacccaca

SEQ ID NO: 100333 - DNA, 409 bp, Zea Mays
cagatatttacaacagacgcatgcatgtattctacaatgaactaactacgtatattaggtttctccaataatgtcgacctcaagatttcactacaatcttttcctagcgaggtcctccgggggcgagatccaggtccaaccaagggctctctacgcaatcacggacaatccaccaccctaccgtggacgatccggtgacctattgcggacagaccaatgacctatcgtgaaccattcaacacctcgccaagccgaacctaaggttttgctcatcatgaggagaccatagggctcattgctatttgaccctaataagacttcatcatagaggtggaattcaagaccatattgcaggtagtgttatttgtcttacatcttatctaatcttacaaagatgttcaccaagtta

SEQ ID NO: 100334 - DNA, 491 bp, Zea Mays
gttagagtctgtaatattgtttaagttagtgtcagagtcttaatcagtcttagtgttagtttgtttatcatatgttttgatgcttgtcgtgatgaactcgtgatgaagttggatctttgtaatgattgtcacctaggtgtgggcatcccctgcaacttggtgtagttattaataaagttagtcatttagctgggcaaccttttatttccactttcctctttttctgagaagctatgtttggttgtgttgagagttagtgaagatgctcatttgtttagtgttgtgaaggcttctatatatcttttcttatgctgaaagactgcaaggttagatctgatgtgtgtatgctttctacagatgtttgacaacaggcacagaggtggaaggcgtgctcagcaggagcagcaggcccccaagatgaggcacctcagcaaaagttgccaccaccaccctcgatgaccattgagcagatgttcctaatgcaaacccag

SEQ ID NO: 100335 - DNA, 310 bp, Zea Mays
gcaaggggtacttgttcttgatggtgacctcattcagagctcgataatcgatacacatccttctggtgccatctttcttctccacagataggacaggggcggcccaaggcgaggtgcttggctggatgtaacctttctctgacaactcatcaatctgcttcttaagctcaaccaactctggtccggatattttgtaagctctcttaaagatgggggcggttccaggaagaagctctatggcaaactcaactttttgctctgatggcatacctggtaggtccttggggaacacatctgggaactcagacac

SEQ ID NO: 100336 - DNA, 792 bp, Zea Mays
gttggatgactggcctggcgaaggcgtttcgggcgagtactatcagatttctgagcattcaaggcttttccaggctctgggataggcgcaatagctattgtttcagcagggaccgagtcagaagaatcttcagccaacatgtccagcatagcacttatctctgcatcgctcgggtttataggcatctcaaagtgaacttgcctctcatcattgggaagatcaccaagtgaagcaaccaaagcctcaacttcttcaggagagggtcgcactctaagacccaaaccactgtcaccagcaggaggattggacgcaaaatcgaaaaaaacttggaaggtggctgattccaagcagaatatgcaacaggagcaccaatatttgataccttgcctctaaggatcatttccagtcgacttaccaaatccacagcaggaatcctcttgttggtaacccaggttgagtcagtgacaccgctatacaaataagccgggtacgctctgtccttgagtggctgaatattcttgaaaacaaagtctccaaccacagcttcagcagtcagatctctctccttcaacaaacaaatctcagcaagcagaaccctggcttctgttatttccaaatctgtgggggattcaatccaacttggagcacgaacatccggctgtctccctgaccgaggggggagggacttgccatgattttctacaatgaaccactccaagcgccatcctttgatgctatccttgagtgggatgtcaaggtattctgtcttcctcccacggcgcatctccaaac

SEQ ID NO: 100337 - DNA, 505 bp, Zea Mays
ggtcaatctcgtagtgggatgcaatgatggataacgtccacttcatcttggtatggacggcctcgcggagtttgctccgcacatggccactcagggccagcatgtggctctgcggggacccactcgaggggatgtcctcggcgccgaaggtttggccaaagtccaccaccacctcagaaagtgccttgagctcgacaatcttctcattcatggctcgggagagcgcccgggatgtgtcaatagaaatgtcaaggtctcctttgaactctgaaaacaatcaaacaaaaacactgaggcatagccaaagtgactcgaggagataaagcataggtaagtgcacatacctccaacttgggtcctcaaacctaggaccttggaccactcagccttgagatcctcggcgaggaatatgacttaggaagaagcttcagtggcctgacaccgaaaaatctcccgctcgccagacaccttctgaaggttcttcttcagtaagcggacctcctcg

SEQ ID NO: 100338 - DNA, 697 bp, Zea Mays
gctacatcttttgaattataaacacaaacactagtaaatatattagtccaaatgattatgttgatcatcaaacataaaaattttaatcaaatagaccatggtctatttctcttacaacatcgtccatccttgacttctctatcgccaggtcctatgtgcttccacttgacttaaaaaactgacgtcatattgctcctactccgtatatacacttgcttgttaatgttgttagatgtcagtcacccatgattagtcttctggtcctcttgatcccttagtccaaccatcaatgtttgtcattgattgctcatagtccattggcaatgaaccctcttgacctcccttatcgtcgtctgagtgttttacacccgcacaccaacacaaccaagagacatgttgtataaaaccatactcactctctctaaggttagtttctaaactcaacgaaagatctatcatctcctggcaatcactcatcatcaatcgacacacatggacatctcaataactggtttctgaaatagcctactgccccgtgaatctaaacttcttttgatttgaacgaataaagatggtagtagcgccttttttcctcgtagttaaacaccatacaattcaagctttatctcttagggtatgtttggttagcgggttgacgtgggttggaacgggtttaacccacaacaactcatgtttg

SEQ ID NO: 100339 - DNA, 447 bp, Zea Mays
tgtgcctgggttgaatctgcttggccggaacaggaacacagtgcctcgaccaggtcggtttcccacctcgtgcggcccaaaaccacgccgcgagctggccccttggtatgggcacgctgacacatggacccaacacattagttccctccctggacctcacatacgtgtgggctcgctcttgaaaccgctgccgcatgggacacggcgccgagacacctctccgtcgcacgcactcgtgtcgctgacgcatggggtcccatcgtcagcccacccttcctcaccgcgttcatgacaccatgcaaatcatgaccaaaaccgtgtgcgcacatccaatcagcccgcgttcaccgggaatttgttaggattcacctcgaccgtgaggattagccctctccatttggccatataatccgaagccttgcctcatctcatcaaacagtgaccccg

SEQ ID NO: 100340 - DNA, 422 bp, Zea Mays
cgaaggtgagcatgcactacggggtccgacgggagcgatggacgtcctggtgaactccagcgtaaataggcagtcacgctggagctatacagccgtaagggaccacaagttcactgtgcactaccaatttggggcgaggaagtgaggacaccgcaaaatttggcttctactgaccacaccagaagacagtgaatgccccaaggtggttcacggctcaatttaaagggatggtgacatggctggctacccgtggtcactaaggtacgacgctagtgcatggagacgatgtaacaaggaagcacggtgtggtagaatttgggcacgggcgacaccacgacacgagcacacaagccacggtgcaggttggtgagatgttcttgccccttccccggcctaatcctcaagatagtgaatcggctcaa

SEQ ID NO: 100341 - DNA, 576 bp, Zea Mays
gagaaagagtacaacttctggaaaagtcgttgcttcaactgctccaagcgagcctacgccgaagaggaaaaaactgaaggtccttacccaccggccgcgctatattgaaccggccatagtgcctgaatttggcggtgagacttcttcagctattgaagccaaaggacctgctcctacgcagaggattgaagagtcggttgcaatgccgaagactgacaaaattgaagaaccgagaattgaagggacgaaaacatcagaagttctaagcccttcggcagaagtggaggtgccaaagacacaaaaaggtctagcagcgacccccaagagaaaaaggatggctagtgtactagatgtgctggagacaataaaagcttcaagctctactccagggaaagttgccaaggcttcgaaagcatagattgaaaccgagacaaagctaaccgaagccgaagctacaatgagccgggctgacgccgaagctgggccttcaaagcccgccaaggagaaatcctcggaaattggagaaaaggcagcggaggaagaagctatagaacatatttttcttgaaaaagccgc

SEQ ID NO: 100342 - DNA, 541 bp, Zea Mays
atatgctcaggccagctcggcccggcttaattccccacactagcgcgaagatcggtaagacgatggggtgccgatggaaagggacatgcaatgggtgagcggaggatggggcatgcaaggaacgatgggcgtgcaacgattcctcttccgcgctgtaaattagggaggcaaggacacggggcaaaaaaaaaatccagcatgcagctcgtccttccaaaacaactacaatttcgcaaatgaaatagacaactagttttttctattatggagagagtatatatagacgaaaggcacgacaaacaaacaaggtttgcctccaaataaaggcacatctcttgcctcctctttcgcgctgtccggagaggaggggcaggaggaggccgcaccaaatctatctggtttgaccgatggccttgctgacaatttcgatctaatctttcttgagttcgttttcgttctttttccaatggtttctactgtgttagttccatcttactgtgttgagtgcagattcgtgttcagttttatcatgctacgtgac

SEQ ID NO: 100343 - DNA, 392 bp, Zea Mays
tgggcttctctgatgcagacattcagggcagcaacatgaaagtagatgacattaggctgcccatgcgggaagagactgaatttattcatatctctatggagcgagaatttcggaccaatgccaacatgcataggtactataggtaccttaactcattgtccaggatgaccgttctcccgaagggcggaaatcaaatgaatgtccttggggagagtcggttttccttcttctccttgctccaaatagtcttgctcgcatcaacgtgtttgacatgatctgggaagagatccttcgtgcttcctagtctccactcaaggggtgtctccatgcaccctttattatgaagatgatcaaagtggtcactcagactcgcttcgaaaagcctgtcaaac

SEQ ID NO: 100344 - DNA, 449 bp, Zea Mays
accctaggtcgttagactagttagaaatggaaagcctagttagtctttcaaaacttgagttattttcctccataaaaaacatatttcatctccaaactcaactcctttataatcaactcttctagtctgattttctctcatctatcggaaggttgctatcagaagaactgcttacaaaagtattacttatgttgctcaagatcggccaacaccctctaccccacctttggatgatgaagaagaaacgtctttctttgccttatcctcattctttttggaaggctttgttatggaacccctgagtctatcaccatactcctttaggttgataggatagtttattgaaataagctagacgcagcagacgataaaacagtgttatactataataataacaacaatgtgatggtgatgtttgatatgtttgagttggatttttgtttgagtgc

SEQ ID NO: 100345 - DNA, 380 bp, Zea Mays
agaccatattatgtgatcaattatagaaatttgtctaactgtagttttgaggaatataaaacatcctttatatttgagacactcatgccaccaacctcaaagctagtaaacattcggtttgatcaaatatggtgggtgtaagggacaagtcagatgagtaaggtacatatcatttctcgggcgatgtcaaaaagacagttaccatggcagacaaccaggcaacgtttgtcacttatggggtaagatttgcatattttaatggtcgcacaacgaagataggatgtatcagtaacacacatgcaaaagtatcaaagggctagaaattgttagcaagcactatgtgattgctcaatcaaaagattccacggtccgtagttttc

SEQ ID NO: 100346 - DNA, 521 bp, Zea Mays
agtggcgaagcgagaagtaagtttagtatttttaaacggttagttgatagcatatatcggtgtcgtcatgatttttgttgtatggcggatcgatgttttactttgtcaaatattgcattccattcccattggataaataaatatcttgttgagcgattagaggtcttacatgagcgttatcgcagcccaatgattattggaggcgagtagcgttcataaatcgatccttgttaaaattggagaacaatccgataagatatgcacataagtgctttaggtcccttagtagccaatgtaatccttatggagttttacgccatgtgttagtacctctatgttagaccccaacaatgtgctattttaggtgactggtgtgttaactaatttgagttgagaaaaggttaagaagaactaattaatctgctccaacccatgtttcgagttacaatgtctaaaatggtttgctaagtcttatgatgtgattagccaactcatgttaagtaggagttgattttgttaag

SEQ ID NO: 100347 - DNA, 422 bp, Zea Mays
gtcttggagaatttcgaaatttatcttcatcagctgacccctaacgttatcgttaagctcagcgtttttatctgggctctccgaagtcaaggagtggagccgcatgccaaagccttctgtcgggtgcacgaacttcactatcagacgaaggccagggaagatggactacacgagaatttcagctgctataactttgcctaccgcaaagacatgaagacaccggtggttagctaccgtaccaaatggccaaccggttggaaaactgaatggttttatgttaagattgatgaaaagaaggagaagctagttcagagtccattggacctaagctttgggttgactaggccccagtgccgcatgacgccagggtcagcatgcccagatgatgtgggtcaatttagtgttgtgtctgaacatatcgg

SEQ ID NO: 100348 - DNA, 480 bp, Zea Mays
atttttttcagaaactcaatgttagatgcaaccctcaggatgttattataaccattaagatattgaatgagaggcaacgacaagccgttgctagaaaaggtttttccaatattcttgacatgacccttgatgcactgggtagctgatctcatctttgttggttgatggataagatggaccacaaggatatgacaattcgccccggtcaaggcaaggaactaaagattacgaaagaaactgtccatcttatactaggcttaccgaatgctgacggtggtaagccactaggaatcgatgaagcagtggcgggcaataacttgagggctgaacttggattgtctaaggatgagttcgttgttgcatctcttcaggaccgattgagaaaaggagacgatgatgacctgtctatcagatgcttctttttgatattgttcaatagattgttgttccccacttccagctggggcatatctaaccatg

SEQ ID NO: 100349 - DNA, 715 bp, Zea Mays
tatagttaaaaagctaggctatacacctactcctaagatatgaatgataaatgaaagtaaatagattggttcggttggattgtgtttgagagttctcaatcggtcatacccctttatatttatagggaagcagatctggacctatttttagacgagatccaacagattctcatagataggttaggataaccacacaagggataaatactctcgtccgagttgatctgatcacggggcacggaccatccgggacacatggtcggaccagaccgtctagtcatacacaggtgccaaatacggtgttcaacactcaagatgcccccactcaactctaccgcctatgtggctcctcgactctggcacactattgcaacgtgccgttacagcacgtccccaggcaaactctaccgcctcctcccgccaaaatcaaccaccccactaccctagattcccctgtccactctctcgttgccccgccacccgtgcgcaccgcaacctccaaattgactgtccatcagcacctgattggatgtctgcttgcgaatgcacggatctggatatgcggatgcgaatgcaagataggccaaatcaagcaccttcagttgcacgcatgaaaactcagaaaaatggcatgtagcctggcgccggttgtccaggcaaccaatcatgttgatattgtcgctatggaaacttgaatgggagagctaagaaaaag

SEQ ID NO: 100350 - DNA, 312 bp, Zea Mays
gggagggtctgaatattttcatctaattcggcacttaactgccaatccatgaaggcatagagcaagacacttgtgcagatgtaaatttctataaatgtgttttgtccatgttatattgtagttcttcatgctaaataaatccaccagacgaatctatggtcttatggatgggataaagtgtcaaagtttactatgtagacttctgactgtgtactattaaaatggacaaaagatggcataatatatttaagatgttcattggcaatttttctatccatccttcctaagtttcatctttataactagacaaat

SEQ ID NO: 100351 - DNA, 290 bp, Zea Mays
agagaggttgacagtaccaaccaagtctccataggtcacattacattctcatggcatcgcaatcgaggcaatggatttttccatggacctgcaccggtgcgacacctgagtgtccatcaaactctggtgagcagtctggccactgccagtgctaccagtgagcaacgaacccattcactagattcagtttacctgtcctaaaatcgaatatctgcttgttgtgcattaaaagcgatgtttaagtacgctgagataatcagttatccatcacttgatgcttctgtgaagac

SEQ ID NO: 100352 - DNA, 412 bp, Zea Mays
agagggaaattgccaagtacatatccaagtgtgacacttgtcagaggataaaagctagtcacttgaaggcagcaggccctttgcaaccccttcccataccatcttggaaatgggaggacatttgcatggactttatagtgggattgcccaatacctccaggcaccacgattccatttgggttattgtggacagattgaccaagactactcatttcttgccagtacacaccacccacaggacagagaagtatgcagagatctacatcgaccaggtagttcatttgcatgggataccaaggactatagtctcagatagaggagcaccatttgtggcacgattttgggaacaattgcaggaatcacttgggacccaggtcatacgcagctcagcctatcatccccaaaccgatgg

SEQ ID NO: 100353 - DNA, 686 bp, Zea Mays
tctatttaaaacatttcagtttacatgtccttgaccacccttgtttcttaatgatccatgagcggtcattttattttgcacatccttggtgatctcgttgtttcctcataacttccctaggtaacgaatttttacttcaacccttatgttggaaccatgtctatcttacccttgattattttctccacttcgccacttcgcgagtcttgccttaactctatccttggttatgcttttcacaattatcatctttacccttatcacctctatatcttaccttgatgtttatcttatatctgccctttaaaatctcctcttttcatcttaatctgagcattgtacttcacctattttccccttggtcgtaccctcatctttgtcgcttgcgagtttttaactccatcctttgttgtgctccggttgggtattacctttacctttctcatctcttgtaccttggtaattacactatgtccgttctctaaaatctccaatccctatcccaattggagagaggtgttttgcttatctcgcccttggcaatgtcctcttcttcaccatgtgcaggccttgacataactccattccttgtggtactcataccactggctcttcagttgccttcatcctttctctcgtacccttgtctgtcatcgcctatgacccttgcaatatctatgtcttct

SEQ ID NO: 100354 - DNA, 355 bp, Zea Mays
caaggcgctaaccaccgtgcttcgacagtgggctttggtttgggccacaacaagtaaatgggcctcccaggaagcgtgtattccgtatttgcaagccaaacatagtaccacattaggtactaaactgtgcacacacctgtttataagtgccagtgcggatagaacatgtgtagcttggttgggtgccaatctgtgtagtcttagctgggcgcaatctttgaccctacccatctagcttttttgctcacatgcgcggagcacatgcttgggaatgggaaacgaacgggaaacgaaaaagaggtcacggttgtggacccacatgcaagagcggcgtacatgtgtgggaatgggaaac

SEQ ID NO: 100355 - DNA, 618 bp, Zea Mays
tagagaggggtacgatgaaggtaacaaggccctacgtggaaggaaaaatgatgaatactggagtgagaggtgaagggagggctctaacaggaggtgctaatttatgcaaagagagacaaataagggagtttagaaaactgaatgggttgtgctatgtttgtggagataagttcgaacctggtcatcttgctaaatgtactaagaggggacaagcacaactaaatatggtagtaactgaagaagattccacattattaactgatgaggttctgcaacaattggagcaggaggattagaaggaagaaatatgttgcaaagtgtccttgcaagctatggtgggtaaggataatgagaacaacatggtgataagtgcaactgtgagcaaacaaactttagtgatgctgattgactcaggaagttcatcaaacttcatcagtgctcacatggtgcaacatttggggttagtagaggcggtctgttctctagttaaggtgaaggtggctaatggagaagctatgatgtgtgatagaatggtaagaggagtggaatggtgctctcagggttttttattttgtactgatatgagattcttacccttgagtgcatttgatgtcattt

SEQ ID NO: 100356 - DNA, 797 bp, Zea Mays
gttcattttgctggtgaggaactggttccagaacctaaggatgatgaagttgttgtgtttaaaagcttctttagagcagggcttcggttccctctatataatataataggtgaggttttaaagaactttgaaatataccttcatcaactgacacccaatgtaattgttagacttagtgtctacatctgggccctccggagccaagggatgagtcctaatgtcgaagctttctatcgagtgcacgagctgcattaccagacgaaggccagggcagatggccttcatgagaattttggttgctacaattttgcgtatcgaaaggatacgaaggcaccggttcttatctgccgtactaagtggccaactggttggaaaagtgaatggttttatatgaaggcagacgagaaaaagagggagaagctgatgactatagtcttgagtccactgatattgagcttcggaatgacaaggcccttgtgccatatgctgcctggctccccatgccaagtagccgaaatggagtttagagtggtagtggccgaagtcagcactagagatctggtgcaacaattcttggcaaatagagtatttccgacctctagtggttggtggatgcccaagaagaaggatgggggcaaaaagcatgaacttgttcggctcccttaccgtttcaagtttgagaaagagtttaagaagccatgccaagaatggttagaaatgattgaaactatgtgtaatgaaatccttggcaactacaccaaggaggaccagttaatggctactaccttcagcacccg

SEQ ID NO: 100357 - DNA, 915 bp, Zea Mays
aaatatacatatctatatagaaattagtttggtgaacctgatgatgagtggcttgaagctattgaggcaacttgtgatgaaatgttggggggcttatacggaggctgaagatgaagctatgactactgcttttggtgcccaaggaaagagaaggtcaaacagggtgttcgatgttatcggttttatttattttgactattgttttcctgcccgaaggaaaggtcaaaagaagaaaagtgctttaaaaccccctttgagtgcttcgaagcagaaaagagtgaaaattctggcaaattggccaaaccgtactataccaaaagggcgacagtaatatctgtattctcgactatcaaggcgggtgagtagacggctatgtccctgaaggtaacaaaccttgagtttttactttgtctggcttaatttttttattgagatgtttattttattttgaatttcatatataggaaagggaaaaagtcgaagaggaggaagtgactataattccaactcaggatgaagtacccctggccagcatggagctgacggtgtcgagcaatgagcaggaacaaccgaagcttacatctaccgcaatacggtcccctcaaaagggaaaataatggccaatgtgatgaaggctgttctgaggcctacaaaggtggcttcgcccgcagcgccgaagattaccaaaaatgtaataactgaactaaaagtggctacaagtgctatgatttctcttgatatagacaaagccagctcttcgaaggcttatttaataacacacgctgtcagggaaaaagaaaaagataaagttgaatcttctgaagctaaagcttcatcagagaaaaaagcctcgttagcatccgaagaagtgccactcacaactcacgaatacattattctccatgctttgggtgg

SEQ ID NO: 100358 - DNA, 641 bp, Zea Mays
taaactaaaaaccattttctgaattgttttatcccttttattcaatgattggactggggacactattctgtgaaagaccaggggctatttcgtatatttctccaagactcatacccaccccgcgcgtggatggcaggttgaataagaaaaacaacacggtctctttagaaattatccaccgccgaaggggtaccttcagatatgagccattcgattgatatctgatggcccagattagactagaaccgagacacatcggcaaccctcaaatcttgatccatcggttcagatcatacattgaactgtatgcactgataaccggacatcatcagatctatagtcccaatgcattgagcacatgcatacaagttgacccaaccctagccgttggtggctagatcgacgtacaagggttgtcttcctcctcaatccaagccgagtggcgacgcaaccagagccacagcggaagctcgccggcttgcgcaagatcccctgcccaggcatccccaactcacaacagaagatgctacacgacgccgaggacagagcgacacagattagggtgtacttacccgaaacggtggcgtcagcgaggttgtccgcggaccagatggatctacgatagtatgggtacaacggtg

SEQ ID NO: 100359 - DNA, 597 bp, Zea Mays
ctagctaggagccgacatgcatgcatgcatgaaaaagtcactgtatatgccgttcgcatcgaatcaagatcgtcatcgataacgacgtttccagtctcattcagacatatgctacggcactaactgacacgcggcaacgacttgcattcttcaaccatcgaccaatgcaaggcgtgtattctgagtggacctgctgttctgttcgaggatccggcagctagtgccgacatatattgcaagtgcgcgtaaaacatgacaccaccaaagtttgcttcgccaaaacacggaagcgctcacagtcctttgtagtagtagtagtacaacttatgaccgaactagtcatgagtacaaaactttataaagggagtacaaaatttggatctagtcatgagcctagaatgagcaaaagtatgaagatatgatcgcgatctcctattattggtcagacaggtggcaagaaggttgggtgcccgcccatggcatgcttttggcgatccgttgtcaactgcaggtggcaatacgaagatatcctttctttatataaaaacatcatatgtgcacgctgtgccggcatggtcttaattagtttggatcgag

SEQ ID NO: 100360 - DNA, 443 bp, Zea Mays
gggattcagggcaactccgaccatgggcgccgtcgcggcagggtctgtgtgccgtcgtgccctgttggccgaggaaggagaggcgtaggtagccgttgatcccagatcgacgactgtgatcatatcacgcataccctttcgtttggatgagtaccgaccgtcgatctaatatcgggcgggtagaattaggtcgtgcttcatgaaatctgagtcgtagatgttagatcctaaggacttcattgcgtaccagttcagcgcttggatgtctaaatccgcgtcgtgcatcgctgatcctgcggtcatctgtggatatcggttcacttaagatcaagatctaatctgggcccttggtcattaatcgggcggccccggtctgcccatacctcttcagcccgacactcttgcataagagccctcagctttccattaaatcaacccgcggt

SEQ ID NO: 100361 - DNA, 391 bp, Zea Mays
gcaccgaccactctgtaccatctcagtttggagctccgcgtctgcctcatccggtgactccgtggggttcttctgttaacttcactccaggagcttcctcttctgtgggtatttccggagcatatgtgctaccctctgcggatgtcagagagcaaggagacgtggtgacaggtacgatctcagttgattcgtttgtggcccatgctctttttgactcaggcgctagctattcatttgtttcagagaattttgtgtcgcgggctggtcttttggtgcagaggatgggtcacccaattgtggttagttctgctaatggctccattagtagctgttcagtatgtcagggttgctccgtcattcttgctgatgaggtcttttcatctaatcttgt

SEQ ID NO: 100362 - DNA, 923 bp, Zea Mays
ggaaaactgggcgtatgggaggctgtcctcccaatttggtccgtaagtcaagacacaagcccttagcatatcttccaggaccttgctcactctctcggtctgcccatctgtttgtgggtgaaagcctgaactgtaatctagggttgtccccatggcttcatgtagactcttccagaatttagctgtaaactgcggccctttgtccgagagtatgctaagaggggcccatgcagttggagcacatggtgcacatagaacatggcaagctggtaagtcgtgtaagtcgtcttgacgggtatgaagtgggcggttttggtgagacgatcgactatgacccatatggaatcatccctcttgggcgtcctaggtagccccacaatgaagtccatacctatcttttcccacttgcacatagggatctcgaggcggttcagtagtcctgccggcctctagtgctcggcctttatcctgcggcaaacatcacatcgcgccacaaactctgcgacatccctcttcatcttcttccaccagaagatgccctttaggtccttatacatcttggtgctacccggatggatggaataccgggtacagtgggcctccgtaaggatggcttccctgattccttcattctcaggtacgcataagcgttcctctagctagaggattccttcctcatcctggcgaaagtctgggtgcaagcctttctccacctcgtttgccaaggttctcagttctgggcactccccttgtgccttcttgatccaatcctctaagtcacatttgacccgtaactcattcagctactcagagctaaggatggaaatcctcattcgctgcatctcctcacaaagttcggcagctagctcttcccccatgagcaaattgtagtaagcctttcggctgagagcatcagccaccac

SEQ ID NO: 100363 - DNA, 344 bp, Zea Mays
ttgccttcgtcggcgtcggcaatgcagcacccgcggagcggcaccaggttccggtgccacctcgttggagcctgaaggggaaaactacagtactacaccacaccaggtcactggttgtcaatcttgggtatagatggccaacagtgcggctaatcgggccgactcggggcacgacacagcctatagtgcctgggcacgatatgacatggtcagtgccaggcccgtgccgacatggcatgtggctagtgctatgcctgtgctggcatgagcacaacctgattagctctcagtcacaattaaacctagctcctttagaaccctaacccgtcgccctctccccctgg

SEQ ID NO: 100364 - DNA, 454 bp, Zea Mays
gtgttaaacattgtttcgtttagttaaaatatgtcccattcagaaaactatatatgactttcatgttacaagaatgaaactttaataaggttagaaacgattcaacctgcaaagtatgcccaccacattgaggtcctcctccgtgcgagcacctcctttagcaatatcttgtctgcacgagcagaggtatataagctagacactaaaaaagagttatgcgacagataagtagattgcaataaattgggtattctaaattaatgtctattgctgaagtttaatctagtaaataagatcctcaaaacttaaattctaagtagacatctaccgaaaagttggaaggttcagaattgtgaatacatcccagaattaaactgtagcagtaaataagagttgcttgtcttcagtagatgtggctataatgttgcaaaaaacttaaactgtagtagtaata

SEQ ID NO: 100365 - DNA, 446 bp, Zea Mays
gtggatttatgcaacggccggtgctcccgagtggcgtacattggattaaaccctccccgaatgattcccctaacttaatttcatgattggtaagctaccaagctctgtccacgtgaaaccgcgaacgatgaggacaaatggcacgcgttcccggtgatccctggcggtccggttcaattaaaggggtcgaggggtttgcgggatacctaaggatactagaacaagcagcagaggggcttgagctaacctgaatcgagctggccatggcgaggtgctttcacggcggcggagaacggttttgggggaaattcaaaattcgcgagctctggcgaacgattgctagcgattcgcggtggctgggtgggtgatgaccctgcggggctggtgggggcttcaatttatagggctcaacggtggtggccggtgaatttcaatggggacgcgcg

SEQ ID NO: 100366 - DNA, 1116 bp, Zea Mays
gcgatgttgaggggacgtattcctgcattgcatctcgatcattcagttcgcatgtctacaccgtcgatttgtcatcgacaccaatccaccatagattgggatgcctccatcgacttgttccatcgtcgctccaccttgtgcgtactcggtccatacaaccgaatatgtgcgatccacatggctcccgtgacatcatcgctgagtcctacgtgcatcttcttcgtgcaatagggctactggcttcctactgtgttgcctcatcgagccgcaacactgttgcccggatgtctgcttcgtcgttgtatctacatcgccattcttcgtgcatcgacgactgttctgcgaaatctttgcttcaccatccgttcgcaaaaggtctttatgatcaggtcttcgctatcaacttggagcgctacctatgagcgtgaggccaccgttgatcatccactgctgccaccatgttctacatccgaactactcactctcaagcacccaccgcgcttgaactgctcacctttcggtttgacgcattcattcccacactgcttcttattcgtctagcacaaccacgtcgtcaacgttgttgttttatccccagatactttgtcttttcagacaatcgtgtgctatgtcggcaccttctaccccgttgttctgcagaccactaccatcatcgagatctctgctagtccctcagatgttgatacatggttggggctttctaccttgtacgtctggtattggcaacaccaatgcatgcttttgtctttgatgtgttgatgggttttgcgaacccaagccacaccttggtttaggcagcttggctacatcgacttcggcattgaccctcctgttcctacctcgtctgccttgatcgcatcatcgcctttcgtctacaacggttttgactacgtggacctcgacatcacctccttccacgacgatagcctctgcatgtctctgttatcaccatggcacctcttgtgcgcgtatagctccaacatggcaacccaaccataactatgttgacctcggctatcttcagcatggcttcttcgaccacagaaaatgtgcccttgagctcggctacctcgacattggtacaaaggactatca

SEQ ID NO: 100367 - DNA, 516 bp, Zea Mays
gccaggacaacacttgaaagagatactcaaaagaacctactaaacaacgaccacatggactggaacctctaagaatcaagcaggtaagctacttcaccatatattttgggaaatcggaagcatgatacactttgatactggataagagctagtgccagagcaaaagtgacaaggcagaaatgaaagggcaaataagttttagcacggccagtttttgtttctaatattttaatgtgttccagtatttgcataccaatttcaactctatgttgaatcagtgcagtgtttaactaaaaaaactaccaatccaacactatagtcaaactggcctttctgctacactgatcaccaactaactgatgtgattatctatggcaatttctacagcctccttccatcaccaaatcaggataagatcaaacctttcttcagatattattaaaaactccaatatccatcattttctggaacacgcaggagagctaagagctacgtatcattatattaagagaaaaa

SEQ ID NO: 100368 - DNA, 1027 bp, Zea Mays
aacaacttctcaatatctggttgagccaaaaccggtggagtagttagtagtgtcttcaactgttcaaaggcctcactacacttgggagagcaaataaacttaacgtcattcttcaagaactatcatattagtgggaaagtcatgtcctgctaatttcatgggtacgtggaagactagttcccttagtaaaaaattgcccccaggtgattgaataataagacccttctttgattcaacactaggtatgcaatgcttctcaacaaaagatttgctcatgaaagtatgcgatgcaccagaataaaaaagaatgacgacgggatgattggcaacggaaaacgtacccatcatcacaggctctccttctagtgtattagccacttgagtaagtaaacccgtccagttctcttttcacctttgcctacctgattgcttgccatatttaccttgacttgaaaagtatttccagaagtcttttggaagtttgatttgttttgcttcgggtaaggacaatctttgatgaaatgtccagactttccaaagttgaagcagttgtcagatgagttgggtagggcttggaaacgagtactaggggcacccggctgaatgatttgagtagggacaatagttgtacgaatgaagaccgactgcttaaaaggataggaggatgggcgagaaaaagagcgatttgggttaaaggaacggatcacttgccttgatcgctttccggatccctgagaggatccctcacccccttcacgtccaaacctttttgtcttctcctgccccgagttcttcgcctccactaagattgttatgctcactgcctagatgaaagtgagatctagacaggtagccattttccgctacagcctttcatttagacctctcatgaaatagttcttcttctttaagtctgtattgacttgttctatggcatattgagagagatggttgaacttatcaaggtactgcatcacagagtcaccaccttacgtcaaagaaacaaactcttccaactgaatatgat

SEQ ID NO: 100369 - DNA, 530 bp, Zea Mays
ccaacacaccctaaacatggagctcatactcgtgcagattggaaatgtatcatgccatggaaattataacatccatgtcttcttatgaaaagaatatgtgaaggttcatagatcttaccttgtaccattgtacaagtagcttctcactacgtggtctcattgatttttcatggtcagcttacattctctccttcagctgatgatggcattattgtctaaaaccttttgtaccagtatactgagaactgatctaaaagaaatgctattttatttatattggccagcttatatccattatctgcttgtttaatttttgaactgaatcacggttttgcgaattggattagtactttagcagatagtagatgtccctttgtaatcgttgcctcttatattctgttagtggacagctcaactaccacttcaacttatttgagaatcgtttgaatcataatccttgcggtcgaagtactatgtgagtagcgttgtcttgattgagaagtcatcttccttagcattctatagaggcc

SEQ ID NO: 100370 - DNA, 413 bp, Zea Mays
atctttttatgcgaaagggaaaaaagaggctaactcatgaatttctttgaatttgtaccaaattacacctatagtacacacaacatcgaaagaattcagcagcatgacaacatttttcacgtacatcagtagatgtagaccagccataaaagagttggaaaagaccaaaatgaagaaacattgaggacgtagagaacaacttgagccaatcagttccatgcaagaagcagcagaatcaatgctgactccgtaaatttgaagttatcaggtagttaaaaaagttgtggaaagatagatatttgaatgttcaatttggtgaattaattattataataatggaacgttatataattcataacttcgaacaagtaaagagcagcccgagaagcaaatattctacatggaaacaagaa

SEQ ID NO: 100371 - DNA, 486 bp, Zea Mays
cttggtcatgccttcgaccccgctcacaccacaaagttccgcaaccagtgtgcaagataaggtgtgcatcccatagacttttagatttatgtagcaaacagtacgcgctgtgactgaccccttatatgcagactattggtattggcagcagcactgtggttccaggtgctactcccgctataacaaaggaactgacaaccacgcctaggaagaggtaagttccgcttcgtcgcactccaacacagctttattacaggccttcatggttcgtacaaacaaaaaaatgtaactgatagtgattagtgtgcatatactcaattttaaagaaaaatgcaaataggaaacattttgttgcatcaccgactcagtcctcaagatcatgcctctcatggggtagaggtatctgttagcttcagttaggtttagtctccatcagatttacatagtgttcactgtcgacacagttttcatagttttgacagtcta

SEQ ID NO: 100372 - DNA, 317 bp, Zea Mays
taaatttcagcttctatataattcaagaattgccttgatctagagacttgaattattctaacactttaccatttgttagagttaacataacccaagggagaactaacaagtagacttactaaatttttatccgtgtcatttcaagcactcgaagtaccatacttaattaacaacgcattctctacgataatcaaaacgcttttcacctaataatttgcatttcacttagacatcacatgagcactaatacttttcctccgcgaccataaccatatgcatttagactacaacaaccaaatcatcgcgactacgagctt

SEQ ID NO: 100373 - DNA, 481 bp, Zea Mays
cacagaaccaaagaatcaatatactgattgtcattttcattattaacagcggggcacttaatggaagactaagtattgatgcacttaatgtaagacgtctagtgggagataacttggccttactagtccaaagtaccgcaacacttacttgtgggatagtgattgcaatggtcgcagactggaagctttcactggtaatcttatttgtaattcctttagtgggtctccagggttatgctcaggtgaacttcctacgggggttcagtcaagatgctaaggtgagtttttttccctaggctttacttctaatgttccagcctttgaggtacaaatatgtaaatcatgaaatgttttattgttatgtacttatgttgttcccaataaaccatgagttattattgcacagcgaaagggtctctagatgagttggatatgtggtcagagtagcacttctcaggtcctaagttcgacttcatatggg

SEQ ID NO: 100374 - DNA, 917 bp, Zea Mays
gaaataatatgatccagataaatgagttcttgctttcccaagacagtaagacacacttctttaagaaaaactggtgttgcctcaaagtagtgaacacaagtctaagatgctccaaatgtttatgccagtttggactataaactagaatatcatccaaaaataccatcacaaacttccttaggaaaggtgccaacaccatatttattgcacatcgaaaagttgcaggggcattagtaagcccaaagggcattaccttgaattgatagtgtcctttgtgagttttaaaagcaatcttgtgctcatctgcctcacccatcctgatctggtggtaccctgcagttagatctagacttgaaaaatatttggttccaaccagttcatcaataatctcatccaccaaagacataggaaacctatttttgattgtcagatcattcagtttcctgtaatcaatacaaaacctccaggaaccatttttcttttgcattagcaatactggtgaggccaaaggtcttacactgggtactaccagccctgatttcaataatcagccacctgtttttctacctcagtttgtgatagggagaatatctatagggtcgagagtttactagaatggcaccagggatgagtgggatatggtgatcaaatgatctgggaggtggtaggcagtaggaacagaaaacacatcctgaaattcttccaacaactggtgcatctccatggtactgtcaggcacaaactcagtctcagttatattctccatcaaagcaaaagcccacacatcatttcccttcatactcttctcaatctgcaacacagaaatctccttcacctccttcaccctcataccatctcccattaaccgacattgagctcacgcgtaaccttcacagggcctaagttgttggggaagg

SEQ ID NO: 100375 - DNA, 357 bp, Zea Mays
tattatactatagtggttttctaatccctaatattgttatataacccttgacttcttatacttttgttttcttgccattgtattgccttccttaggcaatatctaccttgatatattgaactctttacctcactacttctccttgataatgcttacctattttgtccccttgataacgctttctccctaactcacttcatatccttggttgtatcaattatcctcactttaattgttcatggttatcttatttcactcttagccaccaacaaatatgtcttgtctaactccttgctatttcttacctgactccttggctttataatatctttctcattccaaacctcgtctcacctt

SEQ ID NO: 100376 - DNA, 559 bp, Zea Mays
ggtagtactgcctccgaaccatagaccatgaagaagggagtatttccatgcaaagctcggctaggttgagttcttaagctccagaccacatatgacaactctctgatccacttccctgcgaacttttcattcttgtcgaaaactttcttcctgagtgcttccaatatcattccattagccctttctacctgaccgttggctcttgagtgtgctactgatgcatatttgatctggatgcttctttgttcgcagaaatcaaagaattctgagctagtgaaattggatcccaggtcagttataatgctatttggtattccgaacctgaatattatatcttgtatgaattccactgccttagctgaagtcagagaagcaataggtttgtactctatccatttagtgaatttgtcaatggcaaccagcacgtgagtgtaacctccttgagctttcttgaatggtctaatcatgtccagtcctcagcacgcaaatggccatgttacgggtatggtctgcagttgctgtgctggtaagtgctgctgctttgataagtattggcaag

SEQ ID NO: 100377 - DNA, 309 bp, Zea Mays
gtgatacgcccccaacttgtctgcgggcccaattgcgccaggagtacaggtgtattgtagttgttatcttgttccaatccatatctcaacagtcaacaccatggctccctacaaaacactaccaattgcccaaatttgtcatgattgaagcagcaacaaattatggatgaaaaataatacctgtcttccagcattaccaacatctcagtgtagccttgcagtaacttgtaacccttttgtcttactgttgcaatggttgccagtgtgatccagagtgttcgtgcttagtttttgcatagctctatcatt

SEQ ID NO: 100378 - DNA, 709 bp, Zea Mays
gcagagttcccctcaaggaccgcgtgatactacctatttggaattctctgagactcgaccgctgctcttcgttaaagcagaggaacccttagaagccgatgaatgggtgagagtaatgcaacagaagtttgggttaattcgatgcacggagacgcaaaagcccctgttcgcagctcagcagctaagagggcctaccaggacctggtgggcgaatttttcagcaattcagctcgttggacatcagattacctgggaggagttcaagttggcattcctggagcattatgttctggaaggagtgttctagatgaaattataagagtttatccgattgaggcaaggaggagatacggtgatgcagtatctcaataaattcaaccacctctctcagtacgctattgaccaggtggataccgacttgaagaagaaaatttgttttatgaggggattgaacgacaggctccagcgaaaaatggcaacatgtctggaccttacctataccagggctgtcagtacagcactagcagttgaagctaaaaatatgggacatggaaaatcaaaaggttatgcgggtgagagatccactcaaggacctgaaaagagaacaaggttggtcatctgacctttcaatcaaaatcgttcttcgcctcgcccaccttcatatccattcaagcagctcatctttattcgtcccactactacaaccgct

SEQ ID NO: 100379 - DNA, 488 bp, Zea Mays
ggtcgttggatcctcgatgaagggtggaggtgtggcgatagttttggccgttggatcaggattgcgcgatcgcgattagctatagggcgacgtctcggccatagttcatcctggccgtggatcagtcagtggacggcttcgattaaatcgcctggtacccctttgactcattaaatcatagccatagattgcgagataaacggtggatccggtttcattaactcggggccaacagatcttgatccaatgctcctggttacctacccattcaacttctaatctgggcgcttgatgagtgatcctgcggctcggatcgtccaataccccttcgccgtgcgcttctttcaaaagagaccctgagaaattgacaaaacaacccgccgtccgtgccctgtgtaaagtatttatatctgtgccctggaaattcataaaacagcccccgagttttcggaaaatagtggccgccatccagagtctgggaatttcag

SEQ ID NO: 100380 - DNA, 343 bp, Zea Mays
ctagaggggggtgaataggcaagttgaaattttttcaacaaaaactagaaacgaactgggtaaaactagttcaactggtgtcaaaaccgattcaactggtttgcacgagctcaactaaaagatgagatataaaactgaattgatctcgaaattcacccagttaactttggaaatgagatgttctagataatccaaagggttcaaagtaatagatctgagaagggcacttctcaaaatccacacaccaaaaagatataaacaaatattccatggaagggtgagagaacgaagaacacgtataagcacaatgaacaagaacacaagggacacaagatatatcccg

SEQ ID NO: 100381 - DNA, 1040 bp, Zea Mays
gtttgggagaaaatcaagctcaaaaacggtctgtcaggctgactgaactccattcgccatggtacagtaagccccaaactgaagaagatcacgattcatccccctgctcgtcgtcggtgaattttcgccgggattgttgatggatcggcacgattcgtgcaccgtgggcagcagataagctcgggcaggtaaatatctggcgcccggattgagttgagcctcgtggtggctaagcccgccgtacttcctccccagctcatcgatcgaacggataacctcgccgccgtcgagctgttgccgttgcgcgccacgtgcttaagcactagtcctcatcgtggtgactcacggggtgcttgtccagtgatcgccggaccagcgcggctataaatagcccatgatccgcggcaaggtatgaacatcacgcacaccgtaagttgatccgaagcaaaaattcgcgctgcctctgtcccctcctcccaaattggttgtgcgcagtaaaactagaaccccttatggctgtatagccccaagccccgccctcaattccactcgtgaacgtcgcggcgccattttcccccaaatcggtccgccacaccgtggagaacaacccgcccgtggccagcttgttctggtaagtcgttgtccaatccacatgttgttttcatgcctttgcatgcttgcgaagcctacggtggtgcccgtttgcttgattccgctatggtcgtgtgggaacacaagctcgtagacacggtgtccgccatgcacgtgagcagatcattcttcaagtattcaagctaaattcgcacacgttcctaggccgccttaggtcagtgatgcctccccggttgttggccgtaacaaccatcgccggccatggcctgtacaaaccgcgtcagaggtgatctgcgagcgcgccgccgtcggggagctccttggagaagaaatagaaataagaggatgtttatgcaagatgtcagcgactcataacaatagtgcggcgaacccagttttagttagacaaaaccccgagggcccttctg

SEQ ID NO: 100382 - DNA, 505 bp, Zea Mays
attgtgttcctctgtctgatactattcttcgcggaatgccatgaagcctaactatttctttgagatataaccgggcgagggtggctcctccgaaggtagtcttcactggtatgaagtgagataccttggtaagacggtcaattatgaaccagatagaatcgttccctttttgggtccggggtagtccgatcacgaaatccatgcctatttattcccacttccacttgggcactgggagaggttgcattagccccgcgggcctttgatgttctcccttagttcattgacaagtatcacaccaagatacatgttgagctatcttctttttcattcctctccaccagtatctggttttgaggtctaggtacatcttagtagaccctgggtggatagaataggctgagttgtgggcttcatctagcaggatttctcgtgcctctccctttggtacacatagactgttcctgaaccaaagggttcccttttcatctgttctgagatccgg

SEQ ID NO: 100383 - DNA, 434 bp, Zea Mays
cgtcgtccgaggataccctgagtgatttggtggcgacggagttgcagccgggccacacggtggagtttggcacctcaaggatttcctcagtttgcgtgcaggagatgcagcagctggggtactttggtgacggtgtcgagcgcgttccgggcgctgaggagattcctgagcctgagggcgaaatcattgtgttcgaggcatttttcatcgccggtctttgcctaccggcgcatggtttcatggcggaggttatgcagaggttcgatgtctaggtccaccagttgacacctaacgccgtggttgccctggcgaagtatgtctgggcggtgacttcgtacaacggtcagccgtccgtggaggtcttcgccaagaactactgtctgcactagaaaaagacaaaaattggaaataagattgtacaatttggatcgtgc

SEQ ID NO: 100384 - DNA, 786 bp, Zea Mays
ttcgacgggaacacacaatgttttttttcacaccaacatagtgaaatttttctcagagtaacctttcgatgtactcgcaacatgaacatgttgagctatttatctcaaagttcgcttcatgtcgttcaacgacaaagagagcaatatgtcaacatctggttgagcaatgtataactgagatttatagccttaaatcatttggtaaggtcttattgcttactaataaaatcccaatttgtgatgtcttatgtaccaaaaaggctttcatgcattatattatatttattcgggttacttcaggtaaaaactttatgcatgaggagagagcagagaattaacttatctgtgttttattgtatttcaatttaatttcccagattttcaagcactatagagcttgatatagttgttatggccacttggcgatatatataaatatatgatggcacacaacacaatcaaataaaatatagagccaaacaaaattgtttatgaaggttgcgcataatgtgactttaggggcttgaacaacccaccacaatccacgcgagtacaagctctagcgtctggtgtcaacgtgtgtgcggccatcagggctacgacaacacaacaagtcttcgtaataagcgcaacagacacaattatggctcggtaatcggggtacactactaatcatcatttactattacggatggaaattaaattatataccgtgtctttcttggtcaatgactcgggagcaaagcatgttaattttgaaaccccgtacgtacaaaaggaccgtgc

SEQ ID NO: 100385 - DNA, 739 bp, Zea Mays
tgaagggggtgaaggatcctctcaaggatccgataagtggtcgaggttggtaattcgtccttttaacccaaatcgctcttttgctcgtccacccgcctatcctttcaagcaaccagttttcatccatcccactactgcccctgctcaaaacaatcagccgagtgcccctagtactcatttcccggccttacccagttcatctaacaactgcttcaactatgggaagtctgtacatttcatcaaggactgtccctacccaaagcaaaataaaatccaatttctaaaaggcttctggaagcacatctcaagacaagggaaacatggcaagcactcaaacagacaaagatcaaaggaaaactggacgagtctactatactcaagtggctaccaccccggaaggagagcctgtgatgatgggtacgttttccgttgccaatcatctcgctgtcatacttttttattctggtgcatcacatactttcatgagcaaggcttttgttgagaagcattacatacctagtgttgaatcaaagaagggtcttgttattcaatcacctgggggtcaaatttttactaaagaagtagtcttccacgtacccgtgaatttagtcggatatgatttccccaccaatatgatagtaaaggctcaagacgtagatgtgattctgggcatgaattggttagcccagaataaggctattattaatgctgatcaaaggagtattcagctaagtcatgg

SEQ ID NO: 100386 - DNA, 686 bp, Zea Mays
tgacccccctggacatatatgagacccgcgccctggggccattggcggtagatgggggagaaacctggggcgctataacgagagctcgatgaagggttgggacgctcgccatgctcacagggagtctcttcatgggattcattggatgggggaaaccttggcgccgctgcaactcctcgtcgtgggagtttcatcacggcggatccgctctgtgccgtgggtgggctcctgctggcgtcatttgtggtaatatgtcgtttaccaaagttcatcgtggcctggtcatagcgtaaccccaagtgtcgtagtgattcgctcactgggttgtgcgaaattcgtcgctggaggggtgtattcgccgccgttgtggtctacgccgccgcctggtgctgaccaaacgtacaagaagagtcgtgcgctgtgcaatcgatgatcgacggtggagattagaagttagtacctttccagcacatttagatcgggccgtagattttgggatggtcggttgagatcataagccgcatcctgatctagcggcccataagagacactcgttgattaaaagccaaatcaaatctgggctcttgaaatcagatcggagtatcggagagctagggatcacagataccccttcgccgagccattttgctaaagagaccgtgtattttcccaaaataaacccgtcg

SEQ ID NO: 100387 - DNA, 651 bp, Zea Mays
atcgccgaggacctttaccgcggccgccgacgacccatctcaccgcggtggcatccttatcgccggcgagatttttctcatgatcgtgaatagtgcgcctggttcaatgaaaagtttgttctgacagcccatctttagatcaagggaactccaattttcatatggtaccaagacttaacatctgcagcaaagttgttcctctataatagatccacaactttgttatagcgatcctgggcaaattctttgaatccctcaatctacagagctccaaagatgactcaaacccactggtaatccaatttcagacttcaaacagcctgaaagtccaactttgggcttaattatctcccaatttttcataacaacaatgcttaccctcttaagcaaagttgttcacctttcatagagctacaaaattgatgtggtgccctaaggtgaattcccactattttgaaagttacacagctctaaagttgagactataaccctgatttcagacttaacatagaacccaaatggggtccattttgcaattaggtccgaaatctaaggtttagcttacaaatccacatatttgtgaaccaaatgacttaggatacttatttaacatggtttttgcactttagtccacaagtgcactatttttgc

SEQ ID NO: 100388 - DNA, 685 bp, Zea Mays
tagagctgctggcgtctcatcaccgtcagcaatccttaaagcaatgagaagaggttgtgaagcccatagacaattttcaagagtttgccaaaatgatacagaaaggacaatattttcagcttgtgcaccttcctgaagtagagaaaacttggagtcattccattcatcactaacaaacaagccctgtaatctattcttatgcttgtacatgcttgccaaagtcaagaatgatgttgcaaatctagtgacacctggcctaacaaggtccccgcctagcttttctctcattaggccgtgaagtcgcccatgcttgtataggaacctcgaaaccttctttgctatattgatgcaagtgttgaactccttgatcttgtcaatatcctccaacaacagatccaagcaatgtgttgcacaaggagtccaaaacatatgggaaattctgtccattagaattcgccctgctgctttgaaattgactccattgtcagttaccacctcgacaacatgttctttccccaggttcattatttgcttctccaacagatctgccaacatattggcatttgctacctcacttgaggcatcaacagaacctagtaagtaggtccctgctggactgttggcaaggaagttgatcaaatgacgttgtcttgtgtcggtccaccctgagagcacctagaggggg

SEQ ID NO: 100389 - DNA, 392 bp, Zea Mays
tccccagcaaatcagacaagtttgctctcggcctccccaaagtagcccaatttcttcatcataaccatgtcgtccgccgtcacagtagatttaccaaattcaatgtggctgggtttcgctgggctcatattagtgtaatcctcttcatcttttttctcactccctccttcaactgcgatcttttagcttcagtaatcaaggtaccttcggcaacagcctcctctagcacaagaagacccgattacctcatcacttctgatattggtgcagtctcagttacttcgacctcgtctccctcacaagacactctagtagtggatcgtactctagccatttcagtatttacgcttttttgaggtgaagttgatctcaagtgccaaagcgttcgctca

SEQ ID NO: 100390 - DNA, 303 bp, Zea Mays
gcttcggcgctagcctggctcattgtagcttcggcttcggtcagttttgtttcggtttcaatttgcattttcaaagccttggcaattttccctggagtagagcttgaagtttttatcatctctagcacatctagtatacttggcatcctttttctcttggggtcgctgctagacctttttgtgcctacggcaccgtcactcctgccgaagggcttagaacttctaatgttttcgtcccttcgattcttggttcctcaattttgtcagtcttcggcattgcagtcggctcttcaatcctctgcg

SEQ ID NO: 100391 - DNA, 547 bp, Zea Mays
cgcaaggtagtccagcatccaatccacccgcttgtgcctccaattactcaccagagagccccaatttgggatcccccaaattggtctgaaacaccgcgcatagtgacctcgtcgtggctagctcgttccaggtccgttcatgctgtttgctctcctgtttcagtacccatatgtcctcctgatgctcctcgacccattcaattaagccagaccacgctagatctctgggaacacttctgttcatccgtagttcgcgctgtctctgtggacagggtgatttagagccaaattccagtaattaagtgaggggaaatggtcgtgtagggttgaattcggtatccagcaaaggggagagctagccgttgagttatccggctggtgcaggttcaccggagctcgggctagaacggttcgccgtcgaggaccgtaggttgtaaagaattagaaagggagggaccttgatgcaaatgtcagtgagacaaaacaatagtgtcgcggactctttcgggttgtttaaaaagctagggtcttctgtgcaaagtcggca

SEQ ID NO: 100392 - DNA, 552 bp, Zea Mays
agaccgtcgatgcggtcttttttcgacgtaatttttgcgggggattttttgcgtctatattacatggctccgcctcattaaaaacctcaccccacgggaggaaaagagtgcgggccggaataaagctgttttgcgaattacaagggcgagctggccctgatgagtcaaacaaaaaatttgcggagattatcaatgttccaagaatgctctaagtcttcgccggatggcgttgtgagcctgtacgcgctgggggacgccttcgtcttgatgatgaaagggccctcccactttggctctagcttgccccgggcctctgtccgagctgtccggacgagtacgaggtctccttcgctgaattccctcgggatgactgtgtggtcgcgccatgcttttgtttgagcttggtatttgtttagagcctatagggcaaagacgcggtctccgtcgatgaggtccttcgacgtaggctcgtctacgtcggggacggctgacgtgactgtccgtggtgacccatgttttatttcttgtggggtcatggcctccgatccatat

SEQ ID NO: 100393 - DNA, 887 bp, Zea Mays
tggcagaacaagactctcattttgacagagcttctcataaatttggtccgttttaccagcaacatgcaaaggtgttccgtggaggtcaatttcttcaatccaagggttgacttctaaagtgctcataatggtctgcaggattgcctccccctcaactcccttacagcctctcaaagacaagctacgaagagtggcattcctctctaaactagtaaagattttgacaacatcatttggcttcaaacttgcatcattgcatattgccagctgaattaggctctggtttgtctccaacatctgcaagatagcaggtacaccaaacttgcttatattcgctcgctctcctccaaaactcaaaaccttcaatgtggtattggcttgtctctgaagtggagaaaaggtgctaagagggcatagcaaatgctccacccctactccaccaaatctatttccatccaaagtcaagttctctaaatagctgttcttaaaaagccctgcagctatatacaccactgctttgtccccaagggaacacttgctgagcttcacagttttcaggctcctgttccgttcaaggactcctctaagctctttggtccatttggactttagtgggacacttgacatgtccagtgttgtcactgtggtattccatggcagagcacaagcaacccgttgcagccctgttgagctaatgctgctgtagatcttcatgctcccagtctcaggcaggaattcaacaattttacagctgttcgtgccaccttttgtaccacaaccgtgtccccatatgtgaacctccactctacggttgcgtgcgagtacagcagagataagtggagccactgtaatggagctgttgtcaaggatgatcaacttcttcagca

SEQ ID NO: 100394 - DNA, 391 bp, Zea Mays
gttggagtcgcgagggagcgagagagggggataagcgatgaaaagagaaatgatccaaataatattgtccattgaatttgagtaagtgtgaaggtacggtattatccaacgatctgaactgtaggttttaacggtgtgttaagtttgagtacaatttgtttggtggatttagaagaagttataggtgtggaggtgatttggtcgggcgggtattttacaaaagttaaagcggtggattatgaagtgttatagattatagatatagatttagctagctaagattataggaaacgataataaagtttgtgtgtcaaatatgtttaataatgatagttaatttaacagaggggtctagggtttgtagggggtggagatgggttcagtacttgag

SEQ ID NO: 100395 - DNA, 519 bp, Zea Mays
tgtacgccagcccggtaaggtccgcccttataaacccggactgttggtttacgctcatgaagttatgaagagaaaattcgccccaccccagatttgctttatggaggtcctatcctgcttaatcttgcaaccattatttttaactaacccacccacacggattccctccatcgctggtatatggcatccggaactataatcctgtaggtccggaaacccgaggtccgactctaaagaaagggctccagacacactggtcggccagccaggccagatcctacaggtcataagtcaaaggatgaaggataccagttaatgggtctgatgggtggactactgaaactccctagctgaggctgtgtgcaggtccaggtcccagtcgaaataccctcctgggggtcaggtcaccaactcctccttaaatatactggcatccagcctcgacaagtcgagaccgcatcctagaggggccaggaaccaggggagaagttgacaacaacgcacataacaaagggaaag

SEQ ID NO: 100396 - DNA, 455 bp, Zea Mays
gttcaattgcatgaaaataaatatgttaaatatatttcactgggcagactagtttttgaagttgatttgaacaaaacatatggctagtaatttgtttttttacttgcttggtactaaaaggcttagttgttgtaaactgacactacttgccacacaggtcaaaatattgcacataagggattgtaaaggactacaaaagcttgtactgcatgtattgttctttactatgcttgtagagtaagctaaatgtaggacccataatgctgtgacttaagtgtgtgggtttggttagagatgtttgggcagagatgttggaaggcctgaacttgagagcacattggtagttctcagtcttacgtatgtgatatttttgggccattgccaacttggcattgattctacagtaatgtcaggggatgtatttaagccagtgtttgctgaaatgaccagtattt

SEQ ID NO: 100397 - DNA, 472 bp, Zea Mays
atatacatctgtaaagatgcatgtgttctgatgtctgtgtcatagttggaatagcatgttcatgagtatgcagtagcaatgcaacagagctagcagtgggcttcgtgaagagaatacatagtttcatggtaacaaatttttttcagcttccaaagtcagtctaattcagattcagattgcaatcagtcacctaaagatgaatgcaccagcttgagattttacctaatcaggtaagctgaagagaagttgatcctcttaatgatgtttctatatcttcttaatttagaaaccaaaatataaatttgtgtctaattacaaccaaaatataaatttgtgtctaattacacttcatacatacgtattgcatggagaaacttcaaaccaaagacgcaatttttttaaagagaaattaaagcaccatcaattacatttatttcgtacgacgattcatttagatatggtatcaacactc

SEQ ID NO: 100398 - DNA, 271 bp, Zea Mays
ccggggaagaacgagggaagaaggtgatggttcgggtagacaaaggctgcttgaaagggaaagatggagttgtggcggctagaaaagaaaaattgaggtgaaaggtaagatgaaggcattgaggggttcgaaggcctcgaggtgttttgttgaggagttggcggagacgtgcgctagacctagggaggtcatgattttccccgacctccaggaatcatcttcgtgaatgctgagggtgaccaggggtgagtggcataaaaaagaccttgtt

SEQ ID NO: 100399 - DNA, 333 bp, Zea Mays
aacaagatcagagacattaaggtcgtcaataatatatgtgttgtttattttcgtgtaattattgtgcactaatattttatcaaataaaatgtgtgccatcacaacgcatgaacattgtactagtcataggtaatgtatctcatacactgcttccatgatcttaacatgcatcaactgaaaggatcaagatgcctagggtttctctaaaatgtatttcacaaaatgagcccacttcaccacttatgccttggaactatttctatctagcgatcaagagtttttcatcatagatttcaatcctatattataatggaaattctaccaatgtaaaaa

SEQ ID NO: 100400 - DNA, 603 bp, Zea Mays
ctgtcacgcaactagaatagtccttcaccaggggcggatgtagaattttttactaatgatgtcacagtgcaattgatgtgtaaaaaatgttccaatttcaattcaatatgtactaccatataatgtaatattaagtcaaaataacattatttaaacaaagtcaagatttacctctcatagaagcattctgcgggcgattcttcatcttttgaaagcgatcaattataacagcatcggaaattgtagctatcatggcaggctcaacaaagcaaatgatacagtcattcataaactgattaccaatgcgattacgtagtatcgtcttcacaattttcattgcagagaagcacctttcaacagatgcagtagcaaccggcaaaacaagtgctagctttagaagacgtagaccagaggaaaagcaagatgcttctttgtgcccaccatcaatttagcaagttcagtaatagtattcagattagagaatctttcatcagcttgtatattgtcaatgtaaattggaagttcatgagcaagatccttcaattgctctggactgaaatcatcgaaatagtgcttagctaattccattaagctctccaaatt

SEQ ID NO: 100401 - DNA, 664 bp, Zea Mays
ggtcactcggcccatgggtgcagttttcaagccatggaggtggatcatcctctctactaccccaacaacctctttatcaatgggagggtagacgatgatcccattttttacgacgaacccaccatgcaggggaggagctcccacagcgcgatgcacgtctctatcggaatcggtgatgcaacatctggtgtcaccacaccgctgcggagcaggaccgaatccaacctatttctgagacaaggcatttaaggttgatgagtcccggatgagcggggattcctcatgtaatggaaagcttagagcaagaattgttgtgccgctcaggagagcgagcgcgaggtggctgaacgcaacaccaggctcccgcacaatcatctcccactcccatgcaatttgcagcctgaattcgcccaggccttgcagtcttcgagccaggttggcagtgtactagctcggatcacgaacgacttacctcacacgcccgacatagagggttaccgacaaatcctcacttgggcggcgaatcaccttcttccaccagcccatcccgagaatgacatgcgccaccacatcaacaaccgtcgtgacgtgtggagcaacattgatgtgtcgcacgaacgatgtcatgaggaagagttgaggcgtcgagaagggtacagccggg

SEQ ID NO: 100402 - DNA, 440 bp, Zea Mays
cggacagcagtggaggtgacactgagagcgacggatacggccgagaaattattgtagggggtggcgcacatcacgtcctttccggcgcgatctctctatctctctcacacttttctctctttatcatcagaaacaggctcgacctaaaaacacgccatgattccccgctaatgccgctgccgttgctctgttgggtggtgatgactggttgttgttgagcctccgtttcgaccagaaccagaaacgggagccgtggttgcacaacctgtgctctctgcagcgcgcaattagatattcagacatggatgaatggaagatggcaggcagcacaagcaaagcaagcgagtacccgtgcaaattgcaaccgatggcatctatatctagctccctttgttgttaaagcgaataggaaaacaggcatggcatattggcatatactc

SEQ ID NO: 100403 - DNA, 316 bp, Zea Mays
gagaatgaagaagggagggtaacacctagaaaagaaacttttttgtacctcaaaatttaggtgttacaccgtggtgccagattgcgtggtgaggatgcttgcgaccctaatctactagactactactgtgagtaattggggcgaacccagggcataactaaaagcgaggaggggcgcaaagggtttcttacgctccttgtggcacgcataggggtgacgctgaccggaggtgattggcgttggagcgacgaagattcagtgagataggtgctggtacatttgacgatgaggctcgttgtaggtgtcacaagcactg

SEQ ID NO: 100404 - DNA, 300 bp, Zea Mays
ctcgcctcttactgattccttcgtttccttcgtctgtcctcctccaccccgctccaggcctgccgtagccgaataccggtggcggtctcctcctgcgagagtgcggcgggcgcacacactaggctaggcatacatgtactgctcgacttaagcggcagtgctctcactgtatctgtatgcacgctctgaaattcggccctgaactatggtctatggcaaaaccatggacctgtagctccgcgtatttactcgtggcgtttctttagtctgagttgagaaaccagtgtcaagaagatgtac

SEQ ID NO: 100405 - DNA, 590 bp, Zea Mays
gaaagcggtgccgccattgtgccccgtgcgtccaccattagtcggaagcgatctctaggggccgctgggtgtgtgcatgactaccgaagcggggatggtggctagggctcaatggaattgctcgttagaggtgatccctcgttgcggatacgccggacgctgaggataggtggctgcgcggcatgaatcacggtaagaacgccacaggttggctcgttcttcatcactatatcgtgcaacacttatgtgggagtggattagggctctggtactcttgagaactctcgctgacatgccttcgcctaatcgggtggcgcgcaccgccgtccgtgtgtcagggtggggaagaaccctggcaccgttggattgcaagggagtggtcgtgattagatctggtagtgaccggttggcccctttgatccatgtcgttgctccatgatcctagggctggggccaatgcgtgtcatgggagaatttaggaccactgatcctcgatcctgcgatcacaattgcttgtcgttttgtttcaaataacgatctaatcaaagcccttgattttgaatctaacaaccgaaatcgtcagatacccc

SEQ ID NO: 100406 - DNA, 514 bp, Zea Mays
ctagacttcgagtgaggacctcgatgagtcgggtttgattggctagaacttgggctagatctaagggtagttgcggaggtgcggggaggtgggtttcactttcctctctatcggcttccccttcagctctcaggggaaacccagctccaatcccggaggcggtaggcgtggttttatccgaagccatctgccaggggagagagagtcactatcatgcacatgcaaattgttttcaaccaagttattttattcattacaccaatacatcacaagcatatggatactacaagttgtactacacgcgagcgttccctgaggtactaccgaattccttttctaaagtgtccccaaattccttgagaagatcatcaaggctagcgagggacatatcctcgatatcggacaaattttctatcctggcaggagctggtgctgggggagctttcttcctcctttctgtctggcatccttggcttgtggttttcttctggattttctttgtgggggcgagctt

SEQ ID NO: 100407 - DNA, 513 bp, Zea Mays
ataattaacaacgtattctccatgataatcacccaacgatttgcgttttcaattggacctcacatgagcactactactttttatccgtgtcataaccatatgcatttagacgacaaccagcaattcatcgtgactacgagcttacccaaacccatctattaattcggctaactagcgcaataacataggccgttatacatcctaaacgtcagcttgcctcttattatcgcaatccgagacacaacatatatatacaacaatcacttaacgaaatcgactcctacttaacatgagtttgctaatcacaatataagacctagcgaaccattttagacatcgtaactcaaaaacatggtttggagcagattacttaatgtttcttaaccttttctcaacttaaactagttaacacacaagtcacctaaaatagcacatcgttggggtctaacatagagacattaaaacatggcataaactccataagacttacactggctaccgaaggacctaaag

SEQ ID NO: 100408 - DNA, 1233 bp, Zea Mays
aagataagttgatcaacaagaacaactagagaaactgtaagctcactaaccagcattcaacgtctttagatcatctatctgcttctggagcagcaaaggattccactgcataaagataaagcttgttcaggaacagcaacaccgcaaggcctcaattgggcggatactccatcaacaaaatcttgtggtcatagacagatgagcaaaagaaagatagttcactagtacgaacaatatagagcaaaaaactaactcacctggagattggaaaggaatagtggaaggcccaaggcaggaggaactggagcatggcttgatgagggaggatcaacaggaacaatctcaagaacactatccggggtgacctcagccccaccagcaaacaacagtcttctggcatctagctcgtcgacctctaaggcgacttggccagttaaggctatagaagcacgtactgccgtcaccccatcgaaccgaattagggatgacccgatgtggatgtccatggaagcattagaaagagagcatgcctgaacatcctcgggggctggattgtagcttgcactacccacaggggctggatcactaccagcaacaccctcgggggctgggtcttctacagtagccacttctgaagctgaaggcccttcagccacctccatgggagttggatgactcggatcagcgtctttgcatgggagactgccctccaaggtcgatgatgcgcgagacaccactcgggttacctctagcccgatagaatcaaataatgaaagcccaccatctcggacctctgaacaaatgtcggggatatcagcctcaggaggctccgaaagtaggtcttcaggaatgacttcctctagtgcttgatcaaaatctaatatcgaaagcccctgaagactgacaagggctgacagagctggagagggaatatcgctaccccctcgctgcctctgtagaaacggctgtttcttgcggaccaatgtgattttttcttcttcctcctcttcatcctcatcaaacatgtcaccagtagcttgtgcattatcactgcctttggcgttgaccttgagaatggcgtctgccgggacatcgtcaaggtttagcacagaaggaccagcatcatgatccaagcacgacagtcgctgaagtcacctcttcttctttttctcctcgataggtggagtcgagcggttcactcggcgtgaacacttttgtcacacccgtttccaa

SEQ ID NO: 100409 - DNA, 331 bp, Zea Mays
gtggcaacgtgaccaggggcagaggcagagactgggacctcagcaatagagaagattctattgtcttttccatgatgaagactcaacacacccaactagaggctgccctgagacgaaagcaacaaaagatcgaatgaccagggctgtgccagctgacatccaaagagtcatcgcacatacatatcaaacccaacaatacaaccagcatctatttcaaaacggacacccctattacccccagtagaaaaaccccaaccttttttccacatcaacaacgccttcaacaccaagaaatcctagctctaccacctccaccacctcagcatccaaa

SEQ ID NO: 100410 - DNA, 465 bp, Zea Mays
ataggttttactcgataagaagttcgatcggtgtggtttaattgtttgggcatatgtagtgtagtggtggtataaaaaaatgggttagaaatcgatcggctaaatggcaagttcggttagagttgttttgttacttgggattgtgtggtgaagtgatggcatgactacgtagccatcacatcatctattgtgtgactatgcttaagtgtgccttgatataaattagagggtttatggttatgccatgatagtctagagctaaacgcttgtggtactcatcataatcttgcttggtagtcaaattaagtcttgtttgctcccgagctgaaattgctacatgtatgctctctgttggggtgatgatttagtaaagaaagttatcttttaggaatatgtgttctatacaaaagatgtatttgacttcaattcctaaaatgtcatgatcttagaattaatggtttagaa

SEQ ID NO: 100411 - DNA, 314 bp, Zea Mays
gccagggaggcaatttgcaatcgcggttgtggacttggggtttaaggaggagggcctcggatgcctatatatatactggagtcattagcaagaaaaccggacctaggtggttggctggagggctgcttcttatccgttgcgccagactcggctggaggttgcagacgaccagagggcccacaaaccagcgaccgatccaacactgcacacgagctagggagactagggaaccgggaatcacgaccgagcagttacgacgcacgaatatatcggaaccctctgttatcattcgtggtcatgaaatcttaacaata

SEQ ID NO: 100412 - DNA, 379 bp, Zea Mays
ccgacatgagcccgccatgagcagcacggcgccacggtcgtagtccgatcgggacatgggagagaggtggggtcgttggatccctgatcgagggtgtgggctatagcacatgtaccagttcgactgggatcgcgtcagttgtagatctcccatcgtgtggttgcgattagattggggatagtgtttcaaaggatgtgatcgagacagttgggtggcaatcggagggttcgggttggatcacaacgtggatgtattgtgggtcgtgtgatttagatccaagggctaaggatgtgtaccggttcacttaaaactcgatctaatctggaccgctcagatcagatcatgcggccgagacttcaagataccccttcggccgaga

SEQ ID NO: 100413 - DNA, 646 bp, Zea Mays
gttgtgattgagggggagtattgaatgaatctgttcgcatgtatccagaaggttctttactatagatagaatatgctataaatcttctgtaatcaggaaagtcaagaaccttccctgcacatgatttgtctcctttattgtaagccacgccaggggctcttcctggctatatataacacgtagacggcacgaggtcaagtgcacgtttccagccctctgattgttttccacattgtgaatccatgataatttacatgacaaagtatataataaggggaaatcctaagaatataaaatatgggtagaatcctagtaagaaaacaaaacagtattataaagaataagatgaacctatttactgtagtgtctttttatttcttcccaagtttggacaacaaatttttacctcgattctgagatttgtttatgtaatacatagcaacagaagttcaccaataatggaataggaatgtattagatgtttaccaacctcttggggttcaactaatactgaaatgtacatttctatgctccatcctgcaacatctatttactgatgaaatctgctgcgccgagctgcagttgaatgaaatctgctgcgttgagctgcagttcataggtcttgggtgagtaactgaacatggag

SEQ ID NO: 100414 - DNA, 470 bp, Zea Mays
aagcatgccaaaaggctttcaacaatgtttgcgcctttattggcataagagacctagtccagaaacacatagcctacagagtatgacctcttgtgaatgactaggagatgccgaaggaagctgctgccgggtctagtcagggtggcctggtctatctaaaatataccttcagatatagaggcgagtttgatgagccaaacgatgagtggttgagcagtattgaggcaaccagtgacaaattgcttggggcctatataagggccaaagatgatgcaatgaccttggccttcgaaggttgaggcaagaaaaggttgaatagagttttttacgtcattggtttcgtataccctgattatagctatccctcgtgaaagcagggaaagaaaagaaaagctgccacttcggccatttctactgtgccaaagggtaaaaagatcaaggttttaacgcaccggcctagatacattgaa

SEQ ID NO: 100415 - DNA, 339 bp, Zea Mays
ggccaatcttgttgtgatttccttgggggcattcgatgttatcttgggtatggattggttatctcagtatcgcgcagttatatcatgtttttggaagacagatttattgcaggcgccgtcgagtagggaggtgatattcttgggaagttccccaaagttcacgttatccttgttgtcgcaattgcttccagattgtcggtcaaggaagtcgggaattctttactccatggtggtggagggtgaggctgccttgcaggtgtaggacatccgtgtggtgtgtgactttgccgacgtgtttccagcagagctttcgggcattcctccggagcgcgatgcagc

SEQ ID NO: 100416 - DNA, 536 bp, Zea Mays
gcgacagaggcggaggaggatggttgcaaagagggagtgggcgaggacaacctcacacatggaggagcgaagcacgatgcagcggtgggaggaaaagaagacgatggtggaaagggcggtgaaggggagaaggaggtggggacagaagttttcaaggaagacagtggtgtcatagtcggagggggcgaccagtggcgcgggcaggtgcgaggcgcaactaatgaggaggtcgtcacattcgtcggctgcgaaccacgagtttagtaggcggcagttgcgagtagggtgcaggagaagaaggggtgcgtaaggactcacgatgacgcacgatgaaactcccatattaaggagtatagaattttgtataaagcagaaaggggtgggtgatgcacgacgaattatggaactgtggaaactggtgttttatatagtagggagggtgacacgatgactataaaaccgtggaaactggtgctttatataataggtagagatagagattaaatgttgactgctaattactgtctccctccaaa

SEQ ID NO: 100417 - DNA, 437 bp, Zea Mays
cattccgcagtgttatggagtccctattttgcaatttcgataatactaattcatgctcatccaagaatggtcttgcactttgatacctaagctactaatgcaacaactataaaggtgttagagtttaatacacacctgaccaagacagacacatcaaccaaacacagccagccacatcatagaaggaagaaaaaaagaacactccacagctaagaaaaacgaacgagaaaactcactgaggaacattgctcccgctgaccctcccaaggatgcctcggtcgagaagacccctgcgacgccctttacgctagagccagacgctgctgcagcgacgaggggtccaacgataggaggccaggggggcggatgggcactgaccagggggccccaaggcatatgacgaccttcacgttggagccagacgttgccgcggcaac

SEQ ID NO: 100418 - DNA, 402 bp, Zea Mays
gttgtgttgctcaaaaactagatccaacatagagaagagagaaattattgcacttgattgctcttcacgattgcggaataaatctccgggtcccgatggtttcaatacaaattttatcaagaagtgctggcatgtcattgctccagatttctatgatctttgtgataaattctatcatggtgaggtctgccttagaagtatcaacgggtccttcattgttttgatcccaaagatggagaatccttagaaggtgggggcttacaggccaatttcacttctaaacaatagtatgaaaatcttaacgaagctgttggcaaaccgtctgcaaccgttcatgtctcggttaattcacaagaaccagtatggtttcatcaaagggaggtctattcaagactgcttggc

SEQ ID NO: 100419 - DNA, 670 bp, Zea Mays
gaaacagcaatgtggaacccgtgtatcatggcctcatactctgaagcattattgaagactaggaatagaagttgcaacacataattgacttgctcccccattggggcgatgaagtgaatttctactcaagctccttgtagcttcagcgatccatcgaagttcatcttccaaacttctgttggctcggggtttttaggaacttggtgcttcgtccactttgagatgaaaacgattagggcctggatcttgatagccatgcgagaccggaactctatgtcacgagcccccaacttgcatgcccatttggttgttcttcccactaccttcttgttatggagtatgtcaccgattgggaatccagtgatcactatgactttgtgatcgtcgaaatagtgacacaactttcgtgcagtgcggaggacatcatacaacaacttctgaacttgagggtaactgatcttggacagtctgaggacctcgctgatgaagtatactagatattgagttggttgtacatgcccttcatcctttcgctcgactactaatgcggtgctaaccacgtcagtcgtacacgaaatatacggtaatagttcctcgcccggtagatctatagtagcttagttgggtggcttgacgactggtagagtcattagcaactccttgatggctt

SEQ ID NO: 100420 - DNA, 788 bp, Zea Mays
ggaaaagagggggtggcggccaagagaggggaaaagggaaaagtggtggtcacctagggttgtgggagaaagaaacgacacctcagatgacttctgactttgcatccaacggcccacaacccatttccctcaccacgcaccgaagatcaacttttggtcaacatttttttgggatattacactctacccaccttaaaaagaattcatcctcgaattcgaccactccaagcaaaacccccaaggtaccccatatagcaccaccattcaaaacatgggtccattattggtcttaattaacacaagaacttctaccttggactaattgtctaaggaaactacacaacctgacatcaagcatgaaacaacatgcaatgaagctcaaagcaagtcatagatgcaatcaacactacaattttcacaccatcgaatttggatgcagctatacatcaacatcaacgtcttaaaacaacactattttatgaaggggtaatatgcactaagaacaacccttaccaacttcaacaattcattttaattaaatggtgaaacatccacaccagatgaatgtttaagaaaatcaaacacctcacctcaaagcaccacgaaacaattagttctattgaaacaaaactcctaatcttcctaaactttgttcttgccatcatgaaaaaataatcatgtaatctaacattctttgcaccccacaaaagggagaaagtctacaaaactaatggaacaataaagccaacaagaagccattaacattctgcgcggcacagttcatcgaa

SEQ ID NO: 100421 - DNA, 500 bp, Zea Mays
caacatttgaaattctaggatttttattcatgtcatggcattgcttattgtacatattcgaaacatttgcaactatatcatttacctcatgatcttctccatcactagatgtgtaaccttcagcatattcgatgccgggttccagatgtgagagcagtatgacaagattgtccaacacctccattgccttttcatatcctcctttcgacatacttgcataacagacaacctccattttttgttagcaggtctatctgtctataagattttgtaactcaatctcttcctttacaatatttatcaatcctttcaaatggaacatcctgccttgctgacttagtgtacctttgtagtatgtattattttggtatcttttctatctgaaggtgcatgaatgtcttcaatagatgcacacaaagcagccctgcaattgaaattttacaatcattactattacaatatataaacattcatatgctcatacattccaagaattaact

SEQ ID NO: 100422 - DNA, 391 bp, Zea Mays
gggggacagcgacccaacatctagacgacccgcgccgccatagatccttctccctgtcatccatggagcttgtgggtggaattgacgaccgtgtgaccattaattgctcgccagaggttctttctccatcgtggacccacctctaccggggcggggacccctatgctactaactctctggtaagctcccttgcagttgtgaccattgtcgggtcgtagcgtgttgaggctaaagacttgagtatgggggtacgccggtgccagtctagtgtctccagcgggagatccgccgcacgcttggacggagtcgggagggagcggttcctgaccgttggatcggcccctgtggtgcagattagattgcagcatatctgaaagggaaatatggttta

SEQ ID NO: 100423 - DNA, 343 bp, Zea Mays
cgtcgccttgagcttgccaggcctggagatgtggccgccgccgctgctcgagcaacgaacagggagagaccgagagaagcaaaatagtcatctagggttcagggttggacttttggctagttgattttgggcccaaattcactcggcccacaacacacaacagccatcatcccatgagattttagcgcgctaagtcatatgagatttagcggttttagcgggataatattggatattagcgtatttgaccgtttagcgctaaaatgtgattatcttatcccacccttctccagcagctatatccagctatatcggccgctatatccggctattttaaacattg

SEQ ID NO: 100424 - DNA, 376 bp, Zea Mays
atgtaagccaaattgagcaagaagcatcaaatcaacttaagaataaaagatccactaagttgcatctaaagaatcatgtccaaaacaaatgaggttttcaaaagagggaaaaatattgaaacctcaattccaaccctaaataagccatttaagtagaaatgaagaaaagggatgaaagaccatgaaaaacttgaaatcatggcttaggccaataataagaattggaatacactaactaagctacaataaagattataaaaggttggccaaaatagtttgttaaaaactccaaacaagccattcaagtggaggtttaatggggaattctgaaattcaggtttctgaattttcagcctttgaaccaaaaccgagcacg

SEQ ID NO: 100425 - DNA, 335 bp, Zea Mays
cctgactatctccttaaggtatattccggcaagggcggctcctccaaaagtggtttttactggaacgaagtgggccaccttggtgagacgatcgattattacccagatagaatcatttcctttctgcgttcggggcagtccggtcacgaagtccatgcctatttcttcccacttccattcaggcactaggaggggttgtagcaggcctgcaggcttctgatgttcggccttcgttcgctgacaggtgtcacaccgggccacatactgtgctatttccttcttcatccctttccaccagtatctggctttgaggtccaggtacatcttggtggttc

SEQ ID NO: 100426 - DNA, 564 bp, Zea Mays
ggctaccacacatatccagctctggctccttggtgccctggtctctcactccgagtttgacgtcgtggatttccttatttgtgagatcgaggacactgtattggatggtctgcgtgctcgacgccagttgccgtatgctcactacttgtgccacatttttgcgcagctgattcggcctccctagtttcagggcacacttgaggcctcacgccttgtctttgggtcctaccgtcctgcgcctgaggctcctgtgccagcttctgctccagtttttgactctcaggccgaggatgttgctcttcatcagtttgaagctcaggatgcagcagttcatgatgatgatgatgatgatgatgatgattttggggttcctcctccgcctccgcctcctatgcctccacgctcacatgatcatgaggctgggagttctagtgctaccactgctgcccctccggctattgaccctgctattgcttcgattctccactctctcactcagcagcaggctcacctggcagccgagcagacccggttatccgagaggatgctctcgatgtttcagac

SEQ ID NO: 100427 - DNA, 578 bp, Zea Mays
agtgccctggaactgtggtggccagatcagctatgcgaagatgtggcagagatagtgagcataaggcagctgtccccgggcacgaagtccatccaataccgtgtcctcgatctcgcatataaggaagtcaacaacatcaaactcagaatgcgagatcagggaaccaagaagccagagctagatatgagtggtagcctctctataacccatccgcggcagtagcgtccgtctgatgagctgatataggaacttggctgttgtagtgaaatctgccgaagaacgtcgcgacccatctgagaagggcggtcggaacaaagccgcgacgtgagctgtagctggagcaactccaccgtgagggcgacgaggaggatcagaggtaccgtagcacaagctgtgaagacgagttgttgaatccaaacagctggcgaatctggctagcatgaagtgtaacatcctctcgctcaaagtggaacctcatccactggtgatcaggatcgatccatacagaagcatagaaaactcggacccactcctcaacatatttgccgctggtagtcagtagagtgagtagaccaagc

SEQ ID NO: 100428 - DNA, 442 bp, Zea Mays
gcttacacggtaacacgggtgccaatctttccaagtctgcaaccacggtccgagataactcttttgcacaaagctagtgaaagaaatagctcaactctaaaagcgctagccagacatgctcagggacatagcctcgaaccatcgcaggaagaatctgttcaatccatatgtggaagtcatgactcttcatccctaagactcgtagagtagataagttcaccccctactcaggttagctgcatacacataagggaacatcaacatcttgatccactgaagtacttccttcctctaggccctgcttaggacggaatcgaccttaggccttctccatgtatttccaccactaagcggcttcatctcttggtttggtctatcacataatgctgccagatccactcttgcctttatgttatactttgacttatcaggaatgtccata

SEQ ID NO: 100429 - DNA, 875 bp, Zea Mays
cgggggctaggttacagctcgtgctacccaccagagctgggtcattaccggcgacaccctcaagggctgggtaaccgccagcatcacccttgggggctggattttctgcaacagccacctctgaggctgaaggatcctcagtcacctccatgggagtcgggcaatcctgaccaacctcttgacaccgaagactgccttccaaagtcgatgatgcacgagataccgcccgggatacctctaatcccacgtctagagcgtcagagcaaacattcatcatatcatcaacagtcggttccaacaacatatcttcaggaatgacatcctcaagggtccgatcaaaatctgttatagataaatcttgaaggctaacaagagcagacagagctggagaaggaatatcactatcccctctactacctctgtaacaccggctattcttgcaaattagcagaacttcttcttcctcttcttcgtcctcatcaaaaatgcggacaaaatatggtgcaggatcacacccattggggtcagcttcaataggatcacacccattggggtcagcttcaacaggatcacacccattggggtcagctggtgcacggatacattcgttggggtcagttgatgcacggtcatacccattggggtcaacttcagcaggtacaccaccagtggggtcaacttcagtaaatacctatgttgatacttcttcgcaaacaggagcagaaggtccagcatcctggtccaagcacgacagtcgctgaagccgtctctttttcttcttctcctcagcaggcgtagctgggcggctgacttggcgaagacgctttgggtgagtaccctcaggcttttgggtatccactgtttttacagtcttt

SEQ ID NO: 100430 - DNA, 626 bp, Zea Mays
aacaggaacctgcgctaccgcctcatcaaggatggctcaagatccaagcctgccggtgcggcggagcaaactactgcctctgatggtgtagagcgtcaaaaaccaaaggcagacctgctgcagctggtcactagcaaggaggtcgacctgagggtcgtggctgtgtgtggaacaaccggtgatcgtgggaagacggccgccatccatgaggtctatgatcacccaagtgtggcatcaaagtatggactcagggcatgggttaggctgatccaccctttcaatccagaagagtttcttcgtagcatggtacggcaattcttggagaatttccatgataagcctcaaggtggagaagaagcaacaaatgttggggctactgtccttctgaagatggacaagatgaaccaaagtgatttagtgcacacgtttactacacagttgagtagcaatagctatctaattgtaatagatgacctatgcacagtagaagagtggcaacgcatcagaaggttcttccctgacaacaagaaagagagcagaatcatagtgtccactcagcaagttgaggttgcaggcttatgtacagagcaaccataccaaatgtccgagtttaagcagctcccgta

SEQ ID NO: 100431 - DNA, 564 bp, Zea Mays
cggggatcacaatttacttctcggttttgcagaagttgcacgagtgcttggacacacagttgaatttcagttcggcctacaattctcaaactgatgggcaggccgagaggaccaaccaagtgctggaggatatgttaagagcttgtgctcttaaacatggtggcaattgggataagagtttaccgtatgcggagttctcttacaataatagctaccaaaccagtttgaagatgtcaccgtttgaggctttatatggcagaaagtgcaggactcctctatactgggatcagactggtgaaaggcagttctttgggcctgaaattatacaagaggcagaagaacaagtgcgaatgataagggagaattttagaactgcacagtgaaggcagaaaagctacacggatacccagagaagactgctagagtttaaggagggtgatcatgtgtatttgaaggtgacaccaatccggggtatgcgaagatttatagttaaagggaagttgtcccctcgctttattggacccttcttgatcctaaagcgagtgggagaggttgcctatcaac

SEQ ID NO: 100432 - DNA, 322 bp, Zea Mays
gcagtctcctggtgccggcgttccagcatgtagtggtccgagatggtgaaggggtgctcacattccacgtccgaggatgctccccagtcccagctctcgtcctcggcgaagatggcgtcatgggagacatgtactcgattggcgatggggtcgtacaagcggtacaccttggagtcgtcctggtagctgatgaagacgaccttgactccacgatcatcgagcttgctgaggtgtgggcgcactttcttgacgtaggccacacacccgaacaccttcaggaagtgcacgggtggcttctttgaatgccaggcttcaaacggcg

SEQ ID NO: 100433 - DNA, 421 bp, Zea Mays
ccgaggccactgaaacagcgccaatttcagaagttatgaaatgatcaggtcttgttgtggctgacgaaggtacttctaatgtcgaagctgagcagactgtgattgagggtgaagatgttgagagcgaagaagactacagtattctaatcccaacgaagcctagtcatctagaattttgaaaaatctaatgtgtctgaagacgacatgcctatgatgatgaaactgggctactttggtgaagctgaaagcaaacttgttcgatttgctagagaagagactaccagagccgaagaaggatgaagttgtggttttcaagagcttctttagagcggggctgcgatttcccctgaacgagatgataggggaagtcctaaagaacttcgaaatatatcttcatcagctgactcctaacgctattgct

SEQ ID NO: 100434 - DNA, 466 bp, Zea Mays
gcgcatatggctcacatgaggttctctaccgagtattacctctgtgcaatttagtgctaatccttgtatgtatgatgagttttagggtttatgtattggctcgttacagagtaaatcaattttgtttcataaggaggcgtttaatttgttgattttgttgggttctcccacctttttgggctgaagggtaacggcggtactatcctgacccagcaagacatgggcagcatgctattagaattgtgtactaccaggtgtccccaaaagttatgggaaatataagcttttctttacagttttagagtctcagataatcccactgaacagcactaggctaggcctattagggaatttcgtatgttgagtggaaaaatataatcgacacacttggtgctagttagctactgaccaaaagcgtaggttccagacaatcaatatgtcttgtaacattgtgctaaggttctca

SEQ ID NO: 100435 - DNA, 810 bp, Zea Mays
cacagacctatcaacacttgagttagacagcgcttcggctagaacagctgcatcagtctccaaaataacatttctgattcccagaacagctgcatactacaagagaaaatgtagagctgacagcagagcatatgcagaacctgctcctgctgctacaactataccaatatgatttctgattacaaagccccatctggcatttttagaagtaggagtaaaagcaccgtcacagttaatcttgtacacatctttgggaggagccctccattttggctttctagatgatatagtaggaagcttgcacaagtgtgttgcctttgtccatgcctgaaaatggaagaaaacaccattaatcacttcttgcgccgattttctcctttcaccgaaaatgatcttattacgtgcagaccaccgggaccataagaataaaattattttgcattgtcaatcattgtcaaaattccagattttatgcagcactgcctgaggagaattctttctcattaacggctagtttgacaacttcattttcctgagggatttaccttaggaaaatgaaaatcccttggaaaaatagagtggtcaagctagccctaaaatgattcttttatcctccatgtttagcagttgccagccttgcctccttgcatttaaaaaatagatgatttggatcttcatcaaaccttgagcacattgggcaaagagtgtccagatcccctcccctcattactatattccgcttcacctgcaaagcattgtgagccatgcgccatacaaacattttgactttattcaggacatccattttcc

SEQ ID NO: 100436 - DNA, 312 bp, Zea Mays
ctttgtacgcgtggtgtgattacaagtggtgtttcctgaatggagaggtgctaatgagatgaaaatgatggggctccccctaggccttatatacacgaccgtgggacactccctatgcacacgttgatcacactcttccagcttatctcctagctaatagccaatagacttcgcttatcttgaggaaaacccggtggcttcgttacgagccatttccggcgtttgagggcatcgggcgcggaaaaaacgaatggcctcctcgggatcatgcctaaacccgcgaatgatctggacgtgagcccatcgcctcct

SEQ ID NO: 100437 - DNA, 295 bp, Zea Mays
cctggttcgattgaagtataccttcagatttagagagaagtttgatgagccaaatgatgactggttgaaatgtattgaagctaccagtgacgagctgcttgggacgtattccaaggtcaaagatgatgccctgtccgcagccttcgggggtcagggcaagaaaagattgaatagggtatttgatgcgattggcttcgtataccctgattatcactacccgctatgagggcgaggaaaaaagagaaaggctgccgcctcggccaccacagctgtgacgaagggtaaaaaggtgaag

SEQ ID NO: 100438 - DNA, 1157 bp, Zea Mays
atcccagatcggtaatgatgctatttggtatcccaaacctgaatattatgtcttgtatgaattccactgccttggctgaggttaaagaggcaatgggcttgtactctatccattttgtgaatttgtcaatggcaaccagtacgtgagtatagtctccctaagatttcttgaaaggtccgatcaagtccagcccccagcatgcaaatggccatgttacaggaatggtctgcagctgctgtgcaggtaaatgttgttgctttgataagaattggcaagcttcacatctctggactaactcggcagcatcactcttcgctattggccaatagaaaccagatctgaaagccttctcgaagagagttctggacgctgcatatactccgcactgcccggtatggatttcatctaacagttgcttcctaataaccgagtgaatgcaattcatgaggactcctgccgcacctcttctatacagtgtgccccctatgagggtgtagcgggctgactgccttgcgatgcgttctgctgccgccttgtcatccggttcttcttcaatttttatgtacctgatgatagcctctctccagtcattggggtctgactctggttggctcaaggtgttgcactcttccatctgatctgagaggatacttggttgtgatatttcttggatgaagatcccgggtggagcctcggcccgactggatcccagcttcgacaacgcgtctactgccgcgttgcagtctctttccacgtgatggaactccaatccttcgaatttgtcctccaatttatggacggctgcacaatacttgcccatggaattagtcgagcaatcccagtctttgtttatctggcttatgaccactagcgaatctccatataccatcagcttcttgatgctgagtgatacgacgatgtttaatccgtgggatcaatgcttcatattctgctgcattatttgatgccggaaataatagctgaagtgcgtacttgagttgttcacctctaggagcaataaagagaatccccgcacctactccttgcaattttagcgagccatcaaagtacattctccatacttcggtagtctctaggttgtctgggacctgatgttcagtccactcaaatacgaagtcaaccagtgcctgagtttt

SEQ ID NO: 100439 - DNA, 331 bp, Zea Mays
ctggtcattgccattatcgggacattatgctataaaatgactagacttatcgcacttgaagcaggagcgctttcccttggacttgctcttgttggaatattccttgcgtcccttcaaagcggtcttgaagcgcttgattataagtgccatttcatcctcgttgagcccggcagcctccacttgtgctaccttgctaggtagcaccttcttgctgctcgtcgctttgagagcaacagactgcggttcatagagaggaagcggtccgtttgcagcatcgtccatgtatctcgcttccttcaccatcatgtgcccactcacaaattttccaaga

SEQ ID NO: 100440 - DNA, 323 bp, Zea Mays
agtttttgttttccactttacttacactcaccttcagacagatgaccttacccacacctatcgagggaggagatgcaccttaccacactgtccatcttgctcaggagggctttcccctcatcttgtgggaagtgctacaggaagcaggataccacacacctccacagtacacggtgcagttgttcgaggagcatgaagtgcctcgctgtaaggtgtggctagtcttggatccccacctattacagctcgggtggcgttcgttggattctaagacccttggttttcgagcccacgacaccaccgaggccgcagccatgcacgcg

SEQ ID NO: 100441 - DNA, 361 bp, Zea Mays
caaagctcctttcaataggacagttgaacgaggcagccaaaatgacgggcaagagagagaaaagccatactttcactgtaaccaacagtcattttcttcctccgtgtctgacttccagagaccccaaccaaaggtccgaatgactgtcagatttacctggcccctgttggagttagccttagttgtgcgaattgtactagtttcccaaatgatggctcattttagaaatcctacaatttgttgaactaaagaggggtggtgaatatctggatacccttagggccaccaattcacatccctaaacttctggtgaagtaccttagtgcaaaacatgtgagcatgctttcttggttctcgatgt

SEQ ID NO: 100442 - DNA, 465 bp, Zea Mays
gagatgccgaaggagactactgcctaatccagcaaaggtggactagttcgattgaaatataccttcagatatagagagaagttcaaagaaccaaatgatgactggttgaaatgcattgaagctactagtgacgaattgcttgggacatataccagggtcgaagatgatgccttgtcctcagccttctggggtcggggcaagaaaagattgaacagggtttttgatgcaattggcttcatatatcctgattactgctaccccttgaaaaggcaaggaaaaaaagaggaaaattgccgcttcggccaccccagctgtgccgaagggcaagaaaataaaggttttgacccaccggcctcggtatattgaaacgaccgtagtgcctgaatttggtgaagggacctcctccattgccgaagcagaaaaagctgctcccgccgcccagagcgctgaaggatcgattgtagt

SEQ ID NO: 100443 - DNA, 513 bp, Zea Mays
ggacctcgctgacgtagtagaccgacttctggatggttcggacccctgtgtttggtcccgggtcctcaacctcctggccttccgtcaacatcgtggtggtcggaccaccaccttctcttgggggaacttgttgactcccctagggttattgtgctaccctctcgacgaccagcaccatgctcaccgcctcggaagccgctgcaatgtataagtacaatggctcccccggctctggagctaccagtattggcagggacacaaggtgctgcttcacctcttgaaaggctcgttctgcctcttcggtccaagagaatggaccgaacttccgcaacagcttgaagaaaggcagtgccctctcagccagtcttgagatgaagcggctaagggtggctagggaccctgcaagcttctggacgtccttgatgcgggcaggaggtctcattgtctcaattgccttgatcttctctgggtttgcttcaatgccccggtgtgaaaccaggaaccccagcaact

SEQ ID NO: 100444 - DNA, 420 bp, Zea Mays
ggggtatttgcggtggtagaaccacatgacttctggatgtggttagtcatccgtcgtagccaagcacattctcgtgcggcttcatataacgagattatttctgagtggttagtagacgttgttactaatgtctgtttgcatgatctgactgatatctagcatcagcatcagcatagcccaccatagtctggtcctgattcttcgggaaaaacatgccaagatcttgagtgcctttgaggtatctaagtatagtattaacacctacccaatgtcttctggttgggtctacactgtatctagctagtagatttactgcgaatgcaatatcagacctggtgcagttcgcaaggtacaccagtgctccaatagcgctaaggtaagaaacttcaggtcccaacgatttctcatcatcgctctttg

SEQ ID NO: 100445 - DNA, 519 bp, Zea Mays
gtcgcaaattaattgagggacatgataaaggtgttgctcataataatgctagaaggcattatgaagattacaaaaatcagaggcaaagtgtgccatatgctatgacatctggtgccaataaggtggacaatgaatataaaagtcgtatgattgttatacttgaagttatcagatttcttttgcttcaggctcttgcatttcgcggacatgatgagtcctcttcctcgagcaacaagggaaattttttagagatgatagaatggtataagagcaaggataaaaatgttgcacatttgctccgtactaatcaaatgacttcaccgtcaattcaaaaagacttgtgcaaagcttgtgctgatttaaccagcaaagctattattgaagatattggaggtagaaacttttcagttcttgttgatgaggcccgagatgcatctataaaggaacaaatggctgttatattgaggtatgttaatgcacgaggtcaagttattgaaagatttcttggtattgaagagg

SEQ ID NO: 100446 - DNA, 613 bp, Zea Mays
atataataggataggttttgaagaagtttgagatataccttcatcagctgacgccaaatgccattgtcaggctgagtctttacatatgggctctccgaagccagggcatgagtgctaatgccaaaggtttctgccgagtgcacgagttgcactatcaaacgaaggccagagcggatggccttcacaaaaactttggatgttataattttgcgtatcgaaaggacaccagggccccggtaatcgtctaccgcaccaagtggccgaccgggtgcacaaatgagtggttctacgtaaaagctgacgagaagaagagggaaaagttgatgactatggttatgagtcccatgagattgagcttcgggatgacaaggccattgtgccatacgcaactcggctccccgtgccagctggtcgaggttgaattcagagtggtggctgctggaattagcaccagagatttagtacaggagtacttggcgaataagaccttaccgacctccagcgactgggggatgccgaagaagaaggaagggggaaagaaatatgagcttgttcgactcccctaccgtttcaaatttgagaaacaattcaagaaaccgtgcaccgaatggct

SEQ ID NO: 100447 - DNA, 338 bp, Zea Mays
acatcgggtcactgatcatttaatggatggccgagaatgctaggtagcatagtgatccatctggccgtaaacctagaatctaacagtcactgcttgatcctggatattttgaggtgggatctaatccgagccctccattgatgatccgacggctcaagatcttgcatacccctttggccgtgcaaattttcaaacgggaccctagctttaattgaaactaacccgccgtccaacttcatttataaactgttttgattaagtcccttttctttcgtttaggcccctgtgctagtaaggaattatgtccccaatctagaattattaggggtattcataat

SEQ ID NO: 100448 - DNA, 416 bp, Zea Mays
ttttggcaaaccgtcagtcgcttacttgggccatattatttcagctcgaggagtttccatggattcagaaaaggtggttgcagtggaggcatggccacgtccctggtctcttcgggcgctcagaagattcttgggcctcactgctattaccacaagtttattgcaggctatggcgccatagctgcacccctcacggctcttctcaagcgtgaggctttccgttggtccgaagttgcggaagaggcatttctccaactcaagcaggctctcatctctacaccactgttacagatgctagatttctctaaacaatttgtggtggactgtgatgcgtcagggactggttttggtgcagtacttcaccaaggggatggggccattgcgtatttcagtcgtgccgtggcaccacatcatca

SEQ ID NO: 100449 - DNA, 615 bp, Zea Mays
cttctgattctgagcagttccttccaccggcacgagcacatttcatggagtttgctgctaggcttggcatttctagattagatcccaagctgagagattaatgcgagccataatccggccgtggtcccgcatttgccggtgagtcggtgaccgtaccaggggggacgggacttggattcgcaacacacacgacacaacggtttttgaagcgcctcccattcgcaagacctagctctttcggcttacctcattggcagcaggtgcggctgcaaaggagtcacagccaacagaacccgaaattagcttggtgacacaattgctatgcggccttcatttatggctttgtctatctatgaatataatcatggtagctcatgctcgctgcctgcttcatcggtcgtcgtcagcaaggcaggagcttgatggagtagcagacgagagttgctgctataatagtggttctgtgagtacgttctgtactgcactggcattcaattaccatgtcagttgccgcaagcttctggtacataacatacggcggcagattggtcgtccttgccgagaggtagacgatgggactgactactgacagacatgatacgagttaccgggcgg

SEQ ID NO: 100450 - DNA, 728 bp, Zea Mays
ttgcttcatcttcaccgtggtggctacactgcactttgcacatctttataaccttattccccgtgacacgagtcagtgtatcaagaatcttgatggggcactcagcataagtcaggtcatcttgaacactaagatccttcattggcaactgctcttcaggtaccctgagacacttcttcagttgtgacacatgaaagacatcatgtacatccgatagattatcaggtagctcgagttgataggtcatctctccaactcgtctaaaaactctgaatggtccaataaagtgaggggacaatttgtccttgactttaaatctcctcattccacgaagtggtgataccttgaggtacacatgatcaccatcctcaaattccagtggtcttcttctattatcagcgtagctcttttgtctggtctgagctaccctcaaattctctcagattgtacagacttgttcttctgcctcttgaataagttcaggtccaaagaactgtcttcctctagtctggtccaaaatagaggagtcctacatttcctgccatatagagcctcgaacagtgacatcttcagactggcctggtaactattattatatgagaactcagcacaaggtagactcttgtcccaactactaccatgctgaagggcacaagctctcaacatatcttccagcacttggttagtcctctcagtctgcccatcagtctgtggatggtaagccgcac

SEQ ID NO: 100451 - DNA, 362 bp, Zea Mays
gacggctgcaacgccgaaggcacctatggccaaattgggtgagccggaggtcgagagaacaaagatatcagaaattacaagtccttcggcagaggtgacagtgccgaaggcacaaaaagatcttacagttacccctaagaggaaaaggatggtccacgtactagatgtactggaagaaataaagacttcaagctctactctagggaaaacagccgaagcttcaaaaatgcaaattgaaacaaagcaaactgaagccgaagctgcaaagagtcatgccaaacctgaagctgggccctcagagcccgccaaaaaggaatccctggaaattggagataaagaaacggaaagagaagcttcagaac

SEQ ID NO: 100452 - DNA, 419 bp, Zea Mays
gaattctgaatacaactgaattcatagtttacacaacacatagttcaaattctgaatacaactgaattcatagtttacacaacacatagttcaaataacacatagttcaaacaacatatgtgaaattttacatatcaggtacccatgccttcctttttttggtatgagcttctttttaagcattctaggaccagtgccatggcatgatggagtagatggaagacttggcgctacactggatggtcctagtaataaaagaggtcttccatcttttcctggtccaccatctccacttggcgctgcaccttgtgtttctaaaacagtggaccctccaccttctccacttggcgctgcaccttgtgtttctaaaacagtggatggtccaccttctccacttggcacacttgaagattggatgc

SEQ ID NO: 100453 - DNA, 483 bp, Zea Mays
ctttatcttaacgatctaagctgagccaaactaacttgatacccatcactagatttgaacaaaacactaaggccctcatgtccctcctacaacactaataaccataccacatatggtcagtatgaactcataagattacaagccccatgtgtataactcttgatgtgtgcaagcaccaataacttggaggtatgaaaatctcattgaacactagtataaacctagagcaagcactaaagtggactctaactagcctaagaactaatcctactacatttgctaaatcacataatatttttaagcacatataatggatagatcacaaatgataagccttaattcaactatagcttcctaacgctccaactcactacaacaatcaagtatgtgggtatatattcctaaaccaatcaactagacatttgttaaaataactgtcttagtagtaagcattggatacacactagagaaatctagcgcctc

SEQ ID NO: 100454 - DNA, 289 bp, Zea Mays
gaacccttcactttttaagccccaaattttgagacagagaattatacactagtaagaagccactgtaatttttgcagaagttttggaaatttattaagctatcttgtagttcaaacccaccttaaaagcataaaagaaatagagataaagtagagggaataataaatctcactccaatgaattcagctaggaatcttaataaactctcactaagacattaaaagtgatcagtggaaccccaaaataaacttaccaagcttgaccccaatttgctaagtgtaccataaaa

SEQ ID NO: 100455 - DNA, 302 bp, Zea Mays
caacaccaggaggcagggttgcctcctatcagatcagtaggcacgtaccaattaagctgggtagtctcattttcaaaactactctattgataatgggattggatagtgtggatatcatcttagggactgattggttgtcacgacaccacgcggtgattgatgtcgcagccagagccatagaaattcgctcccctttggatggtgagattaccttatatctacccgatcagggatgcacccgttcttgtgcctttgttatgatagaatccccagtggaaaggatcccagtagtccgtgattac

SEQ ID NO: 100456 - DNA, 684 bp, Zea Mays
cctagcaacagaaatacccccacctggaggaaaagacttcaagccctgtcaggaagagatcctaccgaggatgaccccaccatcgtctacatggccggatatctccacactctcgataaccactacgatgacctttcctcccactgcacccacctaaactcccgggtggaaagcttagagtagcaggtcaaggaacttagaaaggagaaggtgtccctccaagagtgtctcgacatagcagaaggcgaggtggccaacactcgtgaagcctaccgaaccctgaagatggattacgataagaagctaaagaagctcgcgcccacgaagaaaatctaaaagaagaccaagagccaaggatgccagactgagcggaagaagaaagcccctccagcaccacctccctccaggatagagaatttgtccgacgtcaaggatatgtccctagctagccttgatgaccttctcaaggaatttggggacactttagaaaaggagttcggaagtacctcagaaagcgctcgcgtgtagtgcaacttgtagtagccgtatgcttgtaatgaactggtgtaatgaataaaataacttggttgaaaaaaattggcatatgcatcatagtaactctccccctggcagatggcttcagataagaccacgcctaccgcctccgggattggagcagggttt

SEQ ID NO: 100457 - DNA, 1189 bp, Zea Mays
gaagaatatcacaccatcaggggaggagacgactaggaccctccttgtcccttcaggcaggtcaaggggaagaccgtatatcttgagcagctagagggcaggaagaagagatgtatggatagagccgcacttgcagcggtagcagcagcagactaggctgtggggggaggccagctacagatttcatctgattagattgcatatcgggtttctctcctcgcgtctcgaccttgctccactgctcccccgctccttctgccacattttccactccacctcccacttcgccaactcctgtcgctcctgagtcatccaccaagcccgctgtgtccaccaactccactactccatcttccactgctcctgctcctgctcccgctccctctcccacttctgctccacccattcctccacctcgcttcagggagcgtgacaagactgagctgagactgttggttgttgatccgcatcttcttgaccttcagcgtgccactgttgcccgggtatgtcggttcagacacgtacccgtggagtcttggttgccagcccagagggacccagcagatgcgcctctcttcaacaccaggacttaggagtccttcaaggcgcagttgtcagctcagattgctttgagagcgcaccggctcttggatcttcctacttttctgtcaaccgccggtgccgagtcagagggtcacctctcttatctgccaggtttgatttcacttttgacctctagtggcagatacattgaggagtgggtcagagtattctatgcaaccgtttggattgaccctcatcattagtcgttgaggttccgctttgagcgcgaggatgtcattctgcattccactcatatcagacaactctttggatttcctgagtcgacgaccaggctccatagcttgtgctactgcatttcggatcctccccatcgccctcacgacggagttgcaccagctatagctcacgtcgctgccctgttcagacctccattcacagatgggtcacgatgttctcctgcagacttccctccagcagcgaagttcctctatgagctgatgagacggaccttgctacccaggatgggtacagggaggccaccacacatattcagctatggctacttggtgccctgatttcacactcagagttcgacgtggttgattttctcatctgtgagatcgag

SEQ ID NO: 100458 - DNA, 860 bp, Zea Mays
aacgggatgatactggatgcacttagaaagaaggtgttcgataaaagcgagaagcttgcagggaagtggatcagggaactaccatatgtggtctggagcctgcgaacccaaccaagctgagctctgcatggaaacacaccattcttcatggtgtatgggtcggaggcagttctactagttgatctgatctttggggcgcccaggttaacctttgaaagcatagccgaagcagaagcaaccaggctagaggacatcgatttgctggaagaggaacggttaaacatggtaattcagtcggccagataccagcaaaccttgaggcgctaccacaacaaagatgtgcgacattgatccttcgcagtgggagattcaatcctcgccgagtactaacaggggagggacgacataaactgtcaccaccatgggaacgaccgttcgttgttgcagaggtcgcaaggccgggatcctatcggctcactcagatggacggcacctaagtgaggaattcatggaatattgagcacctcatgatattctacccctagcaatacctcaaaagtctcaggggcgagttgtactctgtaagcagaaggtttcatcatcaataaagctttcatcttccaaaggcattcaagttcttgattgacaactgactcatattaggctcaactcaaaaccagcgcgcttacacgactcagggtgatcactatgccctactaacagagcaatcggcttaagtcgggaacgccttaagtcggtgcgacattctcatgcttacacgactaagggtgatcactatgccctactaacggagcaatcggcttaagtcaggaacgccttaagttggtgtgacatgctca

SEQ ID NO: 100459 - DNA, 445 bp, Zea Mays
aacatctcacctagagcgaagttgacgatggtggccaatgtaacacccatggagctatccattatctatgttgcactccctacctggcacaccaacattggtgtttagcatcggcaacatactatgggatgtaccacgtagtgtttttgtgttcagcgaagtcgacgatagcttcatggttcgtgtgaggcacaatgggactcaaagatctaaacaagtttcggacgctgagatgcataaaccctatgtcatgtgttctactgagatggtattgctcttttattggaggttacaaagtagattagaactaaattttcgttgtgcctattagtggatccaatcattcggtaggggtccctaaccaaccttatatatctgatgagattagggttacatggttcaatagatcactattgctatgcttacaactatggagccaactacg

SEQ ID NO: 100460 - DNA, 434 bp, Zea Mays
gccaacttcctcaccactaatacaaccacgactaatcgcatctgtgattccctgtatgctttccatgcgcaggtttttttgattgttaataacatagttcaacctattttcatcgatgcatgctctagcgtccactttagcttgacttgataataaaccgtagcatagatatggatttggttggttttttctgtaatgaaattggtagcaataatattcttgcatggtcatgtgtcttcgtgcattgttgtcatttgcacataaaccattgtataagattccaacttggaagccatgttctccaaaaggaaaaagcaatggatactgcagagccatataagctaggtgaagtgaggatattcgtttgagttctttgcttttagtttcaataataatatcacgtttgaatgtgtccaaagagaaatccccaacaa

SEQ ID NO: 100461 - DNA, 392 bp, Zea Mays
ggagaatcatgggaattccctccccccacggtcagggagacagccggatgttcgtactccgagttggaccgagtcccctacagaccaggaggtgaccgaggcaggggctctgctagctgaagttggactgttgaaggagagaggtctgactgcagaagctgtggttgctgattttgtcttcaagaatattcagccactgaaggacagggcatacccggcctatctgtatcgaggtctagctgactctacccgggtcaccaacaaaagaattcctgctgtggatttggtgagccggctcgaaatgatacttagaggcaaggtatcgaatgttggtgccccagttgcgtactcggcctggagcctgcctccttcccagccctttgcccattttg

SEQ ID NO: 100462 - DNA, 352 bp, Zea Mays
aaaaaaccagacaattattccccacgtattacataatctaacatgaattctaacaccctttccatgcagtgctctacacaattgaattccaaaaacgaggcctacctcactcgcatatcatattttgggtatcaaatggcacttcggagtctacatccaactttattgattctttcatcagtgctgagattccagatccaagcatcgaccctttagggtactgtttggtggcagaacatatgatccacggtccatgcggaacattaaatccaaattctcaatgtatgaaaaataacagatgctcgaagaattatccaaaggagttccatgaagaaactaacctggacgaaca

SEQ ID NO: 100463 - DNA, 321 bp, Zea Mays
aacgtctgcgagagcaccacctttatgccaagttatccaagtgtgattttggctaaaggaaatcaaattcttgggtcacactatctctcaggctggaatagctgttgatcctgataaagtgcaagaggtgatgaattggaggccaccaacaactgttcgccagattcggagttttctgggattagctggttattaccgaagatttattccggacttctctcgaattgcgaagcctattactgagttgctgaagaaagaggtcaaatttgtgtggagtcagaagtgcgaagatgccttccatgcattaaggcagcatctgac

SEQ ID NO: 100464 - DNA, 331 bp, Zea Mays
agatgctttaagtcgcaagactttttgtcattgtcttacagtaagagcacctgacaccactttatgtcaagaaatggaaaggttgaatctagggataatcaaacaaggaaccttgatgaatttgaagcttgagtcagttcttctacaaagaattattgatgctcaaagaacaaataagggtatgaagtatattcatgagaaaatggaggccgacaaggcaaattgtttcagaaaagataatcagggagtaatatggtttaaggatcgcatagttgtaacacctctggtgttactgttactaaaaaatttaagcataacatcatgatcattg

SEQ ID NO: 100465 - DNA, 1324 bp, Zea Mays
ggattctttatgcttcaattatacgtggattctagataaagttgtattcactcatgttgattgatgaaattgtaagcatgatttcgattgaatttattatatactgattttattaattgatgatgaacaaaaaatgtcataaacattgtctgattctatgacgaatatatatgtcacaaataatttgtcatgccacccaacatgttagttgtcatgtcatcaagttttacgacgaagctattcgtcataatttctttgacacgttagctgccatgtcacctgccacctcatctcacttgtgactaaattgatcgtcatgacatattcgtcacaaaaactgccatgtggcaatgatctaatgccacactatatgacgtttttggccttgtttataacgatttagggtgtcatagattttatgacgaaaatatttttcgtcactatatttatgacatgttttgccttttgtcacaaaaggtcctttaacacgcacattctgtgacgatggccttttcgtcacggagtcgtcacaaccaaatagattatgacaaacaaatccctatctgtgacgtaatgagaatgtcatagaaggccacatgtgttgtagtgtctaatggggaaggtatctaggtgtcagcagtggtgaagcctaggtgtgaagattcagttatggttggctggcactttggatcttgaggtcgcacacccaaggaaggggtaggcagagcagcatacaagatactttaggacttaatggacccttttcctcgagagattgctaccgtcatacctaggatctttcctaggggtgatcctttcaaccctaagtgggaccagcctgagggtagagctctgatagggggtgatagtgagcagcagtacagtgacactgtagcctccagtgctatgtttgcagttatgcaactgtataacagctctgagcgcaacttggagatggtcaatggctctcttgccatggcttagaatgagttgcaccggactcgagaggcacatgctgtagagatagctcaagtctagatagagttagcccaggttaccttagacaaggatgaggcaattcaggttagggatgtggatgtacttgacaatgcgttgtggattgacaaatgccaggactaccaggccatggtagtagagatcatcagggagaggaatgtagcctggtccaagataacctagcttagggcaacacaggtcaatctgatgcagcagctgaacaatgtaaaggcttggaatgctaacctgcatgaagaggtttttcagttgcatggccagctaaacccagttaaccttccagaacctg

SEQ ID NO: 100466 - DNA, 311 bp, Zea Mays
cacggatcaggaggtagttgaagcgagggctttgctagctgaagttggtctgctgaaagaaaggggtctgactgctgaagctgtggttgctgattttgttttcaagaatgttcagccgttgaaggacagagcatatccggcttatctgtatagaggcctagctgacctgactcaggttaccaacaggagaattccctctgtagacttggtgaaccgacttgagatgatccttagaggcaaggtatcaaatattggcgccccaatggcatattcagcatggaacctgccttctcccaagaccttcactcttt

SEQ ID NO: 100467 - DNA, 1153 bp, Zea Mays
tcgagctcccctatcctcgctatacgtggaggcccctactcaccgtggtgcagtttcctctccaccaatagcacactcgaaccatcactggaaccatgctttcgggaggtggcgtgtttcgaaatccacggcgacaaatcacgcaaatcgccgccttggccgccatcacaaattggtgatgcagcgtccgcttcatccactggcttctagggtctccgtccttcatcccccgcatcgatctccgtccagatctcgtgagcatcctcttccacggcatggtagcatctcccaccttacactctgccaccggccgccctctaccggagcccctacctgttgagttgcttgcctcaagtctccctctatcggaggcaatttagcgccatggagtgtaccctatctctcactcgtacctcggctttcgaagacggtcaaggccctgtcacgaaccatgcgtagcctggattagtaccacttcgcttgcaggagggggggcgtaaccggcttataagggcaagcttccctcctctctcagcccgagttttgagatgtgagggaggggctcgctgctgaaggccggcccacgagcgcatgaacgcccaaacgcatgtcgtgtgtgggctttttgccggactggcctaggtacattgacaaatggtatcggagcctaggcctgcctgtttaaggggatgggatgtcacgaatcatgcgtagcctgggttagtaccacctcgcttgcgggagggggtcggcctgcttataagggcgagcttccctcctctctcagcccgggttttgagatgtgagggaggggctcgctgctgaagaccggcccacgagtgcatgaacacccaaatgcacgtcgagaatgggcttctcggcggactgatctaggtactttgataggccccagcggttgcctagcatactacctcgccatccccttccccttctctgtccagcaaaagaactaggtaaccaactcagcattggcagttctacttgaaaaatgttttagataaaggccatggccttttaatgtctaggggtcatatcaagtgagcgtggacttgtggtgtgcatgatgcgcatactatatcctgaccatccgtttagatctaaacgttgcttttgagtccagttactcatcctt

SEQ ID NO: 100468 - DNA, 626 bp, Zea Mays
ccaagtttgatgcgccatatctttgaaaccactcggtattagtccaagaatcctatagctagtttgtagactgatatatggtgaacaaatcttagtaagggagattgctctcttcttaacaagaaattggagattaaggagggagaagatggtcggttcagacgactgaagaacaatctccatggtacagtgccttgagtggatcagtacgccagatcagctcgctgtcgttgatcgtcgtcccgattcgtgcgcggtactggatggataacgccggggaaagggtaactcgtgcgtgcaccatctcctaagctcagccggagttcttcaccggcggccaccgtgactcagtgagctctcgccgcgctgtcgcacatgcttcgatttgcctcattgtgcctcttccttacgtggttgtcatgcgttaacagcccacctcgtggccgcggatcgatcaccggatcgtcgtgcctatatataggacagggagacacgacgaggtgttcgcagttcttcaagcaagcttgagtaaaaccagaaattcgcactgtctcctcctcctctcctcaaattgattgtgcacagtgaaactacagtctcttacggccctatagccccaatcccat

SEQ ID NO: 100469 - DNA, 1090 bp, Zea Mays
ttgttgttagagtatagtagtcaccctgaacagttgtaaaagtaaaaggtgttatgctggtttcagggtgttttccaatttcagccgatcgcttggctggcagggcatagtggttgccctaagataagtggatgtgaacatactgtaccgacttaagtcattgctgacttaagccaatggttctgttaatagggtacagtggtcaccctgtgccaagttagcgcgagcatgttgcaccgtcttaagtcgtcgccgacttaagccgattgctccgttagtagggtatagtggtcaccctaagtcgagtaagtgtgagcatgttgcaccgtcttaagtcatcatcgacttaagctgattgctccatcagtagggtatagtgatcaccctaagtcgagtaagcgtgagcatgttgcaccgtcttaagtcatcgccgacttaagacgattggtccgtccgtagggtatggtggtcaccccaggtcgagtaagcgtgttgatttcaagtccaatcagatcgaagtcagctgatagtcaagagtttgaatgcctttgaaaacgaaaactttattgatgatggaatctccaattacagggtacaatgttgcttcgagagcttttgaggccttgctaagggtaaaacctcataagatgttctatgttccatgagtttcccacttctgtaccatccatttgagtaagccggtatgatcttagccgagcgacctctgatacaatgaatggcccttcccatagtggtgacaacttgtgtcgtccttccccgttagaattcggcggagaaccaagtctcccacgacaaaggatcggtgtcgtacaactttatcatggtagtgtctcaaggtctgctggtatctagccgactgaattactgtgttcaatcgctcttcctctagtacgtcaatatcctctagcctggtagcttctgcttcaactatgttttcgaagaccaaccttggtgccccgaacatgaggtcggcgggtagcactgcttctaaaccatagaccatgaagaacgaggtatttccatgtagagctcgactaggttgagttctcaggctccaaaccacatatgg

SEQ ID NO: 100470 - DNA, 517 bp, Zea Mays
gatccccaattagtgcgtgattttctgtacaggaccgctcaattcagcccaaaacctagtgccctcggagaattcgagtgattggtacgcagcgggctcgattaggatcgatttcacgcgtaacttgcaagggagaatggctggactcctcgtcgtcccctgtctcccgtggtggtccagggggacatgaacacatgggtatggacgtatggcgccacctgggacgaaatcttgaggaatatcgtggagttgtcgctcttcattgattgattgaatatgttgcgtcgtcgtgggagagggagggcattcagtttgtggcaataaatggatgccaacatgtctgttggcctagcgtctgcgacactgctggcgttgttcgatccttgcaaggctttgcacaactctcttatattgcatttgcttggtgtagtctccacgtagttctgacacaacacagcaccgcttgcctgcttcccttgggatacgccgtcgtcaggcaaattgcggtgtctatgag

SEQ ID NO: 100471 - DNA, 407 bp, Zea Mays
gcggcggtactattagggaacaagttgtggcatagaaaagttactgctgtggggaaaagaaagtagagatatgtcttcttactgataataataggctgggcccctcgccctcggaaatttggataaagatgcatctgttatttactgtgttcttcaactattcagctcatttgttgggcttaacatcgatttgatgtgcagaagcaggtgatgatttctccctatcaaaggtcagtcagttttggtgtctggcaggcacggaactcagtgcccctggacttgtgcacagctgttgaactttagcccatcatggtgcttctgaatgatcgatcagtcccatcagtctctgttaagttttgtcttctcatctgcacttctgtcaggtcttaataataacccaggatgac

SEQ ID NO: 100472 - DNA, 470 bp, Zea Mays
cacaaagtattgtgggaaaggtaggccatgatcagccgagcacgagatgaatatgtttagcgctgtcattctacctatcagtctgtatgcatctcttatcatttgcagggacatcattcctgttattgcctttattatgatcatcagagctctagtgtagacttcgcaaataagaagcaggaaaagatcactatcaaagggtcaaccatgtcgttgtaacaaggcatgtagtccaaactaagtggtctcatgttccgctaacatttgatgcgagggacgtagatttgtaaagtggcccacacattgacgcgatggttgtaaattgcaataaagtaagttaggagcttcataaggccctcattgacaacagcggccagacaaacatcatattcatgcatgccttcaatcgaatgggcatcaaccataatatgctgcaactagccgacaatccattatgtgaatttggtggg

SEQ ID NO: 100473 - DNA, 415 bp, Zea Mays
gtgttcaatgcctttgatcatgttactttaaggattactgtctttaagtggttatttttggtgcccaagtggtacaagtcatccctagacctcacaagtccctatgcaattgatgcacatgtttagggggaggatatgctacaacttgactccattgagactaacttgcttgttgagtactcttgaaatagtctcaaaggtatattgaaagggaaaagtaaacttggacaaagaaagggcttccactgcattccgatataaatgtatcttgtcccaatctcgtacttatgttctcattgccttttgcgcttatttgacattttggtgaggcaatggggttaaagggccaaaaaggtctcctattttggtgcttaatgccaaagggggagaaattcaggccaaagcaaatggatca

SEQ ID NO: 100474 - DNA, 334 bp, Zea Mays
ctgataagccctgggggagccttggggccgtgttgggagccgctggccatggcctccgccatggatgagtaccctggtgtcgcgtcctatcgtaggaaaagaagaaaccccagcaccgttgatcggaagggcaacaatggagatcgtatctgggacgatatcggttcggccagggtgaatccggtgcgtccgtgcgcgatcgttgggacccggggaaatcgcgggtgtgtttcatcgcggaccgcccatcgtcgatctgacggtcacagctgtgtaccgattcacgtcgaatgaagatttaatccaagtgctctattttagatcgtgcgtctca

SEQ ID NO: 100475 - DNA, 462 bp, Zea Mays
gtcgtgcgggtccattccacaatccacacaggcaggaaccgcgttctttgcttggggcaccaggtcttcgagtcttgccaaattcggcgctcagagttgtggcaagcgaagtcttgaagagcccccgcttttgctgactggtcccttcgctcccaaaccttcattagctcacagcggtcgaggcgccgcctccggtgcgagttgaggtagacttcgcttcatgtgactgatgcaacctactcaacttatgttttaagtagacagaacgaggggggcggatagccttcacttcaataggtctcaaatgtgtgtgttttgaattctatgccattgtcgctgcatatatctctcatgacattcgtagggaactcattttgcaaccaaagaatcaaatctcaataatgagtaaaagcttcatccttagccttcattgagaacacctaggaatagcgataaaagtca

SEQ ID NO: 100476 - DNA, 661 bp, Zea Mays
aagctgaatttagcatgcatacgccagcatatgtctgcaacttgctgtttattttgccacaaagtgaagtagaacattacatgtattagagtatgtacagtccaatttaatctggaatctcttgaggggtctctacggggttgattgaaaaactatgaggatcttatctctgtacgattctctataaatattacctcttaactgtatttatgatccaggagctcaaggttgtattatacagtctattagttgtctcttatacttgaaaaaccgattcatggtcttaggttgtacatgcccttagcaggatcctcgggtatagttaataacctacttggaagtttttactatgtgaagacaataaccttatgtcgataaaatgcaaacgcctttttttatctagaattacatgtttatctcatgatccttgttaggggtgtaaccggaccggatacagacgaatattatttgcaccatatttgttttcatattttctcttcagattaggatcggatacggaaattatcgagttgtgtcagataagattagaatggaaatcggaattttaaatatccggactagaatacggatcggattttagccctcttagatggatcgaattcgaacacggatgaatactaccatttacacccctaatcct

SEQ ID NO: 100477 - DNA, 1188 bp, Zea Mays
attccaattccgtagctcttttatctgccactgtcctctcaaaatgcttcaaaaaacgaataatatcaaaatctgatttcaaatgattcttcagtgcattgttgaagctctcacttagttgtgtacttcgcactcccaaacttaagacatctctcatatagcattcagcccatttttctttaaccttgtatatactatctaaccatgtttgcttatgcactttagatcttataatgtcaaatgcttcttgaaattctgccttgtcctcataaccatacatacaagcactaaaatcggataaaatgttagtttcttcatcttcatcttcatcttcgccttctccttctccttctccttctttgtccttcactgaagataaatgtttgatagcattctgcattatgtgaaaggtacacagcccatgatatgattctataaatactttgtaaatagcctttcccattgctgcatcttgatccgtatagatagttctaggttgttttccattatgtgcagctaataaagtctgaaaaagccatataaatgagtcctctgtttcatcaaatagaagtacagcaccaaatacagtggtttctctaaactgatttagcccaagaaaaacaccaaaaggcatatactctttgttggtgccaaaagtagtgtcaaatgtaaccacatcaccaaagtgtgcatagtcaagaatcatctttgcatcaacccaaaatatgttggttatatgctcctcacaatctaactgcaaagcatattggaatgatggattttgagcaattttgtcatgaaaatacttcaacatacttccagcctgtccataagccaaatccctctgccgtttgctttgcaagtaatttttgctatcacggcaagtgtagctaaggttaagtgatccaccaacttgatgactagccaactcatgtgcagcttttggtctaattccagaatcatccgcagtctctatttcaaaagcttgcaattctgaaatttttctctgcgatgccatcaagtgccgagtttctggcaagtgaagaaggtgattgtgttcaagcataacatctgtgacttcataatttcctgcacctcgatccaatataaggctcattcgagctttgcaatcagttcttgtttcagctctaaagcactttggcacatgatttgtttgccctttccttc

SEQ ID NO: 100478 - DNA, 293 bp, Zea Mays
ttaaccctaaataggcattagaggggtaaaacttaacccaaattgagaaaacctaaaaaactttaggggaaaagtcataaaatgaccccaagaataaacttgaattacctttatacccctaagataccagaaaccctaattggaaccctggagaaccctaaaaccaaaccctaggggcttatgtgcaaaattggtccacttttgggctaaagtgcaaaaaccaagccaaataggtattttaagtcatttggttcacaaatatgtggacttgaaagccaaaccctaagttttgg

SEQ ID NO: 100479 - DNA, 447 bp, Zea Mays
tagacgacgacgcgcagcggccgaaaagataagaagttactggcgcacgcgattagtgtcctattaccgtggcaagctccccggcgatgaatggagggttacagtgagtcacggcgacgcggtggatgtgccaaggcatgtggcgcaaggccataaggcggctatcaccggcgaactcatccgaatccaccgtggcttactcgatacggtggtcggagtaatttagtggccagaatatatccacgacgatgatatttactcaaccccaagcgctatctaattgatccaagcacgaatcaaggcggcgaaggcacgaatccgcgcgtgactcgtcggtggcgagggactgagctggtggcctgatccagtcactgtaccatcgcgaagtgcattcagtcggtctgacagagcagattcaaggcagcttttctccaaatttagcatgac

SEQ ID NO: 100480 - DNA, 341 bp, Zea Mays
ggatggcacaagctatcaccaccctaggaaggacccttcatagtcgtagaagtaactcgacccggttcatatcaactaactcagatggatggttcatatcgactaactcagatggatggtaactcgtggaacatcgagcatctcaggaagttttatccatagtagcaccataaactctagatggtaggctacaacatgtaattcttcaacttcattctcaataaagtttctactttttcccacatacaattgtactcttgcatgctgctaacggagcaatcggcttatcggcctaagtcggtgtcacatgctcacacttacaaacaaagggtgcatactat

SEQ ID NO: 100481 - DNA, 343 bp, Zea Mays
tttaccacagtgaaagcagcagcaagcaaaggatagaaaacagacaacacaagtaattcatgcagccaggcatggaggatacacatatctagcgcctctcagtttcaggagtatactcagctaagtcgggttatgaaggcctattcaggcgggctgtcctgtttatttaggccatgggaggcccatagagaaatcatgggcaactcacaaatgtcatttcttcatgtagttagttgcacataacaagtgctggactgcttatctacttacaggacggggtctaatacaccatcctcgatgctcacactgatcaggctgaagagatgatcaccagtgtttttgc

SEQ ID NO: 100482 - DNA, 305 bp, Zea Mays
agcgttaggagtaagctgatgaaggtagatcccaaatttatgcaatacttcagcaatcatcttgttcaaaggaaatctcaaaccagccttaaaaaagcttttgaagaccactacttcatattttcctggcttcggagtagtttcttccctaccgaaacgaactagctctttcttcgcttcactgaaatagcccaatttcagcatcttaggcagatcatcttcggagatggtggatttcccgaaatccaggtggctgggtttacttggcgctgcgctataatcatctttagactcagtctcctcaa

SEQ ID NO: 100483 - DNA, 442 bp, Zea Mays
cttaagccgattgctccgttagtagggtatagtggtcaccctaaatcaggtaagcgcgagcatgttgtaccgtcttaagtcgtcgctgacttaagctgattgctccgttagtagggtatagtggccaccctaagtcgagtaagcgtgttgattccaagtccaatcgaatcgaagtcaagtgatagtcaacagtttgaatgcccttgaaattgaaaattttattgatgatgtattctcccattatagagtacaatgttgctccgatagctttcaaggtcttgctaagggtaaaactttctaagatgctctatgttccatgaattccccacttccataccatccatttgagtaagccggtatgatcccggccgggtgacctctgacacaatgaacgacccttcccatagtggtgacaacttgtgtcgtccttcccccgttagaa

SEQ ID NO: 100484 - DNA, 488 bp, Zea Mays
gcaaggcaccgtatggttcaaggatcggatatgtgtccctgagattgaaagccttcatgagactatactgaaggaagcccatgactcggattattctagtcatactgggagtacgaagatgtatcaggatttgaagtagaagttctggtggtatggactgaagagatatgtggctgcacatgtggctatgtgtgatgcgtgtcaaagagttaatgccgaacaccaaagaccagctagactattatacccattaaagatacccgaatggaagtgggaagagattggtatggacttcattactggattgcctcacaccccgaaaggatatgattcgatatgggttattgtggatagactgaccaaagtggctcacttcattccggtcaagactacttataagggatctctattggtagagttatatatgactcagattgtgtgtttacatggagtaccaaagaagatcgttttggataagaggatcacag

SEQ ID NO: 100485 - DNA, 600 bp, Zea Mays
ggtggcgcagacggccgatttggtggaagcaagaaattctccggctatggtggctaatcgacgacgagggttggtgctctggcttcgtaacaatctagtggagctagttgtgcactaaatttatagtatccgtgagcggtggctccgaatttggaagagggaagctggcggccgaagagacgggtgagtcacaggtgcgaacttccgtggcgttcaccgggcaaaaggttacaactgtcacttggttatcctacacaacccgtgacgacatggtagaatagcttaaggcgtgtcgtgaccgaggtaagtggaggcacaacgacaacggtcgagcggccacgtcgccggtgcaagtgggtacgatgaagccggctcaatccattcccccttcgatctttttgcgtcctcggtaatatcctacccgagctgagcatgaatcgtggcagacagcacggatcgcagcacggagatctctggcggcgaagttcattgaatctgatcttgttcagttactgtaccatcgcgaacacccatcagtgcgtctgccagagcaagttagatggctttgttctccaatttctatacaacaacccattaatc

SEQ ID NO: 100486 - DNA, 412 bp, Zea Mays
tgtcactatctttttgtgcttttattatgaataaagtgatccattctagatgttgtcttcagttctactcattaaagaatggggttcatgtcatgttaaggtggtaactaggcgggtcctaacaattcgggggtctcctcggtcggtagtgtggttggcctcgtctgtacgaaaggttcgacaatgcttcccctttccttgacctttgaatatgaaatgcgtagatctgtgcaatggcatgatctgtgaaatggttgttccttgatcagtgaatatgaaatggctagatctgtcaaatgccttgttctatgaaaaaatttgttccttgaatacaatgagtactacgatgccaacgctttccacttgtgtacacataaattgttttgttgatgacgaccaaaagtatgcgctg

SEQ ID NO: 100487 - DNA, 405 bp, Zea Mays
attcgtgctcggtgcaaagtggataaccacgagggagtaaaagatctggcagggagatggattgggtcgcgagcagtagtttatcagaggggcttggggcagtgcgacgtggccgaacgaccgtggttgtcagaggtcgccggtgagctcgactgcgccacgccgtggtcctttaccacgtagtcgtaaccgttgcatgctcagaattactctcctcgcatctgtaggccgtcgagcgccgcggcatgcttgccagtgcaatgtcttgtcaccaccgccctccaaatcccttccaaattcggagtaaccgtggccaacctcccttgcttcgccccctcataacgaacccagtgcaactctaacctcggccggtcatctaccatagcccgagcaattccgtttccc

SEQ ID NO: 100488 - DNA, 1144 bp, Zea Mays
gggcttgtgggggacagatatcccccggctccactcgggggctacacccaacggagttataaacgtttcaagtcatacgatgagcccgtaagcaagaagcaggaacctttgaatcgattatttcaaaatcaactcaaagattggggcttgtgggggacaaatatcccctggctccactcgggggcgaaaactctgctcggggccatatgtcagtcgttcctcagtgacgtctcatcgtgtgtcgggcaatggaaacgacagaaatgggccgaccctggagtgcgaagggcccacgcccggattactcacgtcttgggcgtgatcacgttgaggctggtcgtttttcccgcacccgacatcctcaaacgccggagatagctcagagcggaggcgccgggttttcctcgggatagcgaagctaggagataagcagaaaaagggtgatcagcgtgtacgcgggaagcaccctacggtcgtgtatataaagccaagggggatccccatcactttcatctcattagcacctcacaacttggtagacatcgcttgtaaacacttcacacatacaaagccaccctaggaagtagggtattacactcctcaaagtggcccgaacctgctgaaactcgcttgactctctctctcgtgccctcggcacgaaccatcgagttacaatccacgacaccgtcctacccaaaagcaccatgagggtacccccgggtgtgcggtcggacactaaacaccgacacctatctcatcactctcaagtagatctttcgctaccttcgcggctccatcgactatgacctcctccttcgaccctcctcgatgtcgaagcttgtggtctacaccgacgccgactaggctggttgccccaacatgcgagggactacttccggttacgtcgtgttcctgagcaccaacctcgtctcctgggccaccaagtggtagcctgtcgtctctcgctccagcgtcgacaccgagtacctcattgtgaccaacggcgtggccgaggcttcctagcttcgccagcttctccaagagctccatagccccctccagcgcatcaccctcatctactatacgacaacgtccgcgcggttacctctccaccaatcctgtgcaacatcagtgcacgaagcac

SEQ ID NO: 100489 - DNA, 1166 bp, Zea Mays
catcagcataactcttctgacggctcttagtggccaaaatattctgacgaaattcccgaaccttctcagatgtctgcttaacccaatcatgaccaactagagatctctctcccaaagtctcccagcacaaaggggagatacatcgcctgccatataaggcctcatatggtgccatcttgatgctagcctggtagctgttgttataagcgaactcggccaaggcgagatgatcctcctagctacccttccaagacagaacacaagcacgcaacatatcttccaaggtttggatagttcgctctgactgaccatcagtctgagggtgaaaagcgacactaagagagagcttggtacccaatgcacagtgaagactctcccagaatttggatacaaatttggagtctcgatctaaaacaatggacttaggcaccccgtgaagcctgattacttctttcatatacaagggaaccaactctgaagctgaatttgtggtattcatgggaataaagtgcgcagacttagtcaagcaatccactaccacccatatagcatccctgcctcgaggagaacgaggtaagcccaccacaaaatccatggtgatatgctcccacttccactccgaaatttccaatggcttcaataaacccgcaggcctcttatgctcggtcttcacgcgctgacatacttcacagggggccacatacttagaaaaatcaaccttcatcctcttccaccagaagttttgcttcaaatctctgtacattttggtttcgccagggtgaacggtgtaaggcgttttatgagcttctctcaagatatccatcttcacctctaatttctgaggcacacaaagacggcccctgaaatgaaccaaatcattctcatcaatggtgaactcatggggtttaccattgccgaccctctttcgagcttcctgcaacaaaagatcctgctgctgagccacgctcactctctccagaagggaggattgaatgagcatccgagtctcctctctagcggtgccgacatagcacaaagcaacccccatacggtccatatctgcaatcaaaggcaaggccacttttggaacctcggacctgctaagggcatcagccaccacatttgccttccgcaggtgataatgaatggatagatcataaaccttt

SEQ ID NO: 100490 - DNA, 454 bp, Zea Mays
cttatacataaaattttctcaggttgtctatattctacgaatgctcgaggtcttcgtcggattgtgttgtgagtctgtaggcatttggggatgttttcctcttgacgatgaaaggcccttcccatttaggctcgagtttacctcgagacaccattctgctgtttctgatgaggacgaggtccccttcgtcgaactctttaggactaacaatgttgtcccgcctagcctttgtttgtgcttggtatctgttcaatgtttccagggcagtgacacgatctccatcgagaaggtccttggttgttgacttgtcgatatctggtgtagccatggcgtttgttcatggtgatccatgctttatttcttgtggagtcatggcttcggatccgtacattaatcggaaaggggtgaatccggtggctctggattctgttgtgttgagtgcccaaatgacctc

SEQ ID NO: 100491 - DNA, 494 bp, Zea Mays
ttgtaataagtgatgatgccaagacatgcattttccaccaatgtgttcctgaacctatgaaccttcagagttcagatgcgtacactcaattcaaactaggtggtgatactaggcctgatcataccggttgagtcaaactattgactcagcaacactaagcaattggagctgaggaagaaagcaagcagaacttgcaagttaacggttaaccaattctgagcagtgaacagtttgggtttgccccaaaccttacacactgtcatttaacactatatataggtgataccatggttatcgcggcgccctggcgaggcgagtcgcctccagggcgactggacgcctaggcgacagttagacgcccaatcgttcagatatgaaggtcaactagttagacaaccaactagccatagaggagaggagcagagcgcggaggtgtggagtgcagcggcgtgggtggagcagcgtggtgcggctggacgtcgcctaggtgacgt

SEQ ID NO: 100492 - DNA, 955 bp, Zea Mays
tagagcaaaagctcttaacatatcttccaacacttgatttgttctttctgtttgtccatctgtttgcggatgataggctaagctgaagtttagcttggtatccatggactcatgtaatcttttccaaaagcatgaggtaaattgggttcctcagtttgatacgatcttcttcggtactccatgcagacaaacaatccttgacatgtataactctgctaactgggctcccgagtaagttgtcttcacaggtataaagtgtgccactttagtcaacctgtccactataacccatatggaatcatagccgtcacgagtacagggtaatcgaactatgaaatccataccaatttcttcccatttccatttcgataccttgagaggttgtaacaatccttctggtctttgatgttcggctttaactcgttgacacacatcacatagtgcaacataagtagcaacatctcttttcagaccgtaccaccaatactttcctttaggtcctggtacatcttagcacttctagggtgaatagaattagctgaatcatgagcttctcttaagataagttggcgtaggtgctcgatttctagtacacatattctctttttaaaccataatgtgccttgttcatcttccatgaaataggaggttctcccaaattaatctgtgctttaatttctttgattttctcattagattcttatcctttacgaatctcctgttccaaagtagattccacttccataaccatggcttccatattattgagcataccaaggttgagttgttccatttcccaacataactcctgtggcatcaaataggtagtaagattgttcacttggcctttacgactgaaagcatctgccactatatttgcttttcctgggtgatattgtatttccaaatcatagtctttgattaactcaagccatcttcgcagtcttaggttgag

SEQ ID NO: 100493 - DNA, 324 bp, Zea Mays
ggtgaccctatccttgagatccaggactcgaataggatgttttgaatatgttaggtctggttccaaggtaacatccacctcatcaatggttcgatctggaacccaaagacacttcttcaattgggatacatggaacatattgtgcactaccaacaatgttttgggtagttggagtcgatacgccactggtccacatctttcaagaataggacacgaaccaatgtatcggggtgcaagctttccttttacaccgaaacgggttacacccttcgtaggtgatactttcaggtacacataatcttggacttgaaagtacaagggttg

SEQ ID NO: 100494 - DNA, 439 bp, Zea Mays
tctgcttgtactaaatcagtgagcgctgcaactggtcgcgtttttggtgaggatgaaggagcttgcagtcctggagttgctcgtcgtaaacgattgtgctgaacgggccacccagccatgtctaccaaggggaagaaaagaaaaagaagacttcgacgttcatctggcttggagttggaggctaactctactacctagtcccccttggtggctcggtgagcgccaaccttgaggatgtcattgagagtcgtggtggcactagagttggtggacgggtgtttgatgaggacaaagaggatgaagaagtttcccctttgattcgcaagaactgtcgtagcagaaatagaaacgatgtcctgattcaggctctcttaggactggtcagtctccataggttgacgatgtctaccattgatcatgcactggaagagattatccc

SEQ ID NO: 100495 - DNA, 342 bp, Zea Mays
gttcggggcaccaaggttgatcttcgaagacatagcagaagtcgaggccaccaggctggaggacattgatatactcgaagaagaacgactgaatgcggtaatccaatcagcacggtaccagcagactctaaggcgctatcatgacaaggctatgcgacagcgatccttctcagtaggagatctcgtcctccgtcgaattataacgggggaaggacggcacaagttatcgcccctatgggaaggacccttcatagtagcagaagtcactcggcccggatcatatcgtctcactcagatgaatggcacagaagtcgggaactcctggaacatagaacacctcag

SEQ ID NO: 100496 - DNA, 329 bp, Zea Mays
agggttttgatgccactcaagtccttccaagagggtatcttaggatcatttctcatagcttttgaagttttcccatgcttgggctccccttatatccataatcccagatttagggttaagtaccttacactagggttaaccacacattaagtcacatcagtacaacatatttgaaatttttacctagtgaatgcactctaggtgtgacaaacacatgatatgctaatgctcatgatgttatgctcaagttttagtgacagtaacaccagggtgttacatccttccccccataaaagaatctcatcccgatatttaaagtcctagggcaa

SEQ ID NO: 100497 - DNA, 456 bp, Zea Mays
cctgtctcggacaaaaagagctccacaagtaaggagtgaatgcaactttggcatctcatgagatggcaagaaataaatacctcatgaaaacccatgcttaaaaaaaacaaatcacaaccctgggaacagctttcccgaggcattattatgattaattagaagcctcagccacaagggcagagaaaaaccctgaacccctgcttaaaccatcagcaagtagatatatttgagttacttattctgttattcatttatcaactgtatatatcagtatgccaacaagactggaggcatttcttcttggcaggggcataggagcacttagctcataacctggctggtttcaggcaggaggctgaggcatttgtttactttaaagtagtagtattattgtaaataaatacaattcatattattagcatggattccaatatgtaacctggaccaatagcttcc

SEQ ID NO: 100498 - DNA, 426 bp, Zea Mays
aatagatttaatacgactacgatcgactcctcgcccgcatgatcccgtatctacgacccagatctgtttgcgggaaagggtatgctcagtttaatcatagccgtttagagaacatccaacgaccgaacttcgccctccccaaactaactactcgacagcggcgccaccaccatccttggcggggatcgccggagttaggcgatttggccaaatcgtgctcctattctatcacgactcggggttatacggagtacggaatatgacgaacacgctggtatacatcttaccacggatggacgcctgattggtgctggtcgcggcgatgggcggatccaccgtggtcctttgagtctgatgagcaattgatgctaccccggtgaacctttctgcccgaacaggtccctcacacacgcgaccagagcccgc

SEQ ID NO: 100499 - DNA, 955 bp, Zea Mays
cgaaacaacaacgaaacttaaatcctaggcaagtaaccagagaaatatattcatccaacatatatgatgatctgtgctaagtgcgcgtggtatgatgcaatcttatgagtatgcgtggttagtgactgtgattttcacatctatatcaattgcttgccccacaaatgatcagccagggtcaggtaaaccatattgtgtaaccatcactataacactgcaatcattttctaaatagtacttttataaatcacaaaccaaaggtataaatacaaaagtctagaaaattataaaaaaccttcatgaagctggcttcatcgtagtaccaaaatagcagtaccaagtgagaaaaatagcagtaatttgctgtctggtggtaagcgtgaagattgagattgcaacacaaataaacactacctcttatttgcatgtgtcccaagattgcaaccagatttttacaaataaacactatgcaccaaatgcaccagacaaatgtacatttgtgtgaaacagactacaagaaacaactgaaacaagcacattcggtgactcgctggacgcaccatttcacattaacagaagcagaattatcagtcaaagcacacattatagtctgaacctctccaaaccgcctcatgttggctcaagtccaggttccccctaaacctcccctcataacaaaaacaggagataaggagaattgagagagctaagagttcgtgacgatcaattttagaataccagcttataatcttcttcatatttgtattcacagagtattgcgcactgatcagaacctctctaaaattgttatcctgttgtttcccgatcgtatccaaattcaacacaccagtggccagcgtatgtacaggacgaactcaccattgcctagctcactgttacattcatccattacatctatccatgcccgaattttttgcattttggtccttcatcg

SEQ ID NO: 100500 - DNA, 363 bp, Zea Mays
cgaagaaacaacggtcgctatgtcatgaaaggcggttacagattggataataggtgggtagtcccatataatgagattctgttgaagacttaccaagcccacatcaatattgaatggtgtaataaaacaatatttataaaataccttttcaagtatgtaacgaaaggtccagattatagcaaagtatatttgcagaaaataagaaatggcgaagacataccttacgatgaagaaattaatacaagaaacgaggtcaaagaatatttggatactcgatatttatgtgacaaggattcctgttggcgtgtgcttggatatgagatacacagacactatcctgctgtagaacgaatgccggtgcat

SEQ ID NO: 100501 - DNA, 775 bp, Zea Mays
cgcaaggtctccgtcttgagaactttcgacagaggaaaaggggacctctgtatcactttgtcgaaggtgtttttgccttgaggatcttcgacggagaagaagaccccccaacacacagcctccttcaccaatctaggataaacccatgagcctgcgtatggccgaaccatccgggctaagcttggatcgtccgacccaacaatggttggccccaagtcgtcgagatgcacgctagggccaccgtatttcgcgcaaggtctaactaacacgctcagaccgtccgagtacacaattggactgtccgagtacacaaccggatcgtccgcgtatcatactagactgtctaacgcaggatacgcagaacattatgtcagttattaccagcaatccttatagtcgcctcatccaagcttcccattaactcccatggctcctcaatatcatggcacaaccccacaaacacgtgggtgtgagcacttttcagacccaggaggccaaaaaaatttaacattcattataagacacctagggcaagcattaatgccccacagaatccaaacccatgggtaaagggtgacataacgcgactctaacacccacatctttagaccaaagggtcggtgaattaccactatccactatcgatatagtaaaggaggaaataattggggcattccgacacaaactcgaacttagcatatgacccgtgggggctgtcatatcggaaaccctatgatagcctatttgactatgactcatgtccctaggagacaag

SEQ ID NO: 100502 - DNA, 313 bp, Zea Mays
tgggctggtaacatcggaggacgtccctaccgctgaagcagagcaagctgatgctgaggaaaccgagtctgaagatgattatagcagcgcggtgccgagcaaacccagccatctggatttcggaaaatccaccatctccgaaggtgacttagctaagatgttgaagttgggctatttaagtgaagaaaagaaagagctggtttgttttggtgaggaagaaactactccgaagccaaggaaagatgaagtagtgatctttaaaagtttctttaaagctggtttaagattccctttgaataagatgattgctgat

SEQ ID NO: 100503 - DNA, 553 bp, Zea Mays
caggtatgctcttgttatgatgaatatatggcacacaaaataaggagatcatctatattctcattgtatacacttttgggtattacaaatcctaccccccttataaagaatctcgtcctcgagatttaggaaggactagaaaagaggtggggaaaatctattcgtagttcttcttctctttcccatgtagcctcatcttctccatgatggctccattgtactttgcacatttttatcactttactccttgtgacacgggtcgaagtatcaagaattttgataggatattcagtataagtcagatcatcttggacagtaagatcctccataggtagctgctcttcgggtaccctaagacacttctccttgtgatacatggaagacatcatgtacatccatgagatgatcaggtagttccagttgatatgcaacctctcccactcgctttaggattaagaagggtccaatgaagcgaggggacaacttccctttaactttgaatcttctcataccctggattggtgacaccttcaaatatacgtgatcaccctcc

SEQ ID NO: 100504 - DNA, 642 bp, Zea Mays
atttgatgcagaaagatctcaaatgtcttcaaaacttcaaccaaaaatttacttaatgggaaccgaagacctgctttcatgaagcttctgtaaacaacaacttcatcttcctcgggtgcaggggcggcactgtctcccccaactctcacaatagacatatcacgaaaatatcttcccttcatggcatcaatctgactctgtttgatggacaactttccaaagatggtatgacttggtcgcaagggccgatcttcgtcatcttcattcccgctttccacatcgaagtcatcgctatcaccaaaatcctcagacagcctagctaatatttcattcgtaatcttttccgtgtttgtcttttccattgcttcgtaaaacccagatagggcagggtacacaatcttcttctccccagacatcttctcttcagacatatagcgagcacttgttcaaataatgaagcaaacaaatcaagcaaaatctgatagcaagaaatttcaagctcgaaacaatagcacaagcaattgaaaagcacaacaaatgctatcgttgtaggtttctatttatatgcctagcgcattgcaacttggcgggccccatttgtcattggctttcgctattctagcgaagggaaggtgttttttc

SEQ ID NO: 100505 - DNA, 338 bp, Zea Mays
ctttctacccggttggccatttggtgcggtaactgagaactagagcatttgtatccttgcgatacgcaaaattgtagcagccaaaattttcatgcagcctgtctgccctggccttcgtctggtagtgcaactcatgcactcggcagaatgcttcggcatctgggctcatcccttggcttcggagggcccagatgaagacactaagcctaacaatggcgttaggggtcagctgatgaagatatatttcgaaatttttcaagacttctcctatcatctcgttcaaaggaagtctttgaaaaaactcttaaaaaccactacttcatcatccttcggtgctg

SEQ ID NO: 100506 - DNA, 784 bp, Zea Mays
aagtactggcgctctacgttggtcgaaaccaaattcagggttgagtgaaggttttccccaagttaatttcaagaacggctaaccaaatgtttctggccacggtgagcgcgcggatgaactaacaacctacatgttcccggtgattcatgggatcctagctcaattggatgggttggtgagtatcgcagacgtatgtgaatgcttaaacaagggagcagaggacgggaactgaccggagtatggctggcgacggtgaggctcgtttcacggtggcggaaatcggatttgggggaaactccgaattcgcgaacctcagcaaacgattgcggttgattcgtggtggctggatagcttactaccctacggaggtcgaggaggggtcaatttatagtgttagcgggcggtggccgcgaatttcgagcaagacgcgcggcggccggagatggagaagagcactggcgcacgcgaattagtgtcctacgctgtggcaacctcaccggcgttgatttgacagcagtagcaagttacagcgacgcggtggaagggttgagccacgcggcgcacggccgggaggcggcggtcgacggtgagcactttaccgcgggcggtgagccaggggagatgggctacggctagtcggagtggtgtccaagtcatgggcggtgacgatcttttgacgccgcgaagttatccacatacccgagcacgaatcatgacgccggcgacgtgaatcacggcggaaagccaccggcggtgagatcttttctatggcggtcgagctgat

SEQ ID NO: 100507 - DNA, 615 bp, Zea Mays
caaacctcaggataaatcttgtgtctcttgtgttcttgctcattgtgtttgttcgtgttcttcgttctctcatcattccgtggaagatttgtttatatttttttggtgtgtggattttgagaagtgcccttgtcagatctactactttgaaccctgtggatcaactagaacatctcatttccaaagttaactgggtgaatttcaagatcaattcaatttatatctcattcttttgttgagctcgtgtaaaccggctgaattggttttgacaccggctggaccggttttacccagttcgtttctagtttttgttgaaaaagtttccgcttgcctattcaccccctctaggcaactttaacccacgcggaggccgccggacttcacaacatctcatcggtcgtgtccatcgttctggacccggtgtcctctcactaccctcgctagagagggcaggtcctcctcaccctgcggcgctacgccctcgaccatgtccttgatgacatcaccaccccgctgtccccgacctggtccctgatggacatcgtggtgctctcctggctccacgttctttgtaggttgggaccctaccgcctaaaagtcgcctagaggggggtg

SEQ ID NO: 100508 - DNA, 523 bp, Zea Mays
caaactgtaagtgaccatacctttcacaagctctaacaacatcagaaccagcatctggttcacatttgcgtgtctcaacatactgttcctctggtttgtaagcaacatcctgaagagacaaagaaagaagaaaggatcaagtaatagttgaatacactggtccgagaaatagtaaaaaaaggactgcaaccatctgaaccaaaatggccgagcaaacacacatgaaatttcagacaaatggactgttatcacaagctcacaaccaaatacacaattacatgtaggtttcctgaaaccaggctccttctagtgatgcaaagcacatcgaatgggtatcagaaccttccagagattctctaatcccgttcccaacccagtaccacgtccaatctttgtaaacgtgagcctactaaccatcacagtatttctggaaccaacacgttaaaagactgatggaacagccatcagaggcgaagctatattgagtttagggggtgcagatgcactgaaaatacaaaactag

SEQ ID NO: 100509 - DNA, 539 bp, Zea Mays
gcatcgtcgaccttggagggcagtcttccatgcagagatgctgatctgagtcatccgactcccataggggtggatgaaaggcattattcatccttagaggcgactactacagaagacccagcccctaagggtggcactagcggccacccaccctccaagggtgttgctggtagcgatccagctcttgtgtgtagtgcaaactatgatccagccctcgagggtgttcaggtgtgctctctttccaatgcctccatggatgtccatgtcgggttgtccccacctcggttcgacggagcggcgacagcacgtgtttccacagctttaactggacaagttgccttagaggtcggcgagctagatgcaaggagcctactttctgccgatggggctgaggtcaccctggatggtgctcttcagattgttccttctgaccttccctcgtcaagctatgcctcagctcctcctgccctgggtctaccactgttcctttccaatcttcaggtgagtcggtctctttctctatgttgtacattttagcg

SEQ ID NO: 100510 - DNA, 491 bp, Zea Mays
gggcaggatgccatagccccgttccagcgtgaacaggatcatatgcgggggagaaacggccctggccatcgattcggtgatgagcgctcacgattgattctcaaataccccatcatgatcgaaaatcatagccgttgatctcggatctgttgtccgagaccagatcgcgggatccattaatctcgagcgttggatcgggatatgaccgctgacactggatttcgattcacaactttgtggatctaatctcgggcgttaaaaatagattgaacggcccttggtgatggataccccttcgacctcgttaatttgctaaagagcccctcttttttatcagaatcaacccgccgcccaggggagtgtaaaagtaattcagtttaggccctagaaatttacaaattgatccttggagctagtaaaattagtattaagtgatcctaaatcttatttaatgcatatcttccacgttttaactccggattgacccgttc

SEQ ID NO: 100511 - DNA, 831 bp, Zea Mays
gcgtcgggttccttggacggggcagggagcttcgtttcgtcttcctgtggctgttgatcgccttcgagggagaaggggaccactcgcttggtggtaattcctcaccggaatttcatcgccgtcacataatcgcactgctccgtgagcagtcgactctactgctcggcgtccggtatgaacgcagcctttgcattctccgttaccctctcttgatttgtactcgctccgtaccccgataggacacctagatgcgggacctgggctcaccgtcggggcgccgccgcggctgaaatcacgtcaccgtggtatgagttgggagatagaagaaggctaggcgtcgtcggtttagtagtcaacggtgcagatcaatctaggaagtagcctttcgcagggggcgatctggtccattagatcataaatggacagccgcgaagtgatcctaacgttttaaatccaaaccgtcgatgtccgatctcgcggctgcgattgcataccggttcagtgtaatgtggctctaatctggagcgtagatcttagatcgggcggtcagaaacgctcgatacccccttcgcggtgcacttttgcataagagcccctcggtaagtaggaaatagaacccgccgtccaccctcactgcgctctgtgtctatagatttttaccgctgggcccctggacttcccagatattgacgcccagtccagagtagattaaaaatagagaaatgatattagaaattcgtttttaatacaaaaacaattctagaaacttgtttattccatagaaaattcatttttgctccaaattgaaccattctaatttctaaaattttg

SEQ ID NO: 100512 - DNA, 622 bp, Zea Mays
gaagccggtcagcaatcctttcaacccacaccataagatcactccttcttagattcttatccaagatcgacagtcccaaataactgcaaggaaaagactgtaacaccctgatgttattagaactaaaacttgagcatggcatcatatgcattgacatgtcattatgtttgttacacctagaatgcattcactaggctaaaacttcaacacaagttgtgatgtggtgatttgaagtgttcttaaccctagagtagggtacttaaccctgggattagggcatatgagtaaatgtgaagccaaattgagtagtacctcaaaagctattggaaatgttcacaagtgattaagttttatgggattgagtggcacaaaaaccctaaagcacccaaaaccctaaatggaaccctggaaaccctaatttgtgcctatatggtgattttaaattctaggcacttttggaccaaagtgtatatatcaaagtggtagaacatcaaaaaccaaacaacttttacattggaggattttcaagtgatgtggagcaaattggacttaattgcaaaaagcctcaagggcatctatgtggttaactctgaagaatcagtgtaattaggccaagtttgga

SEQ ID NO: 100513 - DNA, 365 bp, Zea Mays
aaagtgaagaatgaatcaatcgctctcaagctaaagcttctaaggaaattgaaaaagaagatagtgatgatgaagaaaatgaaagtgagagtgatggagatatggctctatttgtaaagaaattcaataaattcatgaagaagaagaggcaacctagaaagtgttttgagtgacatcgccgtgtagaagaggcaacctaggaagtcaacctagaagtggctctatttgtaaagaaattcaacaaattcatgaagaagaagaggcaacctagaaagtgttttgagtgacatcgccgtgtagaagaggcaacctaggaagtcaacctagaagaggccaaacatcaagaagaaatgctttcaatgata

SEQ ID NO: 100514 - DNA, 306 bp, Zea Mays
gttctgaccatcgatacggggtgggagcgctggtggctgccaccagtatctggcgatcattgagcttctgctgccttttgttctcttgcgacccgtgtccgtcgaagatgacgttgacttctccatcacgcgcgggaacgctccgcctcccccttcatgctgctgaggttgtcgaggttctgcgggtcctcctcatggtgggggaggtggtagaggttggaagggtcggccattcccgacggagtgcttgaagtctctgcagttccgaagggtatgacgcatatccttgtggtacgggcactgggc

SEQ ID NO: 100515 - DNA, 569 bp, Zea Mays
ttttcctctgcgtatatgtacttgtgcctgtgttttttttggtggtgggatcatggtataatgttggcaggttttccctcttgctactgtgcttgctctttgatcatgtgcttctgtcgtgttagtgccatggtgttgtgtttcttttgtatttgtgtagtcttagctccgaggcagagttacctcagttcccacgtgtggctttttgggagtcagttttcgtgtgttgttgacccctgcaggttactctattcaaagttctgaaagtttagcttattaggatatgcatctacctgtgcgttgaccgcaaacatctagctattgcgtgtaaggggtttctgcaaagagtaaaagggtttgcatataaatttggtggccaatttattatttcttaggctacaaacaacattggcttcggatggtgggtcttcttgaaggtgaaaccaaaatagtttgaatcaatggtttgaattatggttacacaataagcattagcacaaaacatattcagagattccctgcagtctggtcctcgcatacagtttagttgggtgagaaaaataaatttc

SEQ ID NO: 100516 - DNA, 762 bp, Zea Mays
caaaaaccaggattaattggaaatgacattgggcttttgagttttgacaggcaacaatattctgctcaattattcatgtgagaacctccaggtggttcggtgaacgatggtttcgttgagaagataatgctcaatgtaatccaaattaactttgacatactcgcagcaacgtcgtgtgcaggcttttgccctttggtatgtggccatgggtaacaaggacaaagggtgttttagctagctagctcgatcagagaagggccgggtaagcatgaatcggtgcttacctgcacgtactgcacagcaaaatccggtagtaacggatcgatgacataataacttatccacttttctaataaatgtgatgattgatgatgactaagatacctagctagctagccctcatttcagtggtctacgagagcagtctcaatcatccgtatcatctagtttctatatcattaatttatacaatttggtaacatagcaaaaaaaaaatgagaaagagaagaaaatggtttacttcatccgcctagtttctacctgtgaaacccacacatgtagacctaatttctcatctacatttattacgacaccataaaaaaatagtgttggaacttgtatttttccgtttgtataagtgatttttagggaggtggcagccatagaaattacttggtagtttctgggttgtgacggctctgatctgacctatccaggcagcaggttggatgaaccagtcgttaagtgcaatctaatcccaaa

SEQ ID NO: 100517 - DNA, 505 bp, Zea Mays
taaagcaaaagctaccaggctagaagatattgacgtactggaagaagagcgattgaatacagtaattcagtcagctagataccagcaaaccctaaggcgctatcatgataagactatacgacatcgatccttcgtagtgggagacttggtccttcgccgaattctaacgggagaaggacgacacaaattattgccgctatgggaagggccatttatggtgtcggaggtcactcggccaggatcatatcggcttactcaaatggatggcacggaagtggggaattcatggaatatagagcacctcaggaagttttacccttagcgagagctatcggagcaacgttctactctgtaattggaaaatacgtcatcaataaaaggtttcactctcgaaggcattcaaactattggttatcaattgacttcaacttggaatcaacacacttactcgacttagggtgaccactataccctactaacggagcaatcagcttaagtcggcaat

SEQ ID NO: 100518 - DNA, 670 bp, Zea Mays
cacggtcgccggggacggggaagtttgactgctggatctgaaggcggtccagggagggagagtttcgatcgactcaacaggtcagacatgccgtatagtggacagaggaatcggatataatctgacaagatttattatatacaaataacaatataatagtaatattaaaagcaagcgcttcagtgcgttggtgattagcgatttgtttaatctcaaagattccaaggcaaatttgtttgcacgcacagtgttgtgattgtcagattgtgattgtcaggaattgattttgttggtggttagggcatgtacaagagacctacgattttctaggtataagacgatctcccaagtcccacgtattctctatcttctatcttattacctatttcaaatccgtctctgcaaacattatcaaacaatatatctacagttatgtatcctctattttgcacgctctactgaagacagttaagagatagcacgatacaactatgagtctataaataattaatgcgacaaaatacaatatacatagagagtcgtaaatagacaaactcttgtttttcacttagccccctatagactcatcaagagatccctcatttaattgagttgtacatgtccttagagcaagtttaataatacgatctgctactggctgcaaaccaat

SEQ ID NO: 100519 - DNA, 453 bp, Zea Mays
atattttccaagcattacaaatttgtgattggtgattatgtatttggaatccttcaagactccataaataccataatccagtgaccacatatgcatatgttgtcactacatctatcaactgcatagatagatgatttactgcccatattattgtatcggaattttactactcacagtaggggagaatttatagcattaaaataatgcttgggtttgcgtataaacctagttgctactagccatgctttctcaccacctcattgtttccaagtccacgaaaacaaacatgtatccacagtaagataccttgaagtgaaaataagttaacacttatttccggtgagcaaggctatctctgcaacattgtatcactcaacaagatccagtgtgagcatactcatgctctgctatggccatagtcttttggatcacttggagtgcatatacaattgc

SEQ ID NO: 100520 - DNA, 596 bp, Zea Mays
ctctattcgggtcaccaacaagaaaattcctactgaggatctggtgagccgactagacatgatcctgaggggcaagatatcaaatgttggtgctcctgttgcctattctgcttagaatctgccacctcataggtaatttttcaatttcgtgaccaaccctcctactagtgatggtggtctgggtcttagagtgcgaccctctcccgaggacattgaggctctggttgctcccctttgtgatcttcccagtgatgagagacagattcactttgagatgccagcaagtccagatgatgcagaaatagatgttgtactcaatgtgttggctgaagaatcttctgactcgacccatgctgaaccgatggctatcacggttggacaagagcttaacaaaacagtggagacctgaaagcatgagggtacccacccaaagggtcctcgccaagttagccgtctgactgcacctgttgaggaaaagaagaagaggcggcttcggcgactgtcatgcttggaccaggatgtcggtccttctgctccggtttgcaatgaagtgccagcagaggtcctttttaaggttgatcccaatcatggcgccc

SEQ ID NO: 100521 - DNA, 320 bp, Zea Mays
ctttatctcacatattaggaaatcgaccacatcgaacacaaagtgagataccagagcaccaaggagccggagctgaatatgtgtggtggccactctgtatcccatcctcggtagcagggtgcgcctcatgagctcatataaaaacttcaccgctggggttaagtcagcaggagaacgtcgagacccgtctgtgaatggaggtctgaacatagcggcgacgtgagcggtgccaggagctactccaccatgaggacgacgaggagggtctgaggtaccatagcacatgttgtgaagcctcatcgtcgactcagggaatccaa

SEQ ID NO: 100522 - DNA, 367 bp, Zea Mays
cttgtgggagggggataacctggcatccatgcatcacacagggaagggggtgaagaggtggaaactctatcctaactgctgactgtgcagtgtgtctgttgggtgttggcacacatgcagtgaactgaatcacatagttcctgtgctttgcctcgacgtggtaaccatgcagcaaaggagtagtacttgttagctcatagttacctctgtgttgagtccagttaagccacccgaggtctagtttccttttggacttcatgttggggtagttaaatcctcactgtgccttgtcaagtccagtgacttccagggctggttctttgtgtcctgccactccttcacacctgtattcactctccaatcatcc

SEQ ID NO: 100523 - DNA, 422 bp, Zea Mays
cacacgggtcggcctcccagtctagatcctacaggttctgttgcgtaagtcaaaggatgaaggatacccgttaatgggtccgatgggtgcactactgaaactccctaactaaggctgtgtgcaggtccgggtcccagtcgaaataccctcctaggggccaggtcgccaactctttcttaaacatactggcatccagccttgacaagtcgagaccacatcctagaggggtcaagtaccagggaagaagttgacaacaacacacatagcaaaggcatgcagataagttgtaatgttgcttgacaagtagtacttaaaagtatcttacaaaatatgataagccgcttcccagcggaacccttgctttctctccgcagatccgactactcatcatcagcgggatctcgctggaagcgcttggccac

SEQ ID NO: 100524 - DNA, 1233 bp, Zea Mays
gaacaactagaaatatcaggtgcaaattgatctgcgcaagaggaaacaatcaagggagggatgggagggaatttttgtgtatgtttcaaagagaaaatgaagatcagatcaaagggtaagatcataatgacatggaggaaaaaaacgaaattcagatcagcaaaaagtcaagtttcagaggattgaaaactcgataatgcaaactacgaatcagctgcacaagtgaaaggcaataggtatatatataaattttttgcggctatttgtggactgtaggtatataaaaatctatcctaccaaaagcaagaatgatcctaccgagtcaaccgaggctttgataccagatgatgtgcgcacgcgtacaggttacgcgggagcaattgtttgtggcccgatcttctcgaaggattttcgaaacttgataaatatcgttgcgtgacctgacgaagaggctgcgcaccgcgagatcttgcacacacgacgaacaaccgagacaatcgcccttccacgtaccgatgaagctagcccacgcaatcacgccatatagacgtgaaggcacaaactgggtgaaccgcagttcggtgttctacaactccctcgggaattgaaagaacaagtccgcaagtctctcaagactcacgttgagaacacaaagagtttgtatttctgaattggcagccaaaaagatccactcgtcatctattacatggatacatatagcactagtggtgttttcagtttagataaaataaatgggaacacacagtgggaagttgtagcactccttctattaatagcctggcctaatggaactctttggatggttgatactcttctgcatgcttgtacgtgtgtggacatcaacctggttgctgactgccttcttaactcacaaatttatttgtgatccacggttgatctacatggtagctgaatggtctatccttctccctttattctcacaagcatgtccaagcaccaagctatcattattcttctaagtttcacactgcaataccagcatgtcacagagagagctgatcatcacaatgttggaaggcaaaatccatcatcgtcccatgaacttgggtacacgccatcattcctaagaatattcaaacaacaacttgaaagcactgactgatctagatcgttgtgattaattaaaataaggttagcattcacctgagaataaatttccttctctagttgtttagctcgcattcttgtaac

SEQ ID NO: 100525 - DNA, 737 bp, Zea Mays
ggttagttcagttggtggaaggacccaaactgatagattttgccctagtgcaaaggttcaaataagggggatagagttccccattgatttaatagttatgggtaaccaagatacaactatagatgtcatcctagggatgaattggttaaccaaatatcaagctagtcttagctgtgacaagagaacagtgaagctagtgtccctatcaggagaagaagtgttagtagagttggccttgtgaggaccaaggaaagggagttgtcaccaagtcaccgctcatattgaggagattaaaccatcagaggctatcagtgtagtatcagatttcccagatgtgtttcccgaggagttaccaggtatgtcacctgaaagaaaggttgaatttgccatagagcttattccaggcaccacccctatttccaagagagcctatcgagtgtccggtccagagttggtagaactcaaaagcagattaatgaattgtcagaaaaaggctacatcagaccgagtacctcaccttgggcagccccagtgctatttgtggaaaagacggatggcacaaagaggatgtgcattgactacagatccctgaatgaggttactatcaagaacatgtaccccctacccagaattgaagatttattcgatcagttgagaggagccagtgtgttctcgaagatagatctgaggtcaggctaccatcagcttagaatccgacctttggatataccaaagac

SEQ ID NO: 100526 - DNA, 510 bp, Zea Mays
ctcctttctacctactgttcccccaatcacatgccactccccacaggaatacctacccaaattgtcgtctcccaatcaatgcccttctcgttgcccctaaaccctaccccagccctacccctggagtcactcgtgcactattgtgactgtgatgccgccatcggcagtttatagcatcgcgagccaaaaccctagtcgctgcttgtagctctcgattccaaagggtggtaggagagataagggtcgactcgttgtagatggagcccacgagggggcacaaggagtggcacattgtccctagcttctcgctctactccaattttgttgaggtaggcccacatcatcgctcccccacagcacaaaaccctcgctcctcccaccaaccgtcggtactcactacccaactcactccctgttgttgcgtgttcaagatgccgtggagcatgagaagccggggcaactggaggatcgagctatctacgaggtgtgtgcggttccttgcttgcttgc

SEQ ID NO: 100527 - DNA, 935 bp, Zea Mays
cttgtactctatccactttgtgaatttgtcaatggcaactagtacatgagtatagcctccccgagctttcttgaaaggtccgatcatgtccagcccctagcatgcaaacgaccatgttacaggaatggtctgcagctgctacgcaggcaagtgttgttgcttcgataggaattggcatgcttcacacttctggactaaatcagtagcatcgattttcgccgttgaccaatagaaaccggatctaaaagcctttccgactagagtccttgacgctgcatgtattccacactgcctggcatggatttcatccaacaattgcctcccagcaactaaatgaatgcatttcatgaggactcctgttgcacctcttctgtacattaggccccctatgatggtgtaatgggtcgactgcctcacgatgcgctcagctgcagccttgtcatccggctcttcttcattttttatatatctgatgctaggctatctctagtagttggggtttgactctggttggctcaaggtgttgcactcttccgcctgacctgaaagaatgcttggtcatgatatttcttggacgaagattctgggtggggcctgggcccgactggatcccagtttcgacaacgcgtctgctgctgtgttgcggtctctttccacatgatggaattctaatcctttgaatttgtcctctagttttcgcacaaccgcgcagtacttgcccatggagtcagtcgagcagtcccattctttatttatctggcttatgaccactagcgaatcaccatataccatcagtttcttgatgtcgagtgatacagcgatgcctaacccgtggatcagtgcttcatactctgctgcattatttgatgctggaaatagtagctagagtgcatacttgagttgttctactccaagagcaataaagagaatccctg

SEQ ID NO: 100528 - DNA, 865 bp, Zea Mays
cggtgttctacactttcgtccgtaaagtgcctcaaatggtgccatttttagacttgcctgataactgttgttatacgagaattctgcataatgcaaacttttatcccagcttctaccatgctttagagcgcaagctcttagcatatcttccaacacttggtttgttctttctgtttgcccatccgtttgcggatgataagctgaaataaagtttagcttggtatccatggactcatgtagtcttttccaaaagcgcgaggtaaactgggttcctcgatctgatacgatcttcttcggtactccatgcagacaaacaatcctcgacatgtataactctgccaactgggctccagagtaagttgtcttcacaggtataaagtgtgccactttagtcaacttgtctactatgactcatattgaatcatagccatcccgagtatggggtagtccaactatgaaatccatatcgatttcttcccatttccattccggtaccttgagaggttgtagcaatcctgctggtctttggtgttcgactttaactcgctgacacacgtcgcacaatgcaacatgagtagcaacatcccttttcaaaccgtaccaccaatacttttcctttagatcctggtacatctttgtactcccagggtgaatagagtaagccgaatcatgagcttctctcaaaataagttggcgaaggtgttcgatttccggtacacagattctctttttaaaccatactgtgccttgatcatcttccgtgaaatctagggctttacccaacccaatcaaagttttaatttccttaattttctcatcagcttcttgtcctttacgaatctcttgttccaaagtagattcaact

SEQ ID NO: 100529 - DNA, 528 bp, Zea Mays
cggccgagtccttttgagccatgtcagcgtttttagggataatggccaagagattactggtgatgtcggcgtattagaaataacaaccgagtgataacgggtcacgtcagtgttttagaaataacgaccgagtggatactggtaacgacagccgttttagaaatagcggctgagttatattgggccacatcgacgttttggaaacaacagccaagtgatgactaggcacgtcagcgttttagaaataacagctgagttatattgggccacgttggcgttttggaaataacggccgagtggtgactgggcactttttagaaatggtgtctggcccgggaaaaccccatttgtaccgcgccgtcgcatgcctttgcattccaagccctagccctgcttttctgcttccagaccttctttgtttccctgtgatatcgcttccgctcagttccccgacgagattgagatggctcccaagcggaaaagtcagaattcctccactgcgatcattcctcccatcgatcccaacaa

SEQ ID NO: 100530 - DNA, 766 bp, Zea Mays
gaagaacacgggcgttcacggcaacccagggtggtctagctcaatcaagggagtcatgaagcatgaggaggacctaaggacgctagaacaatcgaccagagcgcttgaacgaacctggaataagctggccgcggtgagggtgtctctgcggtggcggaaacttagtttgggggaaatccaaaattggagctctcgggtatacgattgaaggcacagtttgggtggcttggtgcttgactatcctacgaagctcacggtggcctcaatttatagtaggcaagagtggtggccattgaatcagacgacgacgcgcagcagtcggaggagtgggaggtcactagcgcaaggaattcgtggcatctaccgcggcagccctcaccggcgatgatcagacggccaaagtgagtcacgacgatgtggtgaatgtgcctaggtacgtggcgcaaggccgtgaatcggctgtcaccggcgagctcatccgaagcggccgtggcaacacggtacggtggccggagtaaactattggttggaagatatctacgacgacgatatttactcaaccccgagcgttatccagtcgatccgatcacgaatcacggcggcgagggcacgaatctacgcgcggctcgtcggcggcgaggttctctgaacctgttccccccgttcactgtaccatggcgcaacttcttcagttgacctgacagcctgatttacagggcttgaatctccatttttcatgtaatgacttgataatcttcctttaaag

SEQ ID NO: 100531 - DNA, 366 bp, Zea Mays
cactcatgttccatttccaccggttgctgcgccgtcttggcttttcagtagccctggcatttgactactagtgctagctactagtttcttcactcgccttacaaagttacaagtgacctcgacaaagtgttactggtagtttagtttctggaaaagcttgttctcttgttggatgattgatgacaatttgataaggctgtaccttctggcttcagattttcttcatggcatattgtatgagctggatggagcgctcggtattggctaagctaaccaagccaaggagccaagccgattagtgttttaaggatggagccaaacgtgtttgctataagattagaccacctaatttggagggaggagttt

SEQ ID NO: 100532 - DNA, 325 bp, Zea Mays
acagaagcacaggaagctctagaagcactaaaaaagttcctgactacgccaccagtactcaagccaccacgccgagccacgccgaatcagccgacagaagatctgttgttatacatctcctgcacgactcacgtggtgagcaccgcgttagtagtcaagcgggtggaggaaggacatacatatccagtacaacatccagtctacttcatcagcaaggttctcggaccctctaaaatgaagtatccccaagttcagaaactactatacgcggtacttctaaccgctcgcaagctccgtcactactttgacgaccacaaagtcatag

SEQ ID NO: 100533 - DNA, 1200 bp, Zea Mays
gctacatgacctttttgctataaaattatctgtggtaagaaccgatataacaacaacaaaaaatatcgtaacaaatgatgttgcaacaagaagaaaaggttgcgactactgaagtcccaacgaaatagatccatggtaattacatcttattgcaacaaaaaaatcattgcaactgaaccatacaacaaccaataaaaccgttgcatttacatatattcaaacccacaatttatacgacaatgcattttgcatttctattgggtataaaatgttatgcaaaagaattatattttacatcagtaacgtaagaaccaaaattgacaaccataatatttgtctcttatctcatatattaactatatccataccataagttgtaacaaataggttgcaccaaataaatagtggccaaatacaaattaatttgataacatagctcacagtcacaacatcctcatactagcttggattgtgataacatagataataaactactcaggactagcaaattattggaagtttttttgtcatcgtgtacccctccatcccctccattgatgcaagcgatggttagctaggctgacgacgatatcacgacgacaaggaacctgttggaagtgttcaaaacaataattagtaaagctacaataacttggttaatcattagtggaagactacaactgtagtgcctacagctacagctacaacacaactcctagcaagcagcatcagcagcaaccatcagcaagcagcaagcagcaacatgcagcatgcaacaacaacaacacgcacctagcagcggcaagcaacaaacagtagcaaccatcagcaagcagcaagtagcaacacgcagcatgcagcaagcagcaacaacaacacgcagcagcacgcagctagcagcggcaagcaacaaacagtagcacgcagcaaataggaagcacgcagtagcaagcgttctactctatctctaccagagaaggcagctgcagcaccagcctaacaagagcgaaaacaggctaccaaataagcatgctgcacagagccacaaacatgtgtactgctcctatggttaactaaaatctgtttaggctactaaaatccattgcatgcacaactacaaaagaaataaaaaaaagattgtggacataccttaaacacactttgatagagcttcttaagttgatctaccttgcttctcgc

SEQ ID NO: 100534 - DNA, 831 bp, Zea Mays
atatgtgatgggagtttgtctgtgagatcatcagattgggtgttggaccattatacaattggctaagtggtttagctctaaatatctagtgggggtgttgggaagataaaaaacctttataaataagaggagggttgcttacaactaagtatctctctagcttctatcttagtgcttagttttcatattttctctcttgcaattgagatccagagatgttttattatagatatttttatatgtgtatctttaatcacggtggttcatggtaaactaaagtccactcttatgtatctttaatgactttaagttcttgtcttgaattttccttccacaactcttctattttgatcttttgtgtgatcttttgaatttgagttcatggggacatttgggttggatagaaatgtgcaagaactcttaggatcattgccaccaagtggtttgatctgattcaactgcagtacagaattccaacccattaaccaatttttgagaaaaccccaatatgcatttgcatttttttaatcttagactgaatttgatatatttttagctcaaattttatagatgcttttgaaattcactttgtgaatgtgtgtgcaaaacttcagctcaaacatagttcatatggttgattttgccttttggagctttgatttagggtggtgagaataggttgaacgatctactaggcaagaagtgttgggctctgctcattagtttttcacaagaagcaacactatcgcactaatctgggtaggtcactattttggccactttcataattttaggtgtctgcttccttgggcttgtgtgtgctctaggaag

SEQ ID NO: 100535 - DNA, 1341 bp, Zea Mays
ggcagggcagagaagcggcggtgcagggaattgagaagaagaggatgagtcagttgttgtttgtctgtgacctccgactgaaggacgtctgccctttatagacgggtcgccataatccgttgattcgatctgctaaattctaggaaccggcccctggaatatctctacatgcaaccgtccggagatctcgcacgttgtccattactcctagttgatgtgacagtctaggtgtgatatttgataaccaaaataaacaaaagacaaaaattaaagtgtcgtttaggatggcagggcagagaagcggcggtgcagggaattgagaagaagaggatgagtcagttgctgtttgcctgtgacctccgactgaaggacgtctgccctttatagacgggtcgccataatccgttgattcgatctgctaaattctaggaaccggcccctggaatatctctacatgcaaccgtccggagatctcgcacgttgtccattactcctagttgatgtgacagtctaggtgtgatatttgataaccaaaataaacaaaagacaaaaattaaagtgtcgtttaggatggcagggcagagaagcggcggtgcagggaattgagaagaagaggatgagtcagttgttgtttgcctgtgacctccgactgaaggacgtctgccctttatagatgggtcgccataatccgttgattcgatctgctaaattctaggaaccggcccccggaatatctctacatgcaaccgtccggagatctcgcacgttgtccattactcctagttgatgtgacagtctaggtgtgatatttgataaccaaaataaacaaaagacaaaaattaaagtgtcgtttaggatggcagggcagagaagcggcggtgcagggaattgagaataagaggatgagtcagttgttgttcgcctgtgacctccgactgaaggacgtctgccctttatagacgggtcgccataatcccttgattcgatctactaaattctaggaactggcccctggaatatctctacatgcaactgttcggagatctcgcacgttgtccattactcctagttgatgtgacaatctaggtgtaatatttgataaccaaataaataaaaggcaaaaattaaagtgccatttaggatggcagggcagagaagcggcggtgcagggaattgagaagaagaggatgagtcggttgctgttcgcctgtgacctacgactgaaggacgtctgcactttatagacgggccgccgcaaccccttgattcgatctgctaaattctaggaatcgtcccctagaatatctctacgtgcaagcgtccggagatctcacatttaac

SEQ ID NO: 100536 - DNA, 339 bp, Zea Mays
gaaatgaatgcaccacactgcgaagaggaaggttggagtttagcttgtatcggtcaggacgatcgcatcacatttggcacctcggtgagtaatgtatttgtgatgctctttagtttgttccaagtatgtagtgattatgagtttgttttgtagggaaattgtaatcaagtggatatgttgattgggattcaattgaagttgaagataggtggaccgaggaaggtagccagaatgttactagtgaacgagcattgtatatcctactaggtttgcataatgaggatgattttgaatttgatcaaaggggggaagaatcagctcgtaatgttggagggagta

SEQ ID NO: 100537 - DNA, 476 bp, Zea Mays
gcatgacatttgaaatatctggtatgagcggtgtgggcatctacaccgccactgacatttctataggatgacaaaccgacatcaacataacttccataaaataggatggggcttccataaaaggaggacaatatatgcatcaggactgaccacacgtaccatatgtaaccctctccatcttggtctataaaagggagagggaggcctccctaggaggcaggcaacctgagggacaacacatgccaactcaaacaactccacacatttctacttaggctctagctagccaactataatatgacttaactaatctcttgcaatccaatccatctgaggaggacatagggtattacgcctcagcggtctgaacctctaaaaaaccctagttccctaaccgtgtccaaagtgttgtcgtagctatcctttgcaacctgtgccatggtagatagtaaaatagcacaccaagagccccttgc

SEQ ID NO: 100538 - DNA, 383 bp, Zea Mays
ctttgttgttgcttatttagtatactttaatgtttataattggcccaagccatgattctaaatttttcatactcttttccccattttcttgaattttgtttatagggctcaattagggtttttgttagggttgcacattttgcctttttgaaaagcccatttgttttgaacatgatgcttttaagtataagcttagtgggttctttattcttaaatcaacttgatgttcatgctcaattttggctcacataagatgctggttcttgggttagcacttgagagaaaccctaggtgacactggggagtcacagccttcccccttaaaggaatctcatcccgagattcgggtcagagtcctcctagggtgaagcgaagggtgagac

SEQ ID NO: 100539 - DNA, 586 bp, Zea Mays
tgatattgctacttcaagtaaaaactaaagatatgatatctctatgtaaaatagagaaatttattgctcatggttgctcaagtctatataatcagagcccccacaacaatttattgctcatggttgctcaagtctatataatcagagccccacaaccagaaagcatacaagcgtcatcaaggcactaagtatcctctacttgaaaaaagccatccctagagctccatggcgttctcgaagaagactcttgttgttctcgttgttccaatattgttagctcttcttgcttcgaccatgccagcaagccaaggcggtcgagccctcttaggaggggaacaatgctccacgtctaacaattgcaatgagcagttgtgtggagcaacatgtgccgtcttaggggagaatgctattgggatatgcaaggttgttggagggatctcctcctgttgttgtgtcccaaaaccatccacatccttcaacaaccaactctagctggttcacagattcatcattgttctcattcaatattgagaatgtcacgttttgttagaaaaaataatatgtattgtaagggacaagatgtgtg

SEQ ID NO: 100540 - DNA, 663 bp, Zea Mays
aactaatctataaatgccttagagcccattaccctttcacctggtagacatactctactgtgttaaaacacgttccccgctcaccgaagcaaccctacacaggtaccttgggtgccctggtatcattaccatgacagtcacccacaaactttctagatgatcaccacactcctaatcgccatcgaaccatctggtgatgccaatcaccaagagtaacaagcactagactcttacttgatcatgacaagcttaatgtaagtggtggctgcacacaagtctctctctctacgcactaatgaggttgctaatcacaagattatcacttctctaatcttctcactatgcaaatagtcttcctttctctcaagaggttgtttcagctattggaagggtcaaaacacctcaagaagctaaaatggagggtataaatagccctaaagactcaaacaagccattacaactccactctacattcttgggggcatcaaacatgtctggtgccaactttccaactaaaccggatatgtcggtacctctccaacgactagtttctcaaattagtcgttgttgtgactcacattttgtgccaacactggtgctacatcgaacatgttcggtgagtacaactcaaaacgacatagtaaataagctctctaaatttcg

SEQ ID NO: 100541 - DNA, 608 bp, Zea Mays
tgcaaaagtgcggtcgcgaaggggtaccattgattttcagccgtccgattagaggcgagcgacccagatttaatctgctccgcggatgcactgacaagcgcccccaaacgctcagatcccgatccgacggtcccagatacgtttacatgaaagggtacactagatctaatcggagccgttcgtgtcccgattaacggtcaccgattcgtcccttccctccgacaagaccaagcacggcggcggtcgactccgcggccgcgctccccaccagaggtggtcaccggcgattcccagccccaaatctatctcctgactagtgctgcatgtgtggaaaatccatgtgaattaagtggggtgctccataccgcgaatcgacgctgggtcggcaacggccacggtgaaacacgagctcggcggagaactccactctggcgaggaattccgggtcacccagtggttcgattcctccgcgacggtagtagacagctccctggagacgcggcgaagctcctcacacaggcgtactatacccagcgcggcaacaatgcagattaggtctcggcggcggaattctcgtctcccagctaatggcgcgtggctgctgcgac

SEQ ID NO: 100542 - DNA, 677 bp, Zea Mays
ttgttacaaatagattaagtagttgccacacgaaaatcacagatcaaggccctgcaaatcactctgtcaggcgctctaatggggattctgatggtacagtgcttgaagaagatcttaggtgcagtgcacctcgccgccggtgaccccgcgctttgattcacgccagccgccacgattcgtgctcagcgcgaagtggataaccgaggggagtaaaagatcttggcacccggattggctcggacccagtcactggatggttgatcgtacccacttgcctagcggccggtccagatgacttcaccggagtctgccgcttgctgcccagatgccacgtactgagaagtgttaccacgtcacagtaaactgccttaggtagcttgttcatcgcctaagacactgccccagtgaaagccacgacaacttgcaccagtgaacttcccctctctccggccgccagcgccttcttcaaattggacaccaccgctgatagattctataaattgctgccccagtaagctccgttaagttattacgcacccagtgaaccagtcctcacctcgaatcgttcaacatagctcctcaatttggaatttcccccaaatcgggttttctgcgccgccgagagtctctcaccgtggccagccctcctcaggttggttcatgcttctttgttggct

SEQ ID NO: 100543 - DNA, 525 bp, Zea Mays
gttgcatgcatgcactgaacccacaccatccacaatgcaagcaagcatatttccctgttgacctcctagtcctagctagctagcttttccagcattgcttagcctggtagttaaactaaacattaattcatcagatgtactggttcgtacggcactagatctgatactatatatataatttacaattgttaattaagtgctctgctgatgagcgcgctagctatataggtgtgggtcatcaaatcaaagcaattaattaatcaacagagctccatccgatccgtacctactagcaataaaataaacctcctgatgaaaccaaagagagagatcatatatatatgtcagagatcgattattattcaggtcaaccgacaaaactagtgttcaagttcagacctcttgtgtatagcgagctaagatttgactttttgggtctgtgcgtggtggttaatgttgtggcatagtactcgatcaatgtttgtcatcatcagaagccaattgattccagcaaaatgacaatac

SEQ ID NO: 100544 - DNA, 417 bp, Zea Mays
gaagtttgcctccctgaacagctgctcggaggtagtcggcgccttttgcagtatggctcggacgaaggccaagtcattagatcctcggtagaagtcctcaattactgctgcttccgcaacctcgggatacgatttctcatggtctgaaaccttttgaggtacgaccggagagtctcatcccctcggcgcttgatggatttgaggtcccatggctgcgccggtttgtcggagagagattggaagttggcgatgaagcgccgactaaagtcgctccaatcgtcgatgaagtgtcggggtagcgcatcttgcccaaggacgatgggcaagtatgcagtcatcacatcttcagttgccccagcggctcggacagcggtggtatagacaaccaaccagcctcccgggtcctgcttaggctcg

SEQ ID NO: 100545 - DNA, 525 bp, Zea Mays
aattaatttggagctaggatggattaaatatgaatttcacaagtttattaatttatttgtgtactaaaaatcaatttctataagtatttatctaatttctttgttctgtgggccgagcactaaatacagagaaccaccggggcagaaccagaaatttttcccagactcagggagcgcctgggatggactgcgggtttattcctgaaatccccaggatctcttacgaaaatatgccagggcgaaagggtatcgtctaaatctggtcgttgggtcttgcgcggatggtgcggattagatcgaactgccagcgaagcggtacgcgttcctggccacaggatccaagatctactgtcacaggttcatcgcatcccaattccacctagtcgtccgaccgtgaaccgaccgccgagataaactccgcgaaggggtacgtgctcattctaatctccaccctcgctcacggatccgacggctgacataggctcccatccctattcccctcaacggctcaaagggtcactggag

SEQ ID NO: 100546 - DNA, 344 bp, Zea Mays
cggcgatggcgtccaccgcggctgggatggcgcgggtgcgctcggttttggaggaagacgatggtcacttagccgtttgatcaggcactaacggctgggatcggaacatatagccaattggttagatcaaatctgcaccatagatgtagatgcgcacgactctgattagatcaagtagaggtcgggttggggacgtgtgtgggtcgtcgattccttgatggacacccctgatatgttgtcgcgtgtcacttagcatggtcaatccaagcccttggatcatgatcgggcagatccgacagagtctcagtcacttaaaatcgttaccctcgagttggggatgctcg

SEQ ID NO: 100547 - DNA, 424 bp, Zea Mays
cttaacaggatgctcggaataagttaaatatggttccagagtaacatcagaagtttctaccactttgttaggcacttgaaggcatttctttagttgggatacgtgaaatacattatgtatggccgaaagatgttcatgcagcttcactttgtaagccacagatccacactgtgctagtatttcaaaaggaccaacatactgtggtgccagctttcccttgatgccaaaacgagttactcccttcatagttgaaactttcagatacacaaaatcgccaacatggaaatacaagggtcatcttctcttatctgcataccgtttgtgatgatgttgcgcaatcttcaaacggtgttgaataagtttcactttctcttccgcctcctttactaaatctgacccaaagaaaaattgctcaccgggtcct

SEQ ID NO: 100548 - DNA, 874 bp, Zea Mays
atgctgggcaatgtggaatacacgcagtgtacaagacactagtcgggaaggtcttcaggtcaggattctattggccaacagcgaagagtgacgcagccgagttagttcagaggtgcgaagcttgccagtacttgtcaaagcaacatctaccagcacagcaactgcagaccataccagtgacttggcccttcgcatgctggggactggatatgattggacctttcaagaaagctcaaggaggatacactcacgtactggtagcaatcgacaaattcactaaatggatagagttcaaacccattgcttctttaacctcagctaaggccgtggaattcatacaagacataatattcagattcgggataccaaacagcatcataactgacctaggatccaacttcacaagttcagaattcttcgatttctgcgagcaaaaaacattcagatcaagtatgcttctgtagcacacccaagagccaacgggcaggttgaacgagctaacgggatgatattggaggcactcaggaaaaaggtcttcgataagaatgaaaagttcgcgggaaagtcgataagggaattgccctatgtcgtctggagcctaagaacccagcctagccgagctctgcatggaaacactcctttcttcatggtctatgggtcagaggcagtgttacccgccgatctcaagttcggggcgccaaggctgatcttcgaaaccatagcagaagccgaagccactaggatggaggacattgatgtgctcgaggaagaacggctgaatgcagtaatccaattagcacgataccagcagactctaaggcgctatcacgacaaggtcgtgcgacaacgatccttctcagtaggagatcttgtc

SEQ ID NO: 100549 - DNA, 327 bp, Zea Mays
attttcatgatgtgtctatagtgagggctgggggagaggacaccgttccgctgccagaaagcgatgaagtggtagtcttcaggagcttcatgaaggctaggctttgtttcctacttcataagatgctagtcgatgttttgaagacatttgagatataccttcatcagattaccctcgaagctcttattaaagtgggggttttatctgggccatgaggagccaaggactggaaccggatgcaagatgcttttgcaatattcatgagttgtcttatgagacgaaggcaagtggaaaggaacagtatcataataattttggttgttacag

SEQ ID NO: 100550 - DNA, 514 bp, Zea Mays
gatatgtgttcctgagattgatagccttcgtgagactatattgaaggaggcccatgactctgattattctagtcatcctggtagcattaagatgtatcagtatttgaagcagaagtactggtggtatgggctgaagagagatgtggctgcacacgtggctatgtgtgatgtgtgtcaaagagttaaggccgaacaccaaagaccagctggactattgcacccattaaagatacccgaatggaagtgggaagagattggtatggatttcattactaggttgcctcgcaccccgaaaggatatgattttatatgggtgattgtggatagactgaccaaagtggctcatttcattccggtcaagactacttataaaggctctcagctggcagagttatatatggctcagattgtgtgtttacacggagtaccaaagaagatcgtgtctgatcgaggttcacagtttacctctagattttggaaaagttttcatgagaagctggatacgaagttgaat

SEQ ID NO: 100551 - DNA, 795 bp, Zea Mays
tgatgtgctccgaccatcgatacggggctagggcgctgttggtggccaccaggtccttccggtcggtgtgcttctgttgcctcccattttcctgcacccagtgtcccccgaagataaagctatcttctctatcaatgcgtggaaacgccccaccaccccctccaccctgctactaacactgtctcggctcaggggggctctccctcgtggaggggaaggtggtagcgcttggaacggtcggccatgcccgacgaagttcttgaagtcccgacaatttcattgagtgtggcacatctccttgtgatacaggcactaggagtcgaggatctcatccagtgttcgtatctcgccatagggcgcaacgtaggtcctagtagccggcggccctacggtgtgcacttcttctcgaggcctcttgttgcagcgcttgtttagttgttggttcatgccttcctgggtgctagaagtgtgggctttgctctcccaatgaggtcttgggcttgctcgtccacggtgatgtagatgtacgcctctcggaacagttgttacgaggttatgggtgccttctggaggatggctcagacgaaggctgagtcgttggatccacgatagaagtcatcgataacggcgctcctccgcgacttcaggaatgcggttcctcatggtttggaatctcctgagaaatgagcagagggtctcgtcgctctggcgcttgacagatttgaggtcccatggttgcgccggcttgtcggaaagggattggaaattcacgacaaaccgacggctgaaatcttc

SEQ ID NO: 100552 - DNA, 538 bp, Zea Mays
ctctaggcgactttcataaactcgttcctcgctgtccataaaccatcatccatgaatggggtactactaaattcttgtgatgcttttcttattcttaggaagttgggatatgaaccagattggagggagagcaatcacgacaagatagcaagtgtggatgatctgatcggaccataccagtttggaccttcaggaggggcaacttcagaaggccataactcttagctccgaatattgtttgaggcccatgagtacttgttggaaagctcctgaagtctactttcaaatggattcaatctcaagacgaaattccaaaggagttaagcagaattgccaaaatgacgttcaatcttccaatcttgggttgaggcccttgtatctagttcagaccactaggggccattctaagttagggtttacacccccacgcctcttggctgctcccccacctatctaaaccaccagaagccaccatttgagacttgggttttgtttggttgtaagtttatgtgctgctacattcttgcaaacgcgtgtg

SEQ ID NO: 100553 - DNA, 395 bp, Zea Mays
ttccacgtacccatgagtttaactggacatgaattccctaccaatatgattgttataaaggggcaagacgtagatgtgattctgggtatgaattggttagcccaaaacaaggctattatcaatgctgatcagaggactattcagctaagttatggacaaaaagaagtcaagttgtccatccctgtatttgtctccgttaaagtatctggacaagtttttgaagccatagtgcaatagatacaagacatcccggttgtgtgtgagtttttggatgtattcctgaagatttgcccggactacctccggagagggatgtggagtttgtgattgaactataacccggtacgactccctatttctagaagatcgtatcgtatgtctcccaatgagttggc

SEQ ID NO: 100554 - DNA, 414 bp, Zea Mays
tttagattgttcctgctgatcttccttcgtcgagccatgacacagctcctcctgccttgggtctaccactgttcctctccaatcttcaggtgagtcggcctcttgctatatgttgttcatattagcaaattatatttcttctgctcatctatctttgatcacaggttattgtcgatggaatatctgcccagctgagatcctgtggtgccactgttcccaagcaagctctgactctgatgcaatggaacccattgctgctccagaaacagattgatgacctgaaggcgtcaaaagctagttagtgattttacagcttccctaattgtttgtattgatcaacttgttcttagtcatgcatcccctttcagctgcgttgtcggatatggtccagcggtgctatgaccttgaggagaa

SEQ ID NO: 100555 - DNA, 336 bp, Zea Mays
aagcggaaaagaaaatgcctgcaacacgctgtccttgcagtcaaaagactgaatgctgctgctgctgtcccacgttgtccttgcagtcaaaaagattgagatgctgctgtccctgcagtaaaaaaccgccaaggactgctgctgtccttcccacagaccacgaaacttattccaacaatcctctccctaagtcttgtgtgccgtcttgttggatagttggaccatcccggacctggagcaaagctcaagaaactcgatcctcccaaggggcttggtgagcaggtccccaagctgatccttggtgttgatatagcgcgccttgatgcttccttctgc

SEQ ID NO: 100556 - DNA, 444 bp, Zea Mays
ttttcaatgcaaccaattccctcaacgctaaccatcgatctcagaaaataatttctctgcataattctttcctcagtacacaaccatcgagtacatatctttaactgaaactggtcctatagttccaccggtattcatttttgttgtagatacttgcatgattgaagaagtcagctattgccagataattctcatgttggattcattacgttcgcgacatatgtgcaggtaaaagcccattcttttctttctaatgatccatataattgttctttttgatacataattggttagtttagtacatgtataccatctgcattttcatgtgtcacttcaacttttagctgcagttgtgttggttcttcatgaagctatgtctgtttctccaccacaagaaacaaatgtcactgctggaatgcttttgaaggatgttgtctatatagc

SEQ ID NO: 100557 - DNA, 329 bp, Zea Mays
cacgtattcaccgcgcccaaggttcttccctatctccggccgccgcacatcttcattcaaattagcggccaccgcccgctagcactataaattgaccccgccccgaactccgtagggtagtaagctgtccagccaccacgaatcagccacggtcgttcactggaatccgcgaatttggaattctccccaaaactgtttccgccaccgtagaactcaaccccgccgtggtcagcccaattcgggtcagctcctctcctctgctcccttgtttaagcattcacatacgtctgtgatactcgccaacccatccaattgaactgtgtgaccac

SEQ ID NO: 100558 - DNA, 712 bp, Zea Mays
gccaaacgatgaccatcgatacagccgacgctgcgaggctgatttgagcccgacgaggatcgaatcccaagcccccaactgccggggctacatgctttcggtcaccatatcctatgagcacccgcaccatgacactacaggccccgccatcgcgaagtacactagggaatgaaaccctagtccctagctggaggactaccgtcttgtgtgtcatacggggggagcgaattgtgatggttttataatctggaccctctccctatatttagcaagttcgacgtggacctggctcaatagcctcgtccctgggtgcatccaaggttgagcggacctagaagagattttcgtcagaaatttccagggcacgtacatatgcctaggaaacccatgggaccttaatgattgtcgacaaaagtcggacgaggcctcgagggactatatccgacacttttcttgacaatttaatcgactgaccagcctcatgaatgctgatgttatcgatgccttcactggggaatcaccgataaaaccatggcacataagttgggacggaagaccccgccaatgacaaagaagcttttcgacattgcgaccggccataagttgttgcaaatggaggactaggcatgatagagggtcagatgaagatgtcgatgactgcctcgacgcgaaaaggagaagaggccaacagcaacaagccgatgcatcggcg

SEQ ID NO: 100559 - DNA, 358 bp, Zea Mays
tgctaagtcatccactagcggagggatggcaggttagtttataatatcatgaggggctccactgtaaaatagccacggcgaaggggtatcaatgaattctatccgttggatgcaattctaagggccacgattagatccaaaccagccaactcacccgagccactggatcaataactgacgccttggattttaaaatgcctagattgatccgcaagcgtccgattatgatcaaacgacccgcaacggatcaggccgaaccggtacacttaacaagatctgagccatccaatgacatatctacggtcctagtgtgtacacgcgaaggggttactctgaccaaatcagagccgcccattca

SEQ ID NO: 100560 - DNA, 488 bp, Zea Mays
gcgcacagtcaccttgctacagaaatagccaaggcttctcaaagattgcaagtctttctccttcagagtggatcgaccaatgtcaatatagcttggcttcgaaggtctatccttcagcaactttgcagtaggtcttgatgtcgatgaagccctcattgcctcggaaataggcagagtatcttgtcgtgcctctgaggagataggagtgattagttttgcggtgattccgattctgtccatctgagcaagccaaatagtttttctaaaaagtggttcaaccgaggctggcttccgaagcactgatggatgggaagcttcggaggcacagaaaattttggcagcgtgtaggtgagggtagtaaatgtgatctacactcaccctctcttttgcttttatactgaaaacatgcgcgaagtagcacgggtcactggaaatattcccacgcagcatccttggcttctcctccgccgattcgacttccaaaccac

SEQ ID NO: 100561 - DNA, 602 bp, Zea Mays
cgaatggggcgggcataggcgaaggggatcttcgggagctctttgagggtgaggagttgaggataatgctgtttaattacagggagatgggtatcattccgaaggttgagccgatgtgttaggcgatgccctcgccgtgtgtatgtaattgtaatggtggtgtggcctgttggtcgtattcgtacgcttgtattgttccggctacgtatatgggcggctttgtgcagagtgtctttgtaatgatagactttgattaacgttattctggctgcgcccttaggtaattgttgcgctgtcttttgaataaaagactttgtttgacgcttctgttgtgctgttccggctgcacccttaggcgacttttgctcggaatgtcttgtaaagaaaagacttcgaataacgctcttgttgagctattccggctgcacccttaggcgacttttgagcggaatgtcttctgaagaaaagacttcaaataacgctcttgttgagctattccgactgcacctttaggcgacttttgcacggagtgtcttctgaaaaatactttgaataacgctcttgttgagctattccggctgcacccttaggcgacttttgcg

SEQ ID NO: 100562 - DNA, 755 bp, Zea Mays
ctcgtaatgcccatacctggtgcaaaaggtcgtcttctcaatgtcctcctcacgaatcctcaattgatgataaccagagttcaaatcaattttggagaacacctgggcacccctcaactattcaaagagaacctcaatacggggtagcggatatttattcttgattgtcacttgattcaaagcccgataatccacacataacctcttgcttttatccttcttctcaacaaacagtactggggaagcccaaggcgacctgctaggcctaatgaaacccttagccagcagatcatccaattgccgcttcaattccacctgctcctttggagccatccgatatggggccttactaataggctgtgtacccggaatcagtttgatttcgaaagctgcatcgtgatccggtggaaggcctggaagctctgctagaaatacgtcggcaaagtcacacaccaccccgatgtcctgcacccacaaggcaacctcaccctccaccaccatggagaaaaagattcctgacttccttgaccggtgatccggaagcaattgcgccaacaaggataacatgaactttggggaacttcccaagaataccacctccctacccgacggcgcctgcaataacactgtcttccaaaaacaggatataactgtgcgatattgagataatcaatccatacccaagataacattgaatgcccccattgaaatcacaacaagattggctgaaaagacctcaccagcaagaatgacgg

SEQ ID NO: 100563 - DNA, 631 bp, Zea Mays
acagtcactgatagtagggtttgaattgagcttgggagataacaaaattgggagtgcatgcctagttctaattgccataagcatcaccatgcagggttatgaattgagctcaggagtcaggacacaacaaaactcgctgcactgttttttcagcttattaataaaaaaacacttacaacgccaacattaaacattggaaatctgtcctggcttctgttaggctgtatcatagtgtttaacaattgctgttattccttggtattgaaaggcttttggtaacaagcttcatccacaactttttgttctgagtcaatggattggaatccgtcaaccccagcttcatttgcttcttgaagttttattcagaaatcagaattgagtggatgctaagatcaaattaaaataaattgacgtggctttaaacatgtattattgccactgatcataagttgtggcgcatacagtgagcttacacacctacaatacctgctttgatgttttttagtatattattacaaaattgttgaacagcatttccgggtagagccacttccattttcatgccattccatgtttctttttctggatggtcttcgctcaagcagcccaaaatcaaccagctgataggcgg

SEQ ID NO: 100564 - DNA, 660 bp, Zea Mays
ttttggatagcccatcttgtccatcatctcatagcaaacattaatctctttactgtctggcagacagtagaggaagtcatcttcgtcatttcctccgtataccaaggaccctcgggggtatttcaagtccttgccataatgttgcacttcgacaatttgttctgatgataactgctttcccgaagcgtgtcgaacaatacattccaaatcactctgcgaaggtgcttcgggagcaggtgacgtgggctcttctggaagtctctctcctatcagctttactggcgcagctcccgaaggtcctgcttcagcatgaatagaagtagcgctggaagtaaccactttccttgcatctccaattttcttgccagaatcttcggctgaagcaggagttggcgtttccatcgattctaaaacagcatccaaaacactagcaatcctcctcttcctcggagttgttattgtagtagttgatagctttggcaactctgccactactagagggctcagcagctttggttgttcttctgctgttttccttatttctggctcttctaccgcatcagcactagcctcgactggcatggtaggaactgtttccgtagctacggctggcatggtagggatagcttcgacgctctcaatagacttcacctcctctat

SEQ ID NO: 100565 - DNA, 868 bp, Zea Mays
agatcatacaacaggtctgaccccctgtgattagcatccgccttttagaggattcactgatatccaaacaattttgtgtgtacatatacaggagagaaaatatacagaaaattaccaattgagagtttttcgtccattttgttgtcagctggtgtctctctcgtgattaattttatagcgtccattcttgcatgtgacgcctttacgttttacatcatgcaaaggtcaatatcatttaaactgctgtgcaaatacacgttctcctgtattcaatatcattatgagaaaaatgagctggccagaataatcttgttcacatgagatgtgcctcaacagcaagcccaatatccttatacagtggatcttgctctccctagtccctacctcaaacatgccaactctaagcaagcccaagaaacctataatgtagcatttactattgactggaaccctttacaactgcacaattgatattaatatggccttttctttgaatacacctttatctttttttagcatatataattagtagggaaaaggcaggcctggtgtagtgatggctaaatcaccaggtcactgactctccgcatttgtgaggggaaggctggcctcaggttattcctttcctagactccattcatgtggaagccttcaacacttggtctactcttttatatataatcagtaggggttttacctctccagtctcctaaaaaaacagcaatctcttatataatttttatggtatttcattggactttgtgccttctatgtatgctctggctatacactgttaatttgactcgccaaaatgaattcgttagatcttttgtttctttttcttattaacatggacacatggtttttt

SEQ ID NO: 100566 - DNA, 283 bp, Zea Mays
cccaccgaggaataaggtagtcacactcgggacgggctagaccacatggagatgtggctagtccataggatgtaggagggccaaggatcacccactggaccatcactaccaccacgactacccatccatcgacgacaaccctccatagtgtgcacttcctgaagatgggaggacatggagggctagagataagagggacaggcaggtgcgacgaagggtcccccaaggttgtagtaggagatggttgacgtgatgcatggccccaaggggtggagatatatag

SEQ ID NO: 100567 - DNA, 373 bp, Zea Mays
ctgccctccatgcacgtaagtggtgtatcgtggtttctttacgtgtcccaatccggcaagagggaaccgcgccgcctccaccggacgatggctctgcttcgtgttggtggtgtgtcactccgtgtctcccgcgtccattgaccagatcatcatcaattcatcatcttgtggcgaggaatatggatgcaatggcacgggatcgttggtgggactgggacgcccgttcggtgctactgctacgcctttctcttattctctagaccttcgtgtgggtcgagccgttggcatatggaccctaacgttcactttgccgcctttcctaatcgtaaggcccatcaaactttttagttacgtagtctatgaagctaaatgg

SEQ ID NO: 100568 - DNA, 296 bp, Zea Mays
gcaacatgaacaaaaatcattagcatagtcacttactggttgaatgtaagaagtgatagcacctgcattgtggtcataatactttatgtagctcattacataaaagccacagtcgtttgaccctgttctcattgttggacaatttggtggcatatccattggaaagttaccaaatttggggaaggatgcattggggcaaacatgttgtaaagctttgctcaacctactcattataaccctagcccatgggaatttccttccacatatatacatttggtcataatgatagtccttcc

SEQ ID NO: 100569 - DNA, 330 bp, Zea Mays
gtggcaagcaagcaagctcgacaacacctacataaacaaagtaaacaaaaagactacaacaccatatcttctcaaagagaaaaatgacaaggtgctagcatcaagatgaacaagcaagccaacacaagagggaccaaacgaatttgagtgctaaaggagataattttcacaatgaaaagcaccaaaaaggttcaaatcacaagagacaagtgaaaagcccaatggacgtctgagaattcggagacttcgcaaagttggaatgcataacatagggtgtatcatattggattaagtttattgtctgtttgttgccaagtgggctaataaaga

SEQ ID NO: 100570 - DNA, 416 bp, Zea Mays
tggaaataagtttaaatgttgtcaggtttgccaagcaaaatgatctaactgtcggtgattattataattcaataatggacaatattgatgaagtgaccgacaagagagtgacagccttaggagaaacagaaaaggacaagatcatggtcgccaaagcttacaacaagaaggtcaaggctaaatcgtttcaagtaggggacctggtatggaagaccgtcttacctctaaggagttaagaccagaaatttgggaagtgatcgccaagctgggaaggcccttataaagtcatacaggtgatgtccggtaatgcctacttgttgcaaacattagaaggcaaagacctgcccaaggcgttaaacgggtgtttcctcaagcagtatcatcctagtatatggcaagatgcctaaggaaaccga

SEQ ID NO: 100571 - DNA, 804 bp, Zea Mays
gtcattaacaagcggccacaccctataagcaatatgctcttgcaccaaatccctggtgccaatgtaagtacacaccgtgttgaaggccatcaaacatgcttgcactttgttcccacttgcgatcgatggcctcctgatgccgaagcgtgaccgtatagggcactagattataccactcatatcctctctcttactcagatcattcttgacataaaaccattgcttcatccaagagcccgaccatttcttttggaacgttggcacatggcacctcacatcagaacggtgcacaaaactgtagcatccgaagttgttatgatactgctccttcccaattgccttcgtctcgtaggatagttcatgaatgttgcagaagcacttggcatctggctccagcccttggatcctcatagcccaaataaagactccaactttaattaaagcctcgggagtaagttgatgaaggtatatctcaaaagtcttcagcacttcgaccagcatcttatgcgagggaaaatgaagcctagccttcataaaacttttaaataccaacactacatctgctttaggaagaggaacaatgctttctcctctagctctcactatggatatatcatggaaatatctgctttcatcgcttcaatttgcccttacttaatagtggatttcctgaaaacaacatggcttggcctccatggccgatcttcggcatcttcgatctcactttcaatatcaaaattctcgctgtcgctagagtccccagatagcccaagtaacatttcatcagtgattttctcaacattg

SEQ ID NO: 100572 - DNA, 612 bp, Zea Mays
tttggattgttcccttgcatcgcgctactgctgatcttgatattgtccttgaggttgttgattgtacgacgaagttggaactgatgtgggtggttgaggtaaggcccatgtggctcgagaatgacttggtgaggcgactgaagctgaaggctgttggattggttgttggttgcgtacatactctggaatgtatggagagtgatatgaagcagtatagagaacctgctttggctgattatgtcttgcctcaacattggcaagttccttctgcttttgaattgtaacttggcaggttcttgttatgtgccctttattttctccacagaataagcagaatagtcttctttcttgattgttgtatcttccttcgaagcttcttcctccccttcctcctcttggagctagcggtctgaaggaactctgttgagttaccgttgactgggagtgactttgttgtccttgaatattgttgtttttgtcttcactttggccttggttgtggattgttctggcgtgccttggattgaaccttcctccgaagccccttgtcatctcagagtatctatatgcttcttctctcctttgccgaaaatcgttgtcagcccatatata

SEQ ID NO: 100573 - DNA, 565 bp, Zea Mays
gcgggctccaatgattgacgccgcgggtgccagccaatgggaacttctcgctctccgccgttcgccacctgcaggttgcctgcagactcgcggtgcggtgcagcctttttttttttttttttactttaccccaaccggtggtgaagacgacgacgagctagaggagaagccgagaaggcagtcaaccttaaaactggacggggcggaagaggtgattgatgagactataatttattcgttcgttcgtttgttagttaactaaagaattgatgatgctgccctttaccttcatcgcctccgcctgcactgcgtgcttgtctcatcattaggctggtgtggtgtggtgggtccctgctcctctccggtcgtcggtcccttgtttttgggcgcccggatatttaaaccatgtttagatatcaagctgctagctaacaacgcttagactctatatatttagaatctctagagttaatagttagttgtcaaaattggttgtaggggatttcaaacccttctaattaacccgcagctaaaaatcaaaatcagttcgttagctatttgttac

SEQ ID NO: 100574 - DNA, 2028 bp, Zea Mays
gctttctgcaattatgctgatctcgaggcattcaccgaagagaaaaaaagatctctacttgctaagcgacatggtaaaggggctgattttttaagagcagttgatgagataattgaagtttatgattctctaaaggagaaaggtagtaacaaggatgacttggctgctgaagtaaagccaggtgtagaaaagtttgctgataataatgtttgcatggatactgaaaatatggtcagtagctcctatatacaaaatcatcaagagatagatgatcattatgtcactaccaagggtcatgacatgatcaagtctgacaggctttcagtcactataatgagtgacgaacgctgtgttataaattctgctcctgatgagcctactgaaaatgtatctgtacttgatgaaatgagggagatttctttgcgtactaactcattttcaaataagcaaagggatgcacagccacaaaattgctacacacgtagtagggttccatctctgcgaaagtcaaggagttcaataagtgttgaatcaaggaaggctcaaggttctggtaatttttttgatcataccaatttgtcttctattgggtcagttcctaatgaaaataaggaacgctccagtcgtcataggcatgcggatgacaaagctaactcaggttctgtttctatattagataatgtctggttgcattctggcagaggcacttccaaccaacctgtaactttggggactacttgtaacggcagcaaaatgttgaatcctcctgttaaggcggatagtacttgtaacagtgaagcatctgaaaatggaacttcagagacagaattgaaatcaaatggcacatctaatctacccatgaatacagaagtaattttcaggagaataagaaaatcagatagaaaacctgttcctcattatgaagattgtacaacaccaaataaagatgaattacgtgctgagtacagtgaaatcctttcagattctccaaattcaaagaatgaagtatgcaagtcagatggagatgagcacttgccattggtcaaaagagcaagggtccgaatgggaaggtctcatttggaggattcaccagttgatgaagttgatgtttctaataagaagccagagcttacaacaacctcagaccaatgcgataggaatggtaaacctgcaagtcctgtcaatgattattcagctgatcaggtgtccacagttgtaagttctgcttctaatccgtcctgcaaatcagacatgcctatcctgtcaaaggaaggtcatcttccttggaagaataaagaataccacccaaaaattttagcattagatgtggaagctgctttgcctccttcaaaacgccttcatcgtgccttagaagcgatgtctgctaatgtcgctgagaatgtcaagaatatacctgaagtgacaggaccaaatgaaatggctctaaatggctctctgttgacagcaaacaaccattctaataaatctgctgatgcagtagtcacagtatccaataaacctgtaatagttcaatgctctgaaccttctctagacacacagtttaagcatacccaatcaggtaaatgtacgtcagaatcaactttacaaaataataccatccctgattctgcttcagttccatcaaaagaaaatgatatcatgttaaaagaaaatgataccaatggttcctgggtttgtagtgaactagataatggttcctgtgggaaaacttcagccctttgtatgatattgaatcgacccggacttgatgttacacaaaccacatctgtacctgaccggttatcttcgtcttttgagaaagaaagtgaaaatgtggcaacaagcagtgtcaaagagacaaaaccttttggctcagctgtttgtgaggttgacagaagtgcagaagcagaacaaattgaccattcaaacaacaatgtgattagcaacactatacggcatagtgagactattgtagtggattcagtgaacaatgtgggagatacggcaagcaactcttcaatggctact

SEQ ID NO: 100575 - DNA, 382 bp, Zea Mays
gatctttattacataacgagaatgtctaataaaatttcctaccaggtccctttgtcatatatatgaagcggaagtgtccgacaccccactcagatactttctgccctttcagagagaccgccccatttggatgggcaggatgcatgccttagaagggaaataatagctggaggacgaccctacagtcgtatacctcactgcatacctgcttaccctagatgcacggtatgatcacttggctcggcactatcgtcagatgatcacccgatcagaagatgcagagaggcgcaatcaccagctccatgtggaactcaccacagctcaagcccgtgtagctgccttggaaagtcatgaggtcattgtcattgaatctttagaacaa

SEQ ID NO: 100576 - DNA, 481 bp, Zea Mays
agcgaagcccagctttcatgaagctcctaaagaccaccacttcatcaccttcagggaggggaatggtgtcttctcccccagccctcactatggacacatcatgaaaatatttgtctttcatcgcttcaatttgcccttgtctaatagttgatttcccaaaaacaacgtggcttggtctccacgaccgatcttcagcatcttcgttctcactctcaatatcgaagctttcgctgtcgcttgaatcaccggatagtctagctaacatttcattggtgattttttctacgttggttctttccatggcttcgtagaagccagtgagtgtgggatccacgcttttcttatcctcagccatttcgatgatgatcactacagaaagccaaagctcaaagacaattgtgctcacagaatagaaaagctaaaacgacaaccgcatcacgaaagctagatggcatgaaaaatatctacaacacaacctcat

SEQ ID NO: 100577 - DNA, 400 bp, Zea Mays
cttccgaccttgagagggggaggtcacggaacgagccctggttcggatcgagcatccccatgatttccatgaagtcaggctgtagcgcgacttgccgcccatcacttcactgtgggatcgagccggaggccaccaaggccctcggtaatgtcgagtgaatcgttggtcaggggaactggggcttctgtggccttgaccatcattcccctgttgttgatgacgaagtcgaggtttccgaaacggatggtcactctattgtgtggttgatgcggggccaccgtaggcccttactgccgtcctaaggctccatggtggaaggggataggcttccggggccctgaccacttcaccttcgccgtcgagggataagtcgaagctaccaaaacatatcaccactttg

SEQ ID NO: 100578 - DNA, 705 bp, Zea Mays
aggatttcatgaacaaagtaactaaacttgttactaattgagttccacaagttttggttggaatatttgaacgcaggttgagaaaacatgcaaaaagagtgaaaatggctacttgaggccgaaaatggctaagtttggggaccccttggccgctcggccatgtccatggccacccaaccacttggctttgcaaaattcacttccctatttccagcacacttgtcacgatgcaagcgacacaacttgagggtgtagccatgtggataacacgtcaaacagcaggaatatcaccacatcatcaacctaagacactttgatctagcggctaaggaagaaacacaactccaatccaatgaccatgagaaataaccgtcaaacctacctctaggaagcgtttgggactgttggatgaagagtggggggagagatagtggacaacactttacaaagcatcatatctatatcttagtatctttagttatagagctcacttgagaagttagagtcgagtctgagctttgtctcatgagttccagagttcccttcgagtcagagctttgcattaggagtttcagaatatttaaatgtaggtcctagggatagggcatgtgtgggtaatggtctactatttggaatgcatagcctcaacaccaacgtccttgtgtcgcctcccatagggagtcttgagcggccatggcttgacat

SEQ ID NO: 100579 - DNA, 765 bp, Zea Mays
tggatatctgacattgattctggcaactggaggcgataagctgttggcctactctaccgatagcaggataggggccgacgtagcgtggggctaactttccttttgcttggaatcttctaacacctttcattagggaaactttgagatagacgaaatctccatcttgaaagctaagttccctcctcctgtcgtcagcatagctcttttgccaactctaggcttcgagtagtcttttgcgaatcatggcgactttctcttctgcctctttgataaaggcaggtccttccaaggccttttctcctacattagaccacatcagtggggtttggcatctcctttcatacaaagcttcaaaaggtgacatcttgatgctggcctggtaactgttgttgtacgagaactctgcatatggtaaactagattcccaatttatgttgaaggtcagaacataggctctcaacaaatcttcaaggactttgttgactctttccgtctatccatctgactggggtggtaggtggtgctaaagtggtgcccatagcttgttgtagactcaaccaaaattttgaggtgaactgcgttcctctgtctgatactattcttcgtggaatgccatgcagtctgactattttcttgagatatatccgagcaagggtagctcctccacaggtagtctttactggtatgaagtgagctaccttggtgagatggtcaattatgatctagatggattcattccctttttgggtcctgggtagctcaatc

SEQ ID NO: 100580 - DNA, 337 bp, Zea Mays
aaatgatctgtgtgctcttcttcgctttgagaatatataagaatgtcatcaataaataccaccacaaacttgtcgagataatccatgaatacactgttcatcagattcatgaagaaggttggtgcattcgttaggccaaaagagatcacagtgaacgcgtacaacccatacttggtaatgaatgacgtcttcggaatgtctgaaggtcgaatcctgagctggtgataacctgacctcagatctatctttgagaactcgctggctcctctcaattggtcgaacagatattctattctgggcaaagggtacttgttcttgattgtgacctcattcaggg

SEQ ID NO: 100581 - DNA, 296 bp, Zea Mays
catctgttgacatgtctgtgctaacttggattctttcaccttgtggacttgtcaacataattgttcctttggcacattgtattactccatcacaacttttcaaccagtcacatccaagaatcacatcaataccattggatcctaagaccactaggttgactagaaaatctatcccttcaatcttgagattaacatgggggcatgagtgtgtggccttcatttcacctcccggtgaactaatatgtaatatcttcttaagagggtactttggtatgttatgtttttccacgaatgac

SEQ ID NO: 100582 - DNA, 509 bp, Zea Mays
ttatgacacttttttatgtgttttacagcaatctcttgcgaagtgagattgtgcgcgtgttttacactaaatttcgtactcatttacgctgttttagctcacgttttacgctgaaatcattcgagccagaacccccgcacgatcgactgcacgcgattttcacgccgtaatttaggccccgtttgctgttacaaaacagatataagatttacgctaaatttcgtactcatttacgctgttttagcttacgttttacgctggaatccgcccgagccagaacccgcgcacgatcggttgcatgcgatttttatgccgtaattttaggcctcgtttgctgttacaaaacagatataagatttacgctaaatttcgtactcatttacgctgttttagcttacgttttacgctggaatccgcccgagccagaacccgcgcacgatcggctgcatgcgatttttatgccgtaattttaggccccgtttgctgttacaaaacagatataagattta

SEQ ID NO: 100583 - DNA, 356 bp, Zea Mays
tggtacagtgcctggacagatcagatcaaccgctcccctcgccgccgatgacttcgcgccgggatcgtcgccgccgttaagattcgcactcactggtaaccggatagcactcggggtcgcgtaaatatcctcgtcgtggatagactccggccaccgtaccatgttcaccgcagcggaatccgataacttcaccggtgaccaccgcctctcggccttgtgccgcgtggctctgcctttccaccgcgtcgccgtgactccctatagctgtcccatcgtcgccggggaagttgccacgacggtggacacgaattcactgcgccaaggttcttcttcatctccggccgccagcacggctc

SEQ ID NO: 100584 - DNA, 273 bp, Zea Mays
ggtaagagatgatttcagttctccagtcttggaaaaacgcagatgggaacccagggtcgaaacctagttctacgacaagtaccataccaagaagggcttcacaactctcccccggctaggaaggacccttcaaggtgacgggaatacgctgacctgggggtgactatcttgctacgactgatggagtacctcttcctaaccactggagcatctctgtaagttctatccataggagcaagtctgaggggtcgaatttttctcccttttgtaact

SEQ ID NO: 100585 - DNA, 348 bp, Zea Mays
ggagaatcatgtagagctttgtcatacctttccaacgagtacttatgcactcgattcggagttatattttagtagatatcgttgtttgaatccgggtatgttgctgtccaaaaaaacagatttgcaggtgggcgaacagcagtagtattgacagtttctggggattttttgtgggtaattggtgatatttagtaggataatcatgtagagctttgtcatacctttgcaacgagtacttacgcgctcgattcggagttatattttggtagatatcgctgtttgaatccgggtatgttgctgtccaaaaaaaaacagatttgcaggtgggcgaacagcagtactattgac

SEQ ID NO: 100586 - DNA, 313 bp, Zea Mays
ttgtttggatgtttccctgctttaacttccttgaccctttccaattgctgcatcaactcattggtactaaattgatgcggcttctcatgtttctcaatttggccatcataatccttctttttcctccatggatggtcatgtggaagccaacgtcgatgacctatataacatattttatttcttattctttttagagcaaggatctttgtcacaatgtacacaagcatagtatcctcttgtaactctaccagacaaagtgctcaaaccaggatagtcatgaatacaccagattacagcagcatgtagatcaaaa

SEQ ID NO: 100587 - DNA, 421 bp, Zea Mays
tcgcctcgccataacgacacgcgcatctccctacctcgatacgattcttcgtcttctcttccccgcgatcgcgccagcgcccccgaaaaaccctaactacctggagcctcgacggcacctgccgcaggcgacggcgagcgaccccaggcggtggtagacggcgcagcgggttgccccttgtggaggcggacggcacggcgcaggtccttgccttcccggctatgcgaattgcggtatgaagctcaagcggcgacgcgcggtagaagtggtacgttgcctgggcctctcggttgccctactcctactcgatctatctgccgatcgcctgatcgcggcggtcgtgaaggcggtttagggtattgctcccaggtttctactggtgcggcttaaagtttgtagtagcaattcttgtttcgtttgg

SEQ ID NO: 100588 - DNA, 2404 bp, Zea Mays
gaactattgcagccgggggagccccagtatatttctttagtaaagagacatgaaacacattatggatgcgggcgtgagatggcagggcaagcctgtaaggtactgtcccaatttcctctagaacctgatagggaccatagaagcgaggcccaagcttagagtaggcggctggtgtgattcctaaagctgtacgctgttgcagtcgaacccacacccaatccccggtagtgaactgcacttcccttcgagacttatcctgggattgtttcattgtgagttgagcctgtatgaggcgttccttgatctgagctaaaaagtcatcccgatcttgtaaccgagtgtcaatagcagctacaggggaaagtcccggttggtaagagataatagctggagggtctcgtccatacacaacccgaaatggtgaacagcgaaggttgtttgaaatgaagtcttataacagtactccacctaggacaaccactgtaaccatgtgcggggtcgatccccagctaagcatcgcaagtacatcaagatgatctagttagtaactttagattggccaccagactgtgggtggaacgctgaactcatctgcaacttgacatctgtcctggtgaacagctcagtccaaaatgtactagtgaaaaatggatcacgatcactgacgatggagcaaggaataccatggtgacgaacaatatgatcaaagaaaaccttagctaccgaagatgttgtatagggatggctgagaggcacgaaatgagcatactttgagaagcggtccaccacggtaagaataactgatttgcctccaacctttggaaacccctccacgaaatccatggctatatcgctccaaacccctgaaggaaccggaagtggctgtaacaaacctgccggatgaaggtgttcagacttattacgttgacagactgaacaacccttgacaaaatctcttatgcggctggcagcaaggggactatggaaggaaaccctccaactgttgagggacttttcgatgccctcgtggccttcttcatgaactgaagctaacaacaggggccacatggatgaggcatctgacacaaaaattttcccttgaacagtaagagaccatcaacctcggaccacccttccttcacaattccagccaccaactgctgcctgagcgccaccacctgtaaatcagatcccatctcagcccgtagagtgtcaaacagagcaaatgtgggggtggaaatactgtgtaggttcaacatgacttcatctctgcgagacaacgcatcagcagctccattgagtttgcccgacttgtactcaactatcatgtcatacccaaataatttgctgacccatgtatgttgagggatggtggataactgttggtctaggatgaatttcaagctgtagtgatcagtctgaactgtgaacggtcgcccctagagatatggacgccaatacctgacagctttaaccaagccaatcaattcccgttcatatgctggcagcttttgatgatgaggggctattggcctactgaagaaagctatggcgccctcaccttgatgtaagacagccccaaacccaactctagaagcatcacaatcaacaataaagcgacgagtgaagtctggcatctgcagaaatggtgatgtgatgagggcttgtttgagcaatgtaaaagcctcggctgcttccggtgtccaacggaaagactcccttttcaataaggcggtgagaggtgctgctattgttccatatccagcaataaacttccgataatatccggttagtcccaaaaatcctctgatagctcgcaaactattaggaagtggccaggtttccacagcagaaactttgtcgggatccatggcgacccctgttgcagatatgatatgtccgagataggctactgtagcagcctcgaacaagcatttggagcgtttcaggactagttgatggtcacagagggtctgtagaaccaacttgacatgttgcagatgggttgtccagctattactataaatgaggatatcataaaaaaataccagcacgaactttctgataaatggtttcaatatgtcattcatcaagctctgaaatgtagatggggcgttagtgagcccaaagggcatgactagaaactcaaaatggccacgatgggtgcggaacactgttttttccacatctgctgggtacatgcgtacttgatggtagccacttcttaaatctaacttggtaaagaatacagcaccacggagttcatccaataattcatcgaccactgggattggaaatttgtcttttactgttttgtcattaagggcgcgataatccacacaaaacctccaggaaccatcagactttttcacaagaagcaccggggatgaaaaagaggaggtgc

SEQ ID NO: 100589 - DNA, 593 bp, Zea Mays
gataactcctggccggtccctcccgtctctgacaccgtcgtttcaacatcgcatggtggcgaagactcctttgtgggtaccacgggcaccgcagaagggggcattgctgcagccggattgacccccttcacgctggggcgcgacatcttagcgtcgcgacacaggtcaaccagttgaagagggaccttctgtttcttccgctgggcctcttggcgatccttatccatcactgctaacacaacaacaccaatatttcttccgtaaggaaagattttcagctcacgagccatacgagacgtaaaatagtcattgccgacgaccctaggaatagggtccttcctatgccaccgaccccggtaaccttcaacatttacgaagatgtttcccggagtttgggcgaagtcataacctccccaggccaagcacatgtccctgtcaaatcctcaacaaaaaacctataggccttcggccccaccgcttcccgctctgtacctttcgtatctattttcctcttccgagttgctgcaatcatagccttccccttcgaggtgcccacttcagaccgagtcttcacttgtttacctcggtcatcc

SEQ ID NO: 100590 - DNA, 499 bp, Zea Mays
taggggacaatggtagcctagaagttaagacgatgctagaagacctcatacgcaaggctcagcgcctggacaccgagacgacaagtcttgtagagaaagctcgcaaagaacaactcccggacctcaagacagatgaagaaggaaccctttggtttagggaccgtttgtgtataccaaagggagaggcacgaggaatcctgctcaatgaagctcacaacttagcctactctatccacccagggaccaccaagatgtacctagacctcaagaccagatactggtggagagggatgaaaaaggagatagctcagtatgtgccccagtgtgacacttgccagcgaactaaggcagagcatcagaagcctgtaggtctactgcaacccctcccagtgcccaattggaagtgggaagaaataggcatggatttcgtaatcagactgcctcggacccaaaaagggaatgattctatctgggttataatcgaccgtctcaccaagat

SEQ ID NO: 100591 - DNA, 462 bp, Zea Mays
gagctgatagagtaaccaaaggtcaatgaaaaggtaacatttgcgaaacacgtagtctgtcacaataaacaaagaaattcccaaaattgcttgagagaaaaaaatttggccaagtgattttttctgggttgtaaagagaaaattgcagaaaccaatccatggttttaggacaatcactgagtgagtcgaatgtctgttgtgaccaataatgtgcaagggagtaaatcatacctgcctggcaccaacagattgtttacaacatcctggcgcaatggaacttcttgcacaatagggatagcctcaagaacatattccacatcagcagcttgtgcatcaacatcatttgctccatccacatcatcggtttgagcatcatcataatttgctaatagctcatcaatgtaaaattcctctggtaaaaaaacaccatcaaggggggtgccagccgacaagtttaaagca

SEQ ID NO: 100592 - DNA, 691 bp, Zea Mays
gtcgattgagttaccaggaatgcaagttgacaagcatccatttcctgttaatataatagatcttggggaaaagaaggtattggtttgaccgaatgtgaccgataaagacaaaggcaagaacattgtcattgatagtcctcgcacgtcaacatatcgcaaggggtggttgctcaggaggctccaaacaagagaaggactaataagaccagaggcgacgggggcaagcgtgatcaaccaaccgatcaaagctctttgtcccatgcatcacaaacggtctagtacctatgcgcggacagtctagagcccacacggacagtccagctcatttggccggactttctggcagtgaccataggcagtagcgtccatgaatgggtagtgagagggttgtcctatgcagtcggccaacaaagccacctaatcatctgcaaaagtaacacgatcgatgaaaacggtccaaaagatggcgcaataagtgtcgcctgttcatccatctccagtgatggcatgatacttttcaccagcctattcatcgtcgatatattgtcatgttcaaacaagggaagcgcgatgatgaacccatattacatgcataatccctttgcttattcttaggctagggggtccacaattttgtgtctattgacaaattgatcaaatagtcatggtcaaaaaagatgcaatcctaaat

SEQ ID NO: 100593 - DNA, 441 bp, Zea Mays
tgagtatgggacactgtggccgctctgtcgcctcatccacttgccggtgacgtggccgagcggccgtcatcgaggtgtatgtcgtttgccatgatcgcgccatgtcgtgaccctttcaccacgtcgttgctagccataatagttcactagtgaccgccgtagctcctcaaccagtgaatgccacggtagaacgccgcagtgactcagtccctctctccgatcgccagcacacttccttcaaattggacgccaccaccaatggagtctataaattgctgccccagtaagctccactaggttattacgcatccaaagcaccagctctcgcctccgatcgtccaccagagcctcccaatttcccatttcccccaaatcggtcagaacgccgccgtgagacatctcgccgtggccagacgtctgcgggttagttcatgctcttct

SEQ ID NO: 100594 - DNA, 523 bp, Zea Mays
gaggtatggagagacgaccagatgaaaaacaagactgaaattttacttttttaatatctgctgcacgccagaaatctccatatctgttgcacgccagaactacccagagattctgctggttgtgtaaaaaaaccctttgcaaagtaaacttatcacaaaatgagcatccgtgtaaaagatttcctagcctagctatagggtagctagctaggttaaaattgcacatatacatgtgcagcaggtgcccattgcgacaagaagatctggccatgtaaaagttccaatttttcatgctaagatgaatgcaccctagaactttgaattgcagagtgcagagtttgatcatcagggaaaactggcggctacactacacaagctagctagagatgagagagagagaaccaatgcaaatggcctagctaattgactaaatgtacagcagcatagagcatccctattccaatgttacaaacctggtgcttcatataattctatacacaagaattgtgattttcatgaattg

SEQ ID NO: 100595 - DNA, 719 bp, Zea Mays
aatagtcagggcatagattgaatacaagggtgttcaggtcattaaggaaatgatcaagcagaaagcagaaaaatacaaatgcttccggcaggacagtaggggaatcctatggtttggagatcgattggttgttcctaaggaccctgagctcagaaagaagatattggatgaagctcacctttcaaaattctccatgcaccccggcagtaataagatgtatcatgatctcagatccttttactggtggaccagaatgaagagggaaattgctaagtacatatccgaatgtgacacctgccagagaatcaaggccagtcatttgaaggcagcaggccctttgcaaccccttcccataccatcttggaaatgggaggacatttgcatggatttcatcgtgggattgcccaatacctcccggcaccatgattctatttgggttatcgtggatagattgaccaagacagctcatttcctaacagtgcataccacccataagaccgagaaatatgcagaaatctatgttgatcaaatagtgcgtttgcatggtattccaaagaccattgtatctgacataggagcattgtttgtggcactcttttgggagcagctacaagaatcacttgggacccatgtaatacgaagctcagcataccatcctcaaacagatggccagacagaaagagtaaatcaaatcctcgaagacatgttgcgagcttgtg

SEQ ID NO: 100596 - DNA, 346 bp, Zea Mays
tgatattggcccctcattgcaatgatcttcatgtgagggcttgatagagacccacacatctgtagggcacacaactattataaatggtgtcacaagtcttgaggatataggtgagaagtccatggtggatgttgagccatgcgctttggctctagagcctagggagtgtccctggaaattgggtgctattaggctgcggatggtgcatgagagcacgtggatggcatgtcatgcatttgtaggccccatggaatgaggtcatatggtttaaaacaacctaaggttggcttggtccgtgactacgaaattgtcaatgttataccaccattgttctacattttcctcc

SEQ ID NO: 100597 - DNA, 733 bp, Zea Mays
cttttctttgaggcctcggaataggatgaggaataccattcatggtacttaagtcctctctagtgcactaaacaatagtgcgacttgatcacgctctacaaatcacaaaacaaaatggcagttcaatactttatttcaatgtcttcttgacattccaatttactttatggtattgcaagggaatattctatgtgaattcccagcttcttgattttctagttttcttattagtgcgggtcttgcatggggatctttttggcttttcgagcgattttccagtattcttatttcaagtattcttttcctccccctaatgtcgtggaatagataattgggcattattgtggtaagtacatatgccatagatttgaagttggggagttgctcttatgatcatttgcattagtcatatgcaataggactatatgccccttttcttttcttttgaaattatcgacttcatgtccttttcttgataaagggtaattcttctagtacgactgtattttccaagtgtatccttatttcatttggcatcttccttcacattgctagacttcatagtgatgattatccaatatatccataattcttacgagcaatgctatcaacttcattggtatgtggttttctaaggagcgcactcacttttgaccactttgatgaagcatattttgacacgtataaattcttaaaatccttaataaggattttatatgaccatggatatctc

SEQ ID NO: 100598 - DNA, 319 bp, Zea Mays
cactagcatcatagaacattgatctatagctcagaggcacattagcatcatagaacattgatctatagctcagaaaatatatgatcaagcatgatcaagcatgctaaacaataatgtgccagtttcaagtatataaaacagattcttacacgagccacgactgcgaatccaagagatgcgccatccagaggcattgaagcatcatataccattgatcgacaactcagagactaataaacaagtatagatatattcaaaagtaaccatagaactcagctcaacatcattgatcctaggtactgcttgtgcctagcaagag

SEQ ID NO: 100599 - DNA, 459 bp, Zea Mays
agttctcgtataataatagttaccaggccagtctgaagatgtcaccttttgaagctttgtatggaaggaagtgcaggactcctttatattgggatcagactggagagagacagttctttgggcctgaattgattcaagaagcagaagaacaagtccgtataattcgagagaatttgagagtggctcaggccaggcaaaagagctacactgataatagaagaccactgaaatttgaggaaggtgatcatgtgtacctccagatgtcaccacttcgtggaatgaggagatttaaagtcaagggcaaattgtcccctcgctatattggaccattcttgatctttaggagagttggagagatggcataccaacttgagttaccggatagtctatcggatgtgcataacgtgttccacgtatcacaactgaagaagtgtctccgtgtccctgaggaacagttac

SEQ ID NO: 100600 - DNA, 389 bp, Zea Mays
gtttgtaaaacgaatctctcacatcaaggatgtctttcaaaaagtgagaatcattttgtcttttttcactgaaatgataggcatccccttaacatatttttttataatgttctgccacaaaccattcgaattctccaaattccaaatccatttggctaagagcgcatcattcattttgttcaagttcaacacatcaagaccaccttggtctttaggtgaatagactaaatcccaatcggccaaatgatttttttactatggccaccttgccataataatgtttttctataaatgtcaatattcccgattatagcttttggagctttgtacatagaaagcatatacagaggaacattagttatactactattgatcaaaattaagtgaac

SEQ ID NO: 100601 - DNA, 368 bp, Zea Mays
ggctcagccgtgatggccgaagcagcagcctttccagcagcagcaatcttcctttttaccccttgccctcgcagtgggtagcaatagtcagggtaaacgaaaccaatagcatcaaataccctgtttaaccttttcttattccgaccccgaaggctgtggacaaggcattgtcttcctttttggagtacgctccaagcagttcatcacttgtagcttcgatacacttcagccaatcatcatttggttcatcaaacttatccccaaacctgtatgtgtacttcagccggaccaaattaccttcgctagagttagtgatggtctccttcggcatttcccagctttctacaagtggccacaccctgaaggct

SEQ ID NO: 100602 - DNA, 372 bp, Zea Mays
caaaatacttactggagaggctgctggagactcctgagtcgagcctaaaagagatcgtggaagaagcctacgcaaatactctgaagccatggcatggctgaatctcgttagctgcttacagggtaaatcacctggatatttattccgcattcctgagctagttccttttaacggatgtctaggcaatttaaatggattactataagattttagcatgaggagatccatatgctaatcagtactggtggaaatgttacaaaagcccactcggagggatctagcatgaggcattgaagaaacatactggatttggagtgagtctgaggtggctgaaagatcagagtgctttgataactaaaagtggtggctcaa

SEQ ID NO: 100603 - DNA, 622 bp, Zea Mays
cgcgtgcgagtttccatgcagaagaccatctggggatgcaagatccctcgtcgaagatgcaaagctgtcgatctgtttccagccatatgcaacctcgccttcacctctacaactgtggtgagtcacccgatctaatcatggccccgcggtgcgtagaacctcttgcatgaaatttagttcgctggaaaatctgggtcgtgggattggagttggccggcaatggcaccgtcgccctaggcgctctcatccctcgcgtccgtcggtcggagtgaagaagacaaccgggatccattgatccgggagcgtacggctaggattagatcgtgtatacccgttcggccgggacgcttcggggccgttagatcctggttgaaggatagggatcggatcgcaccgtaataaaatcatggcctttggatctgatccgtgggcttgcattgcatgcgcttcatgatctaatctggacggtcaaatagcgatcggacggatcgagttagacagtaccccttcggcttgagtttttacaaaagaaccctcgggttttcaattatccaacccgccgtcctatgcgggggaaaactgagtcttaagcaattttatgagttagaccctgggttctctg

SEQ ID NO: 100604 - DNA, 567 bp, Zea Mays
cgtccctaagtcaggcgacaacgtttggtgggtgtagaggaagcgggagggaacacacaaaatcagggagaccctgaactcctgataccatgtagagagatagaattgggaagacaccacacccaatgagggggcgggtgatctctcatatatatatatatatccaaagtagcttggagtacaagtatacaatctcctaaactgggatagctataaccttatataaggaagactataatcagtctatactaggctatgtatgattgtactttacatatatgtctaacatttataaatgaggtagaaatcgccagccaacatccacggtccaagacagtcagccctaatatccctgatttcttgtatgaacataatcttctcattgtctccttgaggaccatatacacaggtcagccaccattcgttcccactttcattacagaatggaactgatacactatgattatccagtcttttttaccagtgaaacccaaatgctgcctccaagccactgaaatgcccccacatgccccaactgaaggaaggtaaatgaactcactaaagttt

SEQ ID NO: 100605 - DNA, 431 bp, Zea Mays
ggactatgcacgaaaccctgacaagaatgagactttcggtcaatttattcagtcacatagatattcacagctgttccaggatgcttaccttgtacgctactaattgaattatacataccccatccacagtttctcatatcagttttaagatatttaattttctgcagatcccaatgtgcgcatgcatttggtcctgtccaccacagaacatatttggcttccctgctggttttgtgctttcatttttttgtgataatcatcttctcgaggtgcctaaaaatctacttcaaatatttattagtttcttctgcattctaattggtgatacattagaggaacttgccagtctggctaatattgtgctcattcatccaatggttttatgtgtatgcattcagttgtttagtcccctacagtggctaaatgtcaaa

SEQ ID NO: 100606 - DNA, 324 bp, Zea Mays
caaacgaactcaaaacaagatcaactcggatcacgatcaaaaactgcaccaacagggcgtatgaagtgatccaaagagtgtatctcaccaccaatcaatccccaacaacacccataacacaagaactcgatggttcttcacaaatccacaaagcgaaggaagagaagaacacaagaacaaaatcgactcaaaaattccagcggagacaaaactgagtaaacgagtcgaatcggccctatggatggatccaagcaccctttctttgaatagaacagtgaagattacaaacacaaacacgagtttaaaacatctgtggatcttagt

SEQ ID NO: 100607 - DNA, 658 bp, Zea Mays
caggcactctgaatcagggtttcgatggtacagtgttaagatcagattgccaggatcagatcatctcgccaccggcgatcacgcgcttggattcgcacctgaagctacgattcgtgctcaacaaagtactgattgttgctcggggtagtaaatatcaccgtgcggatgaacttgagccactgttcactccgaccgccgtgttcgcctagctcacggccgattttgatgaactcaccagagttagccacctcacgaccttgcgccacgtactttggtgctttaaccacggcgcagtgagtcaccttagcccacccattcatcgccggtgagcttgccacggtaaacgccaccaattgcttgcgccagtgcacccttttctctctggccgccaccgcgccatctcaaattcacgggccaccgctcaagggccctgtaaattgagcacacccttggctccgctatgtaattatgcacccaacacacctgctcgtgcctccaattactcaccagagcccctaaattgctcacttcccccaaatcggttttccgccgctgtaaggagggcctcaccgtggccagtgcgctccaggtccaatcatgtcctctgctctcttgtttcagcacccttatgtgcccctgatgcttctcgacccgaccg

SEQ ID NO: 100608 - DNA, 363 bp, Zea Mays
tcggaccctatcaacttcgtcaatataatcgaacttagtgagtacttcaacatgccctcctttgatagtgaattttccgaagttcacgtgacttggcttcgtgggtcgaatgattgtgttgtcttcttcaatatcaatatcctcgttgtcatcgtagatctgacccgtcagttgggtccacaacaacacctttagcttatggtgcagcagctttgggtgccacaactaagctctcaaccctcatctgagaggtttccgaagcaggcactaaagctagctcagggactgattgttctccttccatttctatgaagacagagttctcttggtgctggctaaggctgtttttgacgcaagaatgta

SEQ ID NO: 100609 - DNA, 519 bp, Zea Mays
cccttaggcgccttttgcttagatttgtcttacagtaaagacttcacacccttagggtgatgttgcgcacttgttgtgcatatcaggttgcacccttaggcggcttttgctcggatttgtcgcacgcgaggatagtctaggctgcctcttgcgatgactatttatacgtcgattgtcgaagaccgtcgatgcggtctttttcgacactcatgaccatgatgcttgctggactttttgtgggggctttttggcggtatattacatggctccgcctcgttaaaaacctcaccccctggaggaaaagagtgcgggcctgaatgacattgtttgaggaattacaaagacgcttgggccttggatcttaaataaaaaatttttaaaaaaattcagaggttatcgatgttccatgagtgctctaagtcttcgccagatgaacttgttagcctgtaagcacttggggatgccttcgtcttgactatgtacgacccttcccacttcggctctagcttgccccgggac

SEQ ID NO: 100610 - DNA, 464 bp, Zea Mays
ggtctttgtcgatgagatctttggaagtttgttcgtcgacatcggggactgctgatgtgtttgtcctgggcgatccatgctttatctcctgcggcgtcatggcttcggatccgtacagtaggcgaaaaggtgcgaacccggttgcccggtattctgtagtgtttagggcccataccacttcaggtagttggtcggcccatttgtcctttttatcgtcgagaagtcttttcttgatagcggtgaaaatcttgccattggcgtgctcgatgatgccgttggactgtgggtggtataccgaggcgatgacgggcttggtgccgatggaaaaacagaaatccctgaagtcttggctgtcgcattgtttgctgttgtcgaatgtgagttcggacgggactccaaagcggcaaacaatgttttgtcagaagaatttttgtgcggtcttcgacgttatggtggatactgtc

SEQ ID NO: 100611 - DNA, 616 bp, Zea Mays
ggttgatctacttcattttgcctgccaattctactaacacatacagtggcaacaattaattttacgaggaacccctcccttacaaagaacccctcccaccaagggaggaagggatgtggaagtggtcctttataaaattagtgttgtcattatatatgagatagatgttctagatttaaaatgtatatatgtgcatcgtacttctttgaacaccagatacgttcccaacatgttttagtgttgttcttttggttggaaccagtagcatcaaaatcgaagtctgtgcagtcggcaccaccgatgggaaggagcggcaacgccacgtgcccatgagacaacaaatatcagcaatgcttcctccacccacatctgttccgcctcgtcccaactatttcagacctccttgtacggtttttgtacctcggtgtcggtgtatgacggctaaaccaacctcgttctggtgctcgacaaccttttcccttcccattgcaaccctccacgcatggcctcctagtcctcctcgccaccgccaatttctctctctcgtacatctactgaaagggaaatagccttaaaccatttcttatattttagtgcttgatgaccttcacaacca

SEQ ID NO: 100612 - DNA, 697 bp, Zea Mays
agaacacgttgttttccgattgggccgacttttgtcatagtttgttgtgcaaaaatggtatccattgatgtcatacccagaatatttcttgaccctataagcaaagtcgttggctacttgtctcaactcggcactcatagacggatctctttggccctgcaagtattcgcaagttaaaacacgctaaattgagttcaaagacgtatctattttacaaactaagcatgtaccttaagtttgaaccaggaaatgaaatcgggcaacccatttctcgcaccctttctaagaagagcgtcatattcctgtggagtggggtcccttgatcgacgccagaattcatgaaggaattgttccatgtatgacgtcacctcttcaaggttggtcaatacatatagcatgatatgccgccactcttcatgtgtcagggtcttggtggtcgagccacttgcgcttccgagttggcctcgaaatatgctaagattcgattcattgtcgccatcattgtaacgagggggtggattatgcacgctcggcagtttgtcaccataataagttgttgtgaagtttgagacctcctctagaatgtatgcctctgcaatggaagcctcgattttgcatttatttctacatttctttcgaatagtctttagacatctctcgattggatagcaccaacgtccctacatgcccccccccc

SEQ ID NO: 100613 - DNA, 278 bp, Zea Mays
aaacgatacgcatttggtgcaaaaggtgcatttgtcaaggttagcaaataagcgcgcggcgcgcaaagcatcaaaaacagcacgtagatggtcaagatgttcagataaacaagtgttgtagatcaagatatcatcaaaataaaccaccacaaattttccaataaatgggcgcaaaacctcgttcatcaaacgcataaaagtactaagggcattagttaatccaaaaggcatcactaaccactcatacaagccgaacttggttttaaaagcagttttcc

SEQ ID NO: 100614 - DNA, 320 bp, Zea Mays
tcggaattccccgacgtatttcctaaggagttaccaggcatgccacctgaaagaaaagttgagttcgccatagagcttatcccaggcaccgtccctatttccaagagagcctatcgagtgtccagaccaagattggtggaactcaagaaacatattgatgagttgttggagaaaggctacatcagaccaagtacctcaccttggacagccctagtgctatttatggagaagaaggatggaacatagaggatgtgcattgattactgatctttgaatgaactcattgtcgagaacaagtaccctctaccaagaattgagga

SEQ ID NO: 100615 - DNA, 478 bp, Zea Mays
ctcaaactaaccaacaaacttctaccatgttacaagaccagatctagcactgagagaggtcatcacattcctccaccacacaagaatctcacccttcaacaactatctagcatagcgaatccagtctaaaaaagaattttgaaaagcctctagtttgtgaaccacaagagaaagccaatttgtagccccaactggagcaccattattatcaaaaagctttagatgtggcacaccattcttttaagtccaatgcataatgaacattccctctggtcataggttcacccccatgagtggtgttaggaggatggccaataatgttaggaggagggtcacaataccaccaccactaaaaggagcctcacatagagcattcatatctttgcttgcattgctggcgtctctactaaaattactgccatatctcgaggagcctcgtgtgctggatcattctcatcacaaccaccatgaacacaac

SEQ ID NO: 100616 - DNA, 444 bp, Zea Mays
cctccgccgaattctaacgggggaggggcagcataaattgtcacctctatgggaaggaccattcacagtagcagaagtcactcggccgggatcatatcgcctcactcagatggacggaacggaaattgggaactcatggaacatagaacatctcaggaagttctacccgtagctacatcacagaggctctcggaacgacgatgtattctgtaaattgagaaaaatatcatcaataaaaggtttcaaaggcactcagattgttcactgtcaattcgcacgcttacttaactcggggtgaccactatgccctactaacggagcaatcggcttaagtcggcaatgacttaaggcggtgcgacatgctcacgcttacttaactcggggtgaccactatgccctactaatggagcaatcggcttaagtcggcaatgacttaaggcggtg

SEQ ID NO: 100617 - DNA, 513 bp, Zea Mays
gccgatcgctccgttagcagggcatagtggtcaccctgagttaagtaagaatgtaggtcgatcatgaacaaactgagtattcttgaagccttttttattgaagacatatttcccattttacagagtacattgtcgtcccgatagcttttgaaatacagctagggataaaacttcctgaggtgttctatattccatgagttcccaatttccgtgtcgtccatctgagtgagacgatatgatcccggccgagtgacttctgctactatgaatggtccttcccataagggtgacaacttgtgtcgtccctcccccgttagaattcggcggaggatgagatctcccactgcaaaggatcatcgtcgcacggccttgtcgtgatagcgtctcagagtttgctggtatcgtgctgattgaattactgtgttcagtcgttcttcttcgagtacatcaatatactctagcctagtagcttcggcttctgctatgctttcaaagaccaaccttggcgcccca

SEQ ID NO: 100618 - DNA, 542 bp, Zea Mays
aatttcttgcactcatggcctccctcactgcaaagtgcacatacaaggacacaccatccaaatcaatctctaggttcttcctccgacttgctatgattttatactaggtatggactcgttatcctttcatagtcccatggaggtccattggcaggagaagtggatatcctttcagtttgagcacagggaaatagtgttgcaaggtctctgttcatatgtatccaccctggaacagatttcagtacctcaaacttttgatttggaaatgattgatgatcttcggtgcacactccaattgcaacaggtccatcaagtatcatctaaggatagtctccctgcagaaatccagcacctcattgaggattttgcatctctgtttgaggtttagccccctttcgatctcattgccacacaatacctctagttcaaggagcaacacctttccgtttatgtctttatcgttacaaccctgcttgaaaagatgagattgaacgccaaattgttgaccttcttcacaatggtatgatccaacacaatagtag

SEQ ID NO: 100619 - DNA, 946 bp, Zea Mays
gccaaaagagcataggaagctcacatcggcgtctggcaggcacacgccatggatggagcatggaggcgaggagaacgagagcggagtgaggcgagcgtccaagagctgtgtggggagaacgagagcggagtgagcttgtcaaggaactgaacgtacaaggaagaacaagttcgtacgtgagggagatgagagcctagcgttgggtcttggcgagttgctggaagcaacgaacggtgcagaagttcgagggggcaggtggcatgaatgtggtggctgggagtattccagagagctgagatggtgataggagatgagaaagactagagctgcggtggataaaatttccaaggaaatcaagtaacgtatgtaaagaaatagaattagataaatacgtagaggataaaaaaactcagattttctttctcttttctaaacaatatgcatagataaatgcagttatagaaattaggtttaaaagatatagaaatagttcgcaccaacctaagatcaacgacaatatttaaacatgatttgatttggtgaatactataaagtcagatgaattattacccatatttatatttgaagatttagatcgagaagagaagcacacggactaaattaaactgatttcggcttcgataatttagattatatttaatccagtcaaatttttacgagtctcacgtgctatcgatcatttgactacagaacgattcgattaataagctggcgtattgtttttctcgaacaacacgtaaatagacagatccaaaataataccggcttcagtacttcagatgatatttgatgcatctgaaatcggacaaatatttatctgccatttgaacctatttgatttctccgtcgaggataatttgttggaaaccaaccatgattataattcttcagacacgatgtttcgcttgacgagaggggactaaat

SEQ ID NO: 100620 - DNA, 479 bp, Zea Mays
cgacagtgaaacgaagccattccacccacgcgactctctgcgacgtttctcagttttgtgattgctcgacgatggaagtttctcgacgtgagcacagggcgttcacggtggttgagccagggggtcgcgagcctcggtatttatagtccctcgcccaaagaatccttgccgaggccgttacaaccggtgggattcgatggaaaatcctagagatcacgatgatgcagaggagtttggttgaagacgttgctgccccggtggtcccactactaagtgagacagcccaatagttcccccttaatgcgactgacctgtggcccccctcacggccgcgaaggagtcccaacatgcgtttggaaggggatatgacatgtgggccccacctagcggtgttgatggggttgtggtcgtgcaggatggagatcagagggaagtgggatgagtttgggccgggagcgtgcaacttcgggccaaatgca

SEQ ID NO: 100621 - DNA, 359 bp, Zea Mays
ggttaaggtctaataaatgtttgcctagtaaataattgtaaagcccaattaagtgtctagttccctttcaactaagtctgtctacatatcagtattagagaacttaggtacttaactaacttaatgattaagtaactagtggatgattaaggtgagcgtagtaaatgcgtgtacttgtgatgtcgtagttgtgttgcgtaaataagtaaaaggttgtcgtctttttaatggtgttatgttgaacgccgataacgtgtaaataactaatgttagcgtgtggttgttcacagtgtcttacaattaaatgttagttcgctaccgtgtattatatatcttgtgatatttttcattgtattcat

SEQ ID NO: 100622 - DNA, 1402 bp, Zea Mays
cattggttcctggggacacgacaccatgtcccaagtgtggttggccagcagggtggcacactagcatggcactaatggggatcagcgagagcaacacgaatggaggagggtatatgcgagggagttagagctacatcaaccttgaacaccagcagatcggtggggcagagaacaccaaccaatcgacgcttcaccattgagtggatgtggcaaaggtcatggtggagggcgatcagatggttcactggcgactcatcccgacaacaggctgaggcatgggctggcatagcggaaggggccaggggatcggtctgtccacgtcgctagtagacgcaggtggggtcagcaaagtgttccacatggggcgcaggcgacggggctgcatgtggcacatgcggacttgatggggagagcttgtgagtagcagtggcagaggtgctgggatagcaagcacaaccaaatatctgaaggtgtgcataggagggggttgtgccaaagagagtgaagtggggagtagggtgattgaccaccttgaaggggagttggttgaggatatgtgtagcagtgttcaaggcttccactcaatagctagcagggagagatgcctaaaagagaagacatcagatcatgttattggtggtgcgaatgaggcgttccagtccggtcattctgagaagtgtaaggacacaatagtcacaactaaacaccatgggagagaaagaaagaacagaaggtggagttgtcgaacttgaggctgttgtcgcgctggagagcatgaatcaggcgatggaactaggtggagacccaagtgaagaagtgtgagagggtgtgaaatgtgtcagacttcaatcatagtggaaaagtctaaagaaaatgagagaaatcatctaaaatcatcatgtagtatttataaccagagaggctgaatacaggagatgtctagggatcacaataaacaagatcaaaagcctgatcagccatagaagtagaagtagaaaaaggaagacaagcatggtggcctagctgtcatgcatgacaaagactctcaaaatggcccctactacaagatatatctaaaatattggaatgcatggacatgttgtcaggtctagggtggccaagacgacgatgctaagtggtagaggtggtggtagaagccacaacatgcgaggggaaagcattggtggaggagatggatggccagaggttgtagagtggccctgagctgtcacatcaggagagaaggctcctggtacccaaacccttcatagataaaccaaacgggccaaacttaattgaactggtgttatcggtggtgaaccgacgaacagaaataaggttttggatgatgtgaggggcaacgagaacatcattgaggaagaatggtcccagaagaattgag

SEQ ID NO: 100623 - DNA, 293 bp, Zea Mays
aaagccccttccagctcccgtgcacatacctctgcgggtccgtctgctggtcctgctgctgctgccggtgcctcgcgtccctcccctggccgcggatctcccacgccatgtggtcgtggtcgaggtcgtggccgagggatgggtgcccgcttggcccacgggtttgcggcatttttctctatgtgccggaacattgctgctgatgtacatgaggtggcaaggcgtcagcgggagactgacgacaaccttcgtcgtcaagcttccactatgggtatacccttcgcccctcgctc

SEQ ID NO: 100624 - DNA, 607 bp, Zea Mays
tcggacccaggtcccacctggagttttcgtccaagaagtaccacgcccgagtatttccttagatcgggcagaagagtgcaatgtttcgagccagccagagtcagactctaatgactggagggagcctactattaagtatataaaaacgaagaagagccggatgataaagctgcagcagaacgcatcgcaagacagtcagcccactacaccctcattagggatacactgtacagaagaggcacagcaggagtcctcatgaagtgcattcctttggttactgggaagcaactgttagatgagatccatgccggacagtgcgggatacacgcaacatccaggactctggttgggaaggtcttcaggtctggttactactggccaacagcaaagagtgatgcagccaagttagtccagaggtgtgaagcttgccaatttttatcaaagcagcagcatttaccagcacaacaactgcagaccatacccgtaacatggctatttgcgtgctagggactggacatgattggaccttcaagaaagctcagggaggatacactcacgtgctggttgccattgacaaattcactaaatggatagagtacaaacccat

SEQ ID NO: 100625 - DNA, 324 bp, Zea Mays
gttctatccaacaagagcttcacggtcatggtattttgtgtaggtgtggcataaacctactaaccctaaaaatcaaacatctagatttggttgtgattatatgagccatgctagcataattcatctctgatctttcactgatttgtcgtctgctcatcactgtcgctgtcgaggttggagggttggacattgtgatccctagagcccaccatgaaaacaaatcaatctccctaataacaaaaggctaagtctaagttagggctagaatccgagtcagatcaagactcaacatcggatctaagtcaagagtgaacctaggtcaaa

SEQ ID NO: 100626 - DNA, 958 bp, Zea Mays
aacgaggtggtgtactcatacctttatttgcggcgtcgcatcaaatatcgacgcggaagattccgtatgtggtgttgctttaggagtgacgtttgtgttggtcggcatgttcttgccaccgtcaccatttttaccctgaaaaaatgtaatggttatatgctatttaaagaaaacgatgaatacaacccttcaatgaaaaatacaagtaataagaaaaacattaccactggggttgtaggtgttttgatctgtttcgttacatttgtttgaaccagtggatgaatatcagcttcatcggggcaactttctaatagtacacgaatatgttgttgccttaacagtaattcatgtacctgagtgtctgtcaactgcgtatcctgctgggatgctagagtagacatatcgggtatagtttggggggccggacaggtacatccttctttacgtatcatgtaaacaaaaaacattgtttaaaataatggcatcaaaacgatatcgacaaatgattacataacttttttatattgacgtaaagaccataaaactgactaacctgccgcctggggaagaatatcatctgattttgtagttgttttctgcacatcataaccatcttcattgtcccccgactcagcacggaggacctcatcaattaactcaccaaaaatatcagatatattgtattgtttctcaacaatctgctgaagagtctgtttaataactgaacacgccttaccaacctccgtatcataatgtgacaacttctctatgaaacccaggcggtggcgggagttcaatgtgaattgtgtgctgtccagatgggtcaggacgaggtacatcaaaagtgtttgtcctagtattatgctgttgtaaattgaaaattattaagtaaatatatagcgtatcactgaatattatgttgaaattctatgacaaaaaatatataaatagaatcttg

SEQ ID NO: 100627 - DNA, 730 bp, Zea Mays
ttgtggaacgagctaatggaaaaattttcacagctgtcaagaagatgctcctcgacgaaaaaaagggcaggtgggccgacttgttacctgaagcggtctgggcgctaaacacgactgagtgcagggcgactgggttcacccctttccgccttctatatggatcggaggccatggccccacaagaaataaagcatgggtccccgcgaacaattgcgtcagctgtccccgacgtggacgaacccacttcgaaggatcttatcgacggagaccgcgtcttcgctctacaggctctaaataaataccaagcctagacaaaagcatggcacgacctcgcagtcatcccgcgggaattcagcgaaggggacctcgtactcgtccgaacagctcggacagagtccaggggcaagctggagcccaggtgggagggccctttcattgtcaagatgaaggcctcccccagcgcatacaggctcgcaacgccaaacggcgaagacttggagcattcctggaacatcgataatctccacaaattttttgtctgactcaacagggccagctcgcccttgtaattcgcaaaaacaattttattctggccgcactcttttcctcccggggggtgaggtttttaacgaggcggagtcatgtaatatacaagtgaaaaatcccccgcaaaaatctacgtcgaaaaaagaccgcgccgacggtctccgacattcgaccaatacaaagc

SEQ ID NO: 100628 - DNA, 739 bp, Zea Mays
gcgtcacccgtttcctacactcttgagcatgttggattacgaggaggctacactagcgcaacacttaaatttcgaccccataaaaccaagatctactgctgttataggtcacatgattaccactatacgcgcaatacatcagaagccatctcaatgtagacgaatgtgtcgagaagtgtcgtgcagtcatgctagtgctagtgctcgcgtggttcgtgctagtgctccagatgcaacacctttgaggtatccacacgtatagggaggaagggtcgtgtaccaaactactaggttcacgatggcggcttgacaagggcgagaggggcgcgactgctggtttgctagtgcgtgaattaggttaaccctaaccgcgcctccacctctcattatataggcattcaggtgagcttctgactccgaggcacatcagcaaccctaaacccagtctaattcagatcctttccaaattaggcttccatccccttaactgtgtgaccctataggttcacctacacataaacatggcccgattactcttacttagcccaatagttgacagtggcctctagtaggcatgtcaactccatgcgcacacaaagatcatatcagacgaaccatcacaacattacatacatgatgttccccatgtctcacaatatttggtcttgctccaaactggcctctctttctccatactatgatttggaatccttttataggttaacacttaaccccagca

SEQ ID NO: 100629 - DNA, 432 bp, Zea Mays
ctcgggacactattttgcaaaagaccaggggctgttttataagaaaccagggtccaactataattactttatactaggataggacgtggggttgattcgttagaattttgagggtgtattcgcaaaaagggatcagtgaaggggtacgtgctgatctgtgtcgtctgatgaagatccgggggcctagatttacccagctgaatcggtattgaccagatatgatcctagctatccaaccccgatgggacggtcacaaagcattgcgacgaagggatatggccgtgtctaatccggactgcccatttaaatccaacggcccgaggccatcttcaacctcccgtcgtatgggcacggcgacgcgaccaagttttgccacggagttcaccggggcgacaccgcccgtcgcactgatgcccaaaactcaacgatgac

SEQ ID NO: 100630 - DNA, 706 bp, Zea Mays
cgaagagtcataacagagagtatcaagcatatattacaacaaaagatcatgaatctctcgactaactcccctagcactcacaactctcatctctctccctttggcggcaagcaccaaaagggtcaccctaacctagagaccagaagtagaaggaggaggtgcatgcgcattagagcgagggagagcagtcagagcaaaagtaggctggggatcagagtcaatctcggatctaggagagttggtgttgactctgacgctgtctgcggtgcctgagttgctagcgctggagctgaaacagagatggtcacgacaggagtagaaactgctgaaactggttgcactggcggctgagtacttatagctccgacgacctgagtcgagaagtccatggtaaccgaccaggatggagagaaaatcgtaccaaaggagtgtagcttgggtctggactggatcgctggcaccatggaagtatgtagagctagtgatggagcggattgtactggaggcattggaacactggtgtgctgaaggatacgagtcatgaaagcccggtgctccgccctatctaccagaagttgttgaagtgtgtactgattgatgtggcttaggaacgagatcgacaagcaggtagtttatataaagcactcaatttctacaacattttttgcttcatgaccacatttactaatttctgcaacattttcag

SEQ ID NO: 100631 - DNA, 1170 bp, Zea Mays
tgctctcttaaataatgcaacatgcagcttacttttcagtacaacagccaatgaggcaactctcgtgctagtccttcaaaatatgggtcattttggcactcatgtataggagaatatagtctgacttgaaacaaatcatagtttgttatagtagcatttataatctgctatatgaagctagttgttaccagcggcaaagcgtactatcaggaagtgaagaaaggccaacatttgaaatgtgaactcgtaattaggctgcagggccaagttatgaataatcgcgagctaccaaagatcaagcaaacagcacacatgtaatattcgcatgcatcaggaccaacacatccttcatcatcattaatatgctgtaattatgaagctaaaaataaacaaggtcaaactccaatttgacacgataagagcttaacctgatagcatctttcctaaagagaatatacagacatctaaaaaataaaaaacaaatcaaagttcatgaactgcaaacaccaagatcaaacgccagatcagcctataactcaaaaagtacaagggcttattcaaggtgccatgcatcaggagaaaaacatccattgctaggcaattccttgaagctcaaacctaacatttggtcaggctcaagtgccgatccgatactatttaacgaacacccaaacaaacctgatgcagcatcaattaaaatgcgttgtcaaatctgaaaaaagtcccctcaaaaaaagaatatccctaggctcattaatgaatgaacagttcatgtattgcaaatcgtaagatctatctcccataacacaacaagcaaataataaactaatgagtaatgaggcaccaacaaagtatttaaatatcaagagaacctatttaagacgacagggcatatcaaaagaaagtaatcaaccaacaaggcactaacaaatcatttaaatgtgatgatagcgtttttttaagacattggggcgtccattgcagcatagccaggtggtacaaacccaatagaaacgctctagctacgccactagcttatcaatctaagacataactagagcccttcaaaacaaagatgagaaaatagcatgctacagggtcacatctgacaactagacatgtccaaaaatcgggtcgggtcaaggtcgggggacatttatcacggctcat

SEQ ID NO: 100632 - DNA, 507 bp, Zea Mays
ttatgaataggctgcgtacccagaatcagcttgatctcaaaagctgcatcgcgctccggaggaatgcctagaagctctgccgaaaacacgtcagcaaagtcacacaccacacggatgtcctgtacccgcaaggcagcctcaccttccaccaccatggagaaaaagattcccgacttccttgaccggcgatctagaagaaattgcgccaacaaggataacgtgtactttggggaacttcccaagaataccacctccctacctgacgacgcctgcaataacactgttttccaaaaacaggatataactgcgcgatactgagataaccaatccatacctaagataacatcgaatgcccccaaggaaatcacaacaagattggccaaaaagacctcatcagcaagaataacggaacacccctgacaagctgaacagctactaatggagccattagcagaactaaccaaaattgggtgacccaacctctgcaccgaaagaccagcccgcgac

SEQ ID NO: 100633 - DNA, 957 bp, Zea Mays
taagcacgagcatgttgcaccgtcttaagtcgtcgccgacttaagccgattgctctgttagtagggtatagtggtcaccctaagtcgagtaagcgtgagcatgttgcaccgtcttaagtcattgtcgacttaagccgattgctccgttaatagggtatagtggtcaccctatgccgagtaagcgcgagcatgttgctccgtcttaagtcatctctgacttaagtcgattactccattagtagggtatagtggtcaccctatgtcgagtaagtgttttgattccaagtttaatcaagtcgaagtcgatggataaccaatagtttgaatgcttttgagagtgaaatcttttattgaagacgtcttttccaattacagaatacaacattgctccgatagttcttgctaagggtaaaacttcctgaggtgctctatattccatgaattccctacttccgtgccatccatttgagtaagccgatatgatcctggccaagtgacctccgacaccatgaacggcccttcccatagcggcgataatttgtgccattcttctcctgttagaatttggcgaaggacaaagtctcccactacgaaggatcgatgtcgtatagtcttatcatgatagcgcctcagggtctgctggtatctagctgactgaattactgcgttcaactgctcttcttccaatatgtcaatatcttctagcctggtagcttctgcttcagctaagttttcgaatatcagccttggtgccccaaacctgaggtcggcgggtagcactgcctccaaaccatagaccatgaagaagggggtgtttccatgtagagctcgactgggttgagttcttaggctccaaaccacataagctaattctctgatccacttccttgcaaacttttcattcttgtcgaagactttcttcctgagtgctttcagtatcatttcattagccctttc

SEQ ID NO: 100634 - DNA, 2905 bp, Zea Mays
aaattaagtacatgtcaaaatattttaggtaaaggataaattaatgtgtatcttgttacaacatactatagttccaataattatgtttttgttttctctagctaacacctatcgtagagcttttcattgcaagaggtcagtaaatatccccacaacgattatatcccacctataaataaagctttgattgtttgaataatacctaacaaattttcaatattttaaaaaagaatgtagttatgaatcagtgacctggaatccattagtatgacctctctgtaggttttccacagaaattctctaatgacgccaaatatataattatgctaataacgactgagcaattcacatgaggttagttaaattttattaatttaaagggttaagttggtacaagtataaactatatggaaggactggtcgttacctacaaacgtcttaagagattattggaccacctcatgaaatggtataagatatttaggatatggagagaattgaattggcatgttgaatagctccacattagtatgtgttcgcaaggtcaattctagactatgtccaaaattccaaaattaccacgcccacagtttagacaaaacgccattccatgcaatgtatatgtacatctttgttggagtaaggcatcgaatcattggacattatcatggtatgaaattgcttcgattcttgacccctatacattttagaatgaaggtcatatgagtcagagaattacatggctatattgactttattttaatgtttgatgaagcaactcacagcgatgtcctatagaatgaaatgttagctatcatagcgtctagggaacataacaactatcctcacaacaacactctttatttttggaaagccaatgacttcaatgtcatcaaataacatgaaactacaagaaacacagacttttgattaggtggcccatgcataaaggtgcgacatgtgaaatgtgtacttatggagactctaaaaggaagggaggtatgactgcaaccgtcctattttggttaagtacagatggtgacattgatcttttagtattgatcatagcatcattataaaggtacagaaaaataagaaaggaataaataggatatcaaaaatatcatcaacaaaccaaacgagttgcatattataaaatatagtgatcacaatttatttaaacaatttgctacggttgttttagtgtgtatggggagtactgcattaggtggcgctagaagaaacttaaagcaccataaagtaagattggtaggtagatgcatttaactcattgtttttgtacaaatacctataaattttgttgtgcatagcatagctaccgcaaaagtgagtagtcttgggaatgctcccttataacaggggaagaggaaagactcagaaataaatattgtgataatatgtttgtggatttgagcatatggagaacgaagcaaaaaataacaataaaaatcttgcaaattcatgctcttgttatcgtcgctaaaatcacggttacacctacacgatattagcacagaatagaaaatataaaaggaatttgtagaacatcccaatgcagtcaagtaaaataggttaccacctacacgattgattttatgtcatgaagctctagaatttttctatgaagcacaggattctatcgaagagcacaagtgaaatgggaaaaaataggtacttgcagtactgcttctctaccacttttattttcgtagtgttcaaccctaaaacactaaaatcatggatataaactacttactatagacaagaataaaatttgcaaacattctaggttggtacaaaaacgatcctaatgcagtattggaatagggtacctcctttacgactgatgtggtctcacggagtaggatcctcgggcaccaaaatcaaatagaaacaggttacttgagcctatatagaaagatagagacatcactaatgatgaatacaataactctcaactcggaacaattaaaccagtttccaggtgaacattaagtgatcagtttaaggatcttgcatggaaaatctaactgctactgcagtttaacatctaggaaaatctaactgctattttagtttaacatctaggacaatgagattccttgcatcttgatgttgctagctgctaagtgcttgttatttcagtttaacatattgaaagaaccagcaaagatcatgagatcccaaattaggtaaaaatggaacatatgaataagagtaacttgacacatctcagccaaaaaattaaaaccctaataaatctactttgatctagaaccgagtgatgtctagttgcagtccccaacgagattaatctctgacccctgatacttttatatttctagagagattggtattctgtttcatatatgaaccatcatgattttcaattaacagacatctctcatagacttgtaccatgaaccataaatgaaagaggcggacatcgttctacccctcacgtgctacaaaccacatccatgttaaccaaatggtgttacaacttgcaaggttaatttcccgtttccatagaaagacactaaattaagtattaactggaaactacaagcacatataggaagttactcttattagatcagttacattcatctgcttgttttccatgtgtgaaatatctagtgccccaatgtgactttatatgtctaagaatgtaagaagtatattaattttgaaatacactaacaatagtcataactgaaaacacagaaaacacactgctagacacacaaaataggaagccaagtacgtacacaagaactatgtagagtcttgacaaagtggttttgtcatgtaatcagtatttagcaattatttttgtacacagaataggaaggcaccaatttgaacacacaagattctgatc

SEQ ID NO: 100635 - DNA, 389 bp, Zea Mays
cccaaggcgaggtgttgggtctgatgtaacccttctctaacaactcctctatctgcttcttgagttccactagttctggtttggacactctttaagctctcttagaaatgggggcggtgctagggataagctctatggcaaattcaacttttctctcaggtggcatgcctgataactcctcggggaacacatccaggaattttgatactactttgatggcttcaagcggattaactatctcactatgggcagttctctggtgacagcttcctttccttgatctagacaagaccaactccaccaacacttcttctcatgacaaggacactaacttcacagtcctcttatcacagttaaggcctacttggtaattggtcaaccaattcatc

SEQ ID NO: 100636 - DNA, 500 bp, Zea Mays
gttggatacgcggatcgtccggtgcatgatcgatggacgagatcagtccgcggtgactcatagaatacgaccaagaaccgcgtacaaagtcacaaacattcacgcatgcatgaaccggtccaatgcaacagtaattcacgagccgtaggccctagcaacaaggcaatgagagaagtgtgaacacttgctgaattattaataccatttccgtggggggcaagagagagagtcgatcctagtgaatcgagggagaaacagatagttcacgtacgtttggatatttcaaacttcagaatttgaaatcaaatggaccgcgccgatcggatcaacagtttgaaaactaaaccgtgtaaataggcttaggccgcttgaccagagaacaaaattcagacgtctcgcgagaatagtactgctagtaattaatttcgtcctttggtcagacatatggacatatggctaataacgaacactataaaaggaagccatcatgcatgcgttcc

SEQ ID NO: 100637 - DNA, 363 bp, Zea Mays
aaccatggacaagattgatgccctagacaggatggttggactcgagatgagagaactggctcaatgtgttttccgcagcggtggcagctccgtggatagagagacgaggcagacgtttctccatgtgaccaagagttactactacgttgcactctgctcgcctgaaacagttgagcatcacatctccaaagtcttgtttgaggatgtcgtctagcaacgatgtttatattagagctccaattctagtgtatccttgtgcatgcaccgtgaaggtgtcatatgatgatgttgtgcccagcttttctctttacgatatgtaatcagtttatattgattggtggttcttcagggtttgccagattt

SEQ ID NO: 100638 - DNA, 537 bp, Zea Mays
agattccctgttgatgataaaggaacaagaaagactgtagtgcagtacttcttggacaaatatgactacagattgaagtatgtctcttggccttgccttcaggctggcagtgattcacgacctgtatatttgcctatggaggtactgtgtccatgatcattcagttgtacctgaattattcatgttatgttcatagtttcaataaaaatggttgtaggtttgcaagattgtagaagggcagagatactctaagaagcttaatgacagacaagtgacgaacatacttagagcaacttgtaaacgtccccaggagagagagaagagcatacgtgatgtatgcttctagacctttattcctctgctgtttttagaataattattatctcttttggatatcatttttattgacattttttatgtgctgcatagatggttctgcataacaagtatgcagatgataagtttgctcaggagtttggcatcgaagttagcagtgatctagtgactgttccagcccgtgtgctgcctccacccctg

SEQ ID NO: 100639 - DNA, 368 bp, Zea Mays
ctttgatatagcgccgctcggagtggctttgggtcttgcgctctcgttccactcctctttctctgagtcgatgcatgtacccctcctctcgttctctccctttcctgttcctatccttccctcaacggttatggatactccccttctccttctcatcatccacaacccataattttaaacaaaaaacacagcaacattgaactcgggagtataaaatccatgcaccgcagccataagcctaaatgtagtccacatatatatactacgacaagaaaaggatgttctagttggcatcgtcgttgccactcttgtaaaagatggcgagatctccatcgtcaccggtgccactgaggaggaagtcgtccacg

SEQ ID NO: 100640 - DNA, 433 bp, Zea Mays
ctgcccccaggtgaattcggcatcatttttaagccgaaggataggagtgaaggcatcaatcttcccggctaggttagagataaaccttcgtaagtaatttaccttgtcgaaaaacttttgcatttcaagcttacatgtcggaggtcccacattccgaatggatttaattcggtcagtgtctatctctataccatgttcatgaatgatgaaccctaagaacttaccagccgacactccaaaagcacatttatgtgggttcatttttagaccataccgacgcattttatcaaaggctttgcacaaaaattagctatatgagaactaaactcagccgatttgactacgatatcatcaatgtagacttccatagtgtttcccaataactcatgaaagatcaaattcataccctctgataagtagcaccagcattttt

SEQ ID NO: 100641 - DNA, 654 bp, Zea Mays
tctaagggtgatgaaaatataggtaatactaagtaacatgaatttgatctaatgagaaagaaaaaaaaacatatcgagcggtagacagtgtcaattgttgtagccgtcccgtttggtttggtgcagttcagtgaggcagcagtgccgatcgaaaaggagaagatgaaacgttgatcaccagttcaccaccagcaccagtaagaagaggataaagcgagcaagcaattgtgccgcttgcatacactctcccaatacataattaccggtcttcacctgaggaggtcaactcgatcacggaccactttcggaggcttgttcttctaatacttgtacgcacgagaactggaattggagttcttgggtaacaacataagcaaaggcaaacccaataataataacatgatgaagcttatatagacgagttagaagaattgagcgggaccagtagatcaacacaaacttcttgtatgcaaaacatcgcgattaacgattgttccatgtcacacctcgtctcgactctgattgtagcgatagcgcgcatgtgtggctcatcttcatcattgttttcaacaatttcatgtagaccaacaatataaattatgttaacatcctgccaacatcccatatggtgctaaactataacacacaccttat

SEQ ID NO: 100642 - DNA, 670 bp, Zea Mays
gccgatctcaggtttggggcaccaaggctgaccttcgaaaacatagctgaggcagaggctactagactagaggatattgatatattggaagaagaacgattgaatacagtaattcagtcagctaggtaccagcaaaccctggggcgctatcatgataaggccatgcgacatcgatccttcgcagtgggagacttggtccttcgccgaattctaacgggggaaggacggcacaaattatcgccactatgggaagggccattcttggtagcagaagtcactcggccaggatcatattgacttactcaaaaggatggcacagaattagagaattcatggaatatagagcatctcaggaagttttacccctagctagatttcaaaagctatcggggcagcattgtattctgtaatcggaaaatacatcatcaataaaaagacttcattctcaaaggcactcgaactatttattatcaatctacatgcttactcgacttaggatgaccactataccctactaacggagcaatcggcttaagtcgacagtgacttaagacggtgcaacatgctcatgcttacttaacatagggtgaccactatagcctactaacagagcaatcggcttaagtcggcagtgacttatgacggtgcaacatgctcacgcttacttaac

SEQ ID NO: 100643 - DNA, 380 bp, Zea Mays
ctagggcgaaggctagagacactatgttgatgccccatgttagtatggttaggtcgacgcccaaagtctctgcccctagtggggactttgggaatccagattacaaagtttttgactttgagtggacaacaggaggtggtgggtccatgttaggtgtgcttttttaaatgacttatgttggccttggtaggttacctcgccttggtctcggtggaaccttcactgctaggtacctgcccttaaggctggggcataggggaaattctgccaatccatttgggctggcatgatggcagaggcaaatttgacagaggaggttctgaaggatgccactatccaccttcgttgtgtaagtcgccacactcttagtttttgttgtt

SEQ ID NO: 100644 - DNA, 452 bp, Zea Mays
gtcgatgcaatgatttgctggtccaagcagggacagctgagctgcgtcatcattgtgcagccgtccccgttggttgatgatgataaagttgcgcgggatatattttgttatttttgcatccgccgcggcgcgtctggacagtggaatctggatctgcaggggttatcaggtaaaagctggtgttggttccagatgcaacagcccacaggccttttggtaggcgtaaggatgtgttgcgaaaggcagcctggtcgaaaacgatgcaagtagtctaccatggcagaaaggaagataccgtgcgtgtgcgtgtgggaactcagggaaggggagtgttgcttgttgagagcgttttctgggactggggtatggaaggcgtcggtgacgtaggcccagcatttccttttccgagtgcagttgagttgagagcgaaggcacaccagcacattaaaccc

SEQ ID NO: 100645 - DNA, 413 bp, Zea Mays
atgcatcttcctgaagaacagcaagaacagaaggcctccttccctcaaacacacaggcatttcggtgtttccaaatcacccaagcaaccaaaacaatgatagaattgagtccttttctatgctccttaagaactgtcctaacagagcttctcttcttatacattcaagaagaaaacaaagaatacgatcttgaaacactagtccaaagaatgatattcagattatgccactcaagagtttaaatttcaagtcttgaaataccatgtgtggagctggacgtgatcttggcgtggtcagggaggataagagtcatctcgcctggaaaaggtaatctgatttccattgaagtgaatggaggtgtgagtgtacaccccctcaaatctgggtacctatttcttcttatttacaatgcc

SEQ ID NO: 100646 - DNA, 1164 bp, Zea Mays
tgttgatcaatccacctttgttggttcttgatcaaagaagacaatatgaaacatggtgttggcaaaccaccattcttcgttgagtcaaattactcatactaaagatctatataccaacatatctttagagaattggctcatgggtctaggaaatttgccttaacaacacttacatggccctacatgtttgagctacttccttttaggtgaagagcctttatgcaaacaataggacttgtaatgctttgttctcatgtctctcactctctgagtttaatagagtgggacatcttggtatggcccatgagatctagactacactcaacaaattacatggggtaatgatcatgtgaaaatcaagctcttttagacctgccgttgagagtatgaaaactttgttagttcactaaagagaccattgattttatgttttctcacttctagtttattatgaataagatgcacacaaataagttgcagttaccctatgatgatcatgagagagcactcaagttacaacatggtctagatcagagagtcacccaactatgagaccctcactatggataagattttcagcaatatcaagtccacagaaatcaaccactagactcaagacaatattgagaacccaactgcaccactatgctccttcctcagctagcccttcacctgttttattcgctttgttctctttgttttctatttcagaggagttggtgcttgtgaccaatcagtttgtgtggttccctaacaaccacatgaactgatggcataatgggggcaaggatggttgcttcaactatggagaccccaaccacttcatcatcaactacaccaagatgaagggcaagccggaggctggcaagtgcactaccactttggtcgacgcaaggccaagcgcaagtacacctccaacaagcagaattccaaggggaggtttgactaggagcatgccttccttgctccctcggcaacattaataatgacttcgaccacacttcttcctcgagcagtgatgagctcgagaggtgagtcaaggacaaacttaatggattgtgcttctttgttgacaccgccaaatgcctcttgaaagtctcctagaggggagtgaataggcgaaacttgaaatttaacacttaatacaaaaactcaaaccccgat

SEQ ID NO: 100647 - DNA, 1063 bp, Zea Mays
caatttttgtgccgccgcctgccgttagcgcttgctggcggctggcgccggtggagaagaactccagccgatggccgacgctgatcttcctcttcctctcccggtccgtcctatcctcttcctttctcgctccgcttgttcactgtaatggtgcaccctaaccctaaatggctaaaccttgatctgcgccaagctcgctcctctacctctacggctctatcgtctgccttgtggttggtggatctagtgctccggtgttgcaggtaaccctaaatctcgttccctcggtcctttcttcctttctcgctccgtcgccgtgagtcgtttgtgtgtgtcgtcttccttctcggtttctaggtctcgacgtatcatcttcctttctcgttctctcgctccaccgtcgtgagtcgtcttctttcttgttctctcgctctgccgccgtgagcacataaccctaaccctaagctcgatttgttcaggtgtgcgccgtgtgtgtgcgccacgcaccatgaggagccggagaacccgactaaggcagtggccatgtccacggactcgactgacgatgagctcaatctcgatgccgtggtcgaggagaggcggcttgaagcacataatgaggtagaggatgcccggtgcctcctccttggtcccgctaccatcgatctggatggcgccggggcccaaacgacccgaacatacacgggctccacaagcccaacggccgacgcgagcacctctgtccctatgccaggtaaacgttctaggaggagagctccgacctctaaggtatggctgcaatttgaggaggcaactgtgatgcaaaatggtaaggaggtaagagtatatgccatttgtcttcactgcaagaatagcatgtctgctaaatcttcatctggaactggccatttgatcaaacacttggatctttgccctgctaagaacgagaaggatagatctgggaaatctcagtctttgcttaaatataattcagatggatctgttaatcattgggagtattccccttctgttgctagaactgagctttgtcgcttaatagcta

SEQ ID NO: 100648 - DNA, 582 bp, Zea Mays
tggaactcagctgtctggagggcagaaacagagaatagcaattgctagagcaatcataaagaaccctaagatcttgctactggatgaagcaaccagtgcgttggatatggaatcggagcgggtggttcaggaagcattggttaggataatggttgaaaggacaacaattgttgttgctcatcgcctaagcacggtgaggaatgctgatgtgatatctgtcctacaacacgggaagatggtggaacaaggtatttgcttattgaccttaagaaaacttatttttctatgttcttcccataatcccatttgcagctttcctaactatcatctcttcattttgcaaaactgttcaatttctgtgaatcctgagcaggttcacacgttgacctgatgaagctacctggaggagcttacactcagctgattcgtctacacgagactcaacaagaggcagaagatgtccaccctgacatggaaatttccaggagatcaacaagtaaaggctcctcctcttttgggcagtctatccctgctccacttggctcacccgatccaacggaagtcagtggtgctcctgacaca

SEQ ID NO: 100649 - DNA, 487 bp, Zea Mays
ttcttgtcgtctaactgttgttcgtttcttcccctgacggatctttcttctttcctccgatccggccctgcatactgcattgctccagcaccaccagtcaccagtacgtctgctgccatcgtgctgagacgtatagtagctcgtagtacgcccacattgacgacaacgacgcatgcaactgaccctgccccccctctcgtgttctcgtcatatgcatgcatgcatgccactcgatcgatggatggagagcttcgttctcatctgacgatcatggacaagccatatagcccatatgcatggtcgttctagggcaaatactatagatgactagagagagagagagagaacacgaaagagccagtaggtgctagctagttgaatgtgcttgaatgcgtttatatggccgagtaactgcatttgaatgcctcatgagcagggaggatggaagatatatatagatatataaccatatctccgtctaaaaagt

SEQ ID NO: 100650 - DNA, 999 bp, Zea Mays
gcccaatccagtggatgtttgatcaagatctttataacaaaatcaaagctagtatgtagagcaacaactttgatacgacggattggtagcttcccacattaaaattgaagaatagggctcctcgagttgctctgtcagaatgactgatgaagatcacgatggtacaatagatgaaaagatcttcagtgctgtgaactcgtcgccggtgatctccgcgccgcgatccacgccggagctataatttgtgcttagtagtgcgtggataactgctagcggtgaaacatcttggtgttgggatgagctcgggccatgttgtcgctcagttcgccgtacccacttgcatgacgacgtggccggacgatcatcaccgtggtggccaccgttctttgcgattgcgccatgccatgaacatttcaccatgttgctataaccgtggccggcctggagttactgctcttgagtcgttgtaccggcgggcgccacgacgaactcatccagtgtaatatcccaccgccgccgtgatcgtcttcatctcaaattggagaagcacatagccagttcctttaaattgagcactaccctcactccgcctctctattatgcgctcataccacccgcagttagcctctatcgtgcaccatagcccacagtcactggatttcccccaaatcaggtcactcgcgctgtcgtgaggcatcctgccatgatcagccatttctaggtctattcatccccctctgttccatgttttagcctccttgaatgttcacgttgctcttcggcccaaccgattgagcgctaccgtgatagggcatcgtgaacatcatctcgccaccgcggaacacctccgagcgtgcactcatgtcgacccactcttccacccccgttccgttcaaattcacacatgtacccgacctttgatgaaccagtgaaactcccctagcttcaatttaaacgctaccacgtttggttgccttagaacgcactcatcggagccct

SEQ ID NO: 100651 - DNA, 278 bp, Zea Mays
tggtgattgtgaacgaacgtgcttccctcatctttattccgataataaataattggaaaatgtgtgaagcattactgtcctataagcaaatttctatctttgtttgttgtgtcctttagatatgtgtttatgtggtctgtggttcttcttagtttgaccactagtgcaacttgggtttgttttcgtgcttttgttccgatagaatattggtggtatgtctgcataaagtcaaaattagaccatgtcctcacctaggagccatgacccaaatcgatgtt

SEQ ID NO: 100652 - DNA, 609 bp, Zea Mays
aaccgtatatcaccataaagttgtgcagtggaacaggataatcgagtaagctatagctaacggcactttggacccaatattaaaagatgtcgattagcgagtcattcgttggatcttaggtcgggcaggtttgactgagaacggcaaacttttgcacccagaattggtaggcgaagtttcgacaaaaattcaagaatatgcagaaaagagaaagaaaggcgaatttaagcgtcggagggagaatgacatactaactgcagcactaggcaatcctgaacacacaggacgggttcagggaatctcttctaagatttcctggagaaggcgtttccagagtatgcggcgtcatataggaaacacgagaagtcgaaaagaacccttgaagagactattgatgaaagggtagaaaaggctattaatgacgtgataaagaaaatgaagaaaacagaatgcatatcatgtgaactcaagtcaggccacatgagtacacctctagtccctagcagcgtaggatctgtgcaagacttcgtatcgggcaccaagtaccctgtagacgatattgttgaggacaagccttgctttcttcatattccaatcaatcgatctggg

SEQ ID NO: 100653 - DNA, 327 bp, Zea Mays
ccgaacttttcgttgtgggtgagtgttgttgattctttaaccttttcttttgtcgttccgatagaagcgtcagaattcgaggtcgaattctttttaaggggggtagagtgtgatacccagtttgcaaagaagagaagttggagtttattctttctgtgttttgttttgtttctcttgcgggtagtgtgctttagggatttggaagttgggaagcattcatcagtataacagtagactggtcgatcgggagctgtcgtgcaagcgagttgggccgtggatctcaatccggcccactagcctccccctaaccctagccccccctttctc

SEQ ID NO: 100654 - DNA, 500 bp, Zea Mays
tctccaagcgtgggacaaagctatcaactcgtaagagatgcactgcacgtatatatatacacgtagaccattgtttacttcatccgagaactagtgctccgatctcgatggctttctcatcaacggggcgctgagcctttgttcattcatcgctacgtacgtacggtgaaagtactagctagggaaaaaggtcgtagtagctgaagcgtgtgccgttttttcagattgctttggaccatccagaactcggagagcgaaaagctaagcttcgttcaggcgcacctcttgcgtcgacctctgctgctctgtagccagccgttatagccgacagctgaattgcaactcatacccctacgactgatgactcgaccagtaagtaataaacaatcgatctatggacagcaggaaatttcagacagtatcccggccctcctcgctgcactggatacctggcaaccttaggaattaagcatcaactaaccatgtcaccgtgatcttgc

SEQ ID NO: 100655 - DNA, 1235 bp, Zea Mays
ccccaccgttaacatcctccttctggacctgaccgccatcggccttgctgccattcacattttctcctctgaactgttctctgtcccattcttgttgcgatcaaccttccctttgggatcacccaaattatccttatctttcctgctgccttcttctccgtcctgatcaaaagcaagcggcaccgggacaccatccaccaggtgcttctccacccagtaatgcacttcataaataactctgttgatctccacctcaccagcagaggggactgcttctggatcaattacacccaccatcatccgacagatgccatgcttccggaagaattccatgtcaacctccatagtggtgccaagcgtagacccaactccccaaatatgtggataagtgcacagtgccgacggtagaccatcaaactgtatccaaacgtcagtaagagtggccttcactcgacccccggatgaactagccttgaactcaagaattgccttctgagacttagcctggaccggaccccattcgatcatcctttgcaattccgctgctgcaggaaaggaagtccgaaacacctttggggtgatttgatccacgttccatggaccaagtccgggtagcagcctttccaactctcgaatcacattgtccaggctaatactcccctccaccacttgtattattgccaacctgttctcattgctacccttagtgagcttcttgttggaggggatgtgaaagaaaccgccatttttatggcaaaaccagctgggatagcatgcaccttaggagcgttaaacaccggacatttcagcttgatatggtgtcagtaccacatacttcgcagaataactccgctgtacactcgctcatcacgtggcctttcccgtaacacctatggcagtaccccttgctattcagcttgccctcctccttggtaccttccttctccttgttcacagtaatcttcttctcttcctttgctgacgctgaaggaaggagtggtccagcatttgcactcgcctgcttgtgatcggcggccctgggctccccaacagccttctcagcattcataccttgcaaagcagtgagtgcctgctggagaatcgttgccagtcccgcctggtcgctaacaccagccggcacgatcgtaccactcgacgaaccgtgcccagccgtgttccctgttggcggctggggaaagcaggaaccgccaccatctgtctgcggtctctcttca

SEQ ID NO: 100656 - DNA, 426 bp, Zea Mays
gtaattgcgagtacagtacatggacttcctcatgcaacgtattgcaatagacctgcaggtcgtcgacagttgagctaagttccttaattcaggtctgagcccttgcttccttagcacatgccagcagacgggactgtactgcccagtcgagtgctaagtcccgatcagcaagttgatcctataggtgacggatgtcccttcttagttcatttattctatctctgtccgcgacccaagcatcggtcctgtgttgcagcgccgcttgaagtcgactcactcgggcttcaagatctcctattgggtcattactcccactgctactgttttcatgtcgaggggccagttgatgccggggcacaccgattggtccagttgacttgcgcgccgttagccttgtgcgtggcggcatctttctaagggggaaaa

SEQ ID NO: 100657 - DNA, 857 bp, Zea Mays
gtccacggttagagacctggactgaggggggaagatttcggcgggggggttactgggtccattggcgcctgactctgttggatttgcgtgtgccgttgccgcgattctgttactgactgggtggggggaggtcgacgaccgtgcacgcggttctagatgctgtgtgctctggaacctcctcctaggaccgtgggtttcagtacgcttagccacgtttctaggctaacagcacaattttgtcgactagttctgcaaagtgcagtcacggcggcgtcgtattttgtttgttctgtgcgcaggcgactgttaccttctgctctgcttctgtacgtgcattgttgttagggatattctaggggcttgttttaggaccagccgaacatttccgtgttttcaatgacttgagagtacttgactgttttgcctgataccccagagttgccaacaagtagtcaaaagcgcggtaacggtgggcatcattgttttttttttgttctgcgtatgtgtctgggatggtacctactgctcatgctctgctaggacatcatactgtatatgtacattgtgcaaaatgcgctaccatgttgtcctaagattgttatcacaccacatttgatgctttgatcatgttgtttggagaattttctgaattccttttggatggctaaccgctgtgctatatgaggttatgagtgccaccagtgccaccagtgccccattgattctaattcctggagcaacatggcttacgaatgttctactgttctactcctatgtgatggtagtgtggtaacaggcttgcacatcacttgaaatgggcgtattatacgagcctcgcaagaaactgctccagttcc

SEQ ID NO: 100658 - DNA, 324 bp, Zea Mays
cacaaatcgaagacaagggtgttcagattatcaaggaaatgatcaagcagaaagcagaaaaatacaaatgcttccgtcaggactgcaaaggaattctctggtttggagatcgattggttgttcccaaggaccctgagctcagaaagaagatattggatgaagtcacctttcaaaattctccatgcaccccggcagcaacaagatgtatcatgatctcagatccttatactggtggactagaataaagagggaaattgccaagtacatatccgaatgtgacacctgccagagaataaaggccaatcatttgaaggtagcaggccc

SEQ ID NO: 100659 - DNA, 473 bp, Zea Mays
ctgacccattatggttagggttttgagtctatatatatgtaaccatcctatgcaatacacaagctttacattatcttacacttagtgtattggttagtttccttttttagctaattgattgctgattggttagttttcttttgttggggagaaggccaaacaggacctcgtcgatcattagtctggccggctctgcctaatgccctaatctaccttcagacttcattccaataaatgcaaggctcgctgaaggttgcgagaactaccaaggagacttcaccttgcaaggacataccctccaatatggcacgcaaagcctacggttgccgcccttccgtcgaaggcgacaaagaccgtggcgagatctttgcctagggtggcagttgacagacacactccgccagcagcgccaaacatcagaaatctcgatcggaggcctcaaacacatccgaaggcccgatcgactagtggac

SEQ ID NO: 100660 - DNA, 667 bp, Zea Mays
ctagtaaaaactcaaaacatatgtaatagataaaccattatatgtgtgtatatatataatgtgtgtgtaactatggttttgactaagtatatgttgctatcgctatcacaaaggtttatacaacttaggttctaaacctatcaactagcctaacaactaatcaagggaggtaaagcacacaactaagatacataatgtacatgtggaagctaaagagcactagagatacaactcttgttagacaatgtcaatattttactaaggtgttaagaagcatgtaagcttttccctagtcctcgttaaagcccccatgcaagggtgccatgcaagttccaagctctcggtgtaaatctgtgcatagccttggaccttctccatatgtaagtgggtctctagaatagactctccccaatcgctccctgttgtctctattattgagtttctggccaaaacatcacgagcttcattttgtccagtacaaggtggtgaccacaccataaattagtttgatctaaaatgactacaagcccctccatgtacaacaaggtacacataaggaccaataataagagatatgcaaacctcactcaagcattatgcataaacctagagcaaacgctataagcgatggtctaactaacctaagcaattcgcaaagtacctacac

SEQ ID NO: 100661 - DNA, 625 bp, Zea Mays
gaaggtttcacttcgaatccttttggaccaagctggaaggatttcaggatgttcaatctgggtggaatgttgtgataccggtcctttgcccctttaaaactgtagaaaggaagctcaaagagaccgccaaaaggttataagcttggagcgaaaaaaaggttggtcatgtgcattctcagcttgctttgaccaaggaagtcctccacaggcttgaaatgactcaggatattagagtgctcatccaggttgagatatggctcaaaaaccggcttaaaaagaaagctttactgctatcctctctcatgcgcagcatggctaggcttagatctagaatttcctggctaaaggagggagatgctaatacaaaactgtttcaccttcatgctcgacattgcaagaggaagaattttgtttctagactggtggatggctactatacccttacaagccatgatgaaaaggctgcttgtgtcgatcccttctacaccaacctcattggaaaaagtgttgatcgagatagggtgattgatctcgaagccctggggatgcctacttttgagctgtctgagcttgatgcccccttttctgagcaagaagtggaggatatcattaaaagcctccctgc

SEQ ID NO: 100662 - DNA, 524 bp, Zea Mays
aaagtatctatggtctcatgatattagaaagaggacatgaaaaatcaaaggagtttatagtggaaaaaggaggcggacacaactgcatcgccaaattcatcacacctgcatgcacaaccctgagttgagtgagttccacgtcgtgctctgtagcatagcagaccctgtggtggtactacccgtaacatgttgttggagatgtctaaagtgttggacaacagtgtgccctatgcccctatgtctataggatctcgagcatctcaacgaaggagacagtcaactaatcgctctactagaagtctagttcagccatgatagtaggcccaccatcttacgagtgggacagatgataaagttgttgcttaccaacatccacgcaaggtcatatcccttgatattgaaaagatgtcactgacacatgggacctgcctgtatcaccgagagcggcaagtatgcaatttgcaatggcacgatagtaatcgacattaattaaagcaaaaaaatcaatgtttttttaaacaaaa

SEQ ID NO: 100663 - DNA, 730 bp, Zea Mays
cgagcacaacaggagcattttttcccaatcccagagcatcttttaaaacccctagccttctctcgaagtctggcactccttctgacctcagtgtcgaccaagattgactgtttcttcctcttgacgggtttagcaggcaaaggagactgaggttccacatgggagtcctgactaggagggggcaggcacttggagggaatcttgatcgagacagtttccatgctgggctcaacgaaggcagagatagcaccggacaataaaaatttcttggcccattcaaaagagtccggcctcaacagtaggcccatgaagaaagcatcccacacctttgggactggaactaattctgagttggtggggaacaagtcagcccaagaagaaaggcgttttctagccaggtaatcttcatatgcaggatcatggttgggctgctccaagtgttgcatgaagcccacattgatgttttcttccacttgcatgttctcctccccctggtcgttgtttccctccaaaagcatacccgctgggggaaaggctggcaaagcaagaactgcatccacaggttctggggcttccacctgagggaagtggacctcttgtgggataatgatgtcattgaagagacccacagattcatatcagagggcagatcttcaaggcctgagagctgataactgaattggtcctccacattattatcatttggcactggctcaggaggttgaacttg

SEQ ID NO: 100664 - DNA, 351 bp, Zea Mays
cgacaactcatttcctagaatttgacaaaccatgtcatgtgtacatgtccccttatgtagcaaaatgattcacagataccaaccacctcgactcccacatcacacaggtagcagtcacggatgggtccacaacttattacaaatacaactcccaaacccctaccttttccaatacccctacttttacacccatgtgttacagggaagaggccacccattcttcacatcctagagtcaaatttatgccctaataggctatctcaaacaaccagaatggtcaccaggcaccaaatattaacaaaactaagtgaggggacactatgagcaaaccctcttaaaggacgactagaa

SEQ ID NO: 100665 - DNA, 297 bp, Zea Mays
tggattcagctaatgatcaaaatgatgacgactttcatgaggaagttatggttgctattctcgcattggatatttgggggagctcttcaagtggggttccacgtgaaccaatgggagagacaggtatccaatgggttgagcgaacattacaaattagtgatgactgctacgacatgttctgcatgcggtggactgttttcggtcgtctacatgatacattggtgagcgagtatgggctcgtaggtagtcgtggagtaagtatgaaggaagtgcttgccattttcttgtgggcatacg

SEQ ID NO: 100666 - DNA, 437 bp, Zea Mays
gcgggccgaaataaaattgttttgcgaattacaagggcaagctggccctgaggagtcaaacaaaaaatttgcggagattatcaatgttccaagaatgctctaagtcctcaccggatggcgttgtgagcctgtacgcgctgggggacgccttcgtcttgacgatgaaagggccctcccacttgggctccagcttgccccgggactctgtccgtgctgtccggacgagtacgacgtctccttcgctgaattccctcgggatgactgtgtggtcgcgccatgcttttgtttgagcttggtatttgtttagagcctgtagggcaaagacgcggtctccgtcgatgaggtccttcgaagtgggctcgtccacgtcgaggatggctgacgggactgtccgtggtgacccatgttttatttcttgcggggtcatggcctccgat

SEQ ID NO: 100667 - DNA, 481 bp, Zea Mays
atcggttccgcaaggtagtcaagcacccaatccatcaactcgtgccttcaattgttaaccagagcccccaaattgctcacttcccccaaatcggtctagaacaccacgcgaagtgacctcgccgtggccagcatgctacaggtccgttcatgttctctggttcctcgtttcagtatccttaggtgcccttgatactccctaacgcatccaattaagctaggacccataagatcactgggaacacttcttgttatccattgatcacgctgtcaccgtggacagggtgatttagagctcaaatctagcaattaagcgaggggaaacggtcgtttaggattgaatttggtgtccagcaaaggggagggctagccgttgcttattctggccaatacaagctcaccagagctcggtccgccgttcgccgtcaaggatcgcgggctgtgaagaaatagaagtacgggggcctatctgcatttgtcaa

SEQ ID NO: 100668 - DNA, 603 bp, Zea Mays
cgaaatcctaatagaacaacagtaggaaaacatgtttttattgttaaaggtttggagggagaagaggtatggtgaaggatttttactatcctttaacaatacacaaatgataagttttttaaatatagttatttagtcatgcgtaaataaagatatttccatttctatatattaaaccaggacccgatcctcccaaaccaaggtggtcacgtcgtctaaattttggaagccgtcggattgtttctccatgatgagatcctaccgtctagctattgcaccagtcatacaatccccgaagcctccggaagcttctggccattgctcccagctacggatcgagcgttttctattctgacttcttccttctaaaaggtagcactcattctttctctctctatctccctctctcattcgtgccatgcattgccatttccccttcctcactcgctccgtccagtcgtcggcgtgccacctgctttcaccgtccatccctctgtcccctacactaccattttcttagcaggttgccgggttgtgctcgcacgctccatttggatgtatgtgtgccacttactcctactattcatgcctccgttcccacac

SEQ ID NO: 100669 - DNA, 469 bp, Zea Mays
ggaagacagccggacgttcgtaccccaagctggaccgagtctcccacagatcaggaggtagctgaggcaagtgtgttgctagctgaagttggactgctgaaagagaggggtctgactgctgaagccgtggttactgattttgttttcaagaatattcagccattgaaagatagggcctatccagcttatctgtatcgagggctagccgactcaactcgggtcactaacagaagaattccctctgcagacttggtgagtcgactagagatgatccttaggggcaaagtgtcaaatgttggtgctccagtggcatactcggcctggaacctgcctcctcccaaagccttcaccctttttgtgtcgaatccacctattactgatggcagtttgggccttagagtgcgaccctctgctaaagaagttagtgctttggttgccttgcttggggagattcctgatgacgaacggc

SEQ ID NO: 100670 - DNA, 600 bp, Zea Mays
atagttcggttctttttcggtttttggtttaacccaaaaacccgaattcgttataggctgggggctaacatacaagcatgagttcctcaaccactaggatgagagtcaccagatgctcactagtaattttcacgtcgatctgttcggtgctcgaattcaagagagtttagtgggggcgagttaggcttgagctcctaggcgtagaggcatttgtgcgcctatctagtcatgtgtgtgtgaatcctgtgatggctgatgatgggattgaggtggggttggctgcctacgcctggctcctaggccctgggagcgtgaggagctagcggtccattggcccaaggctgcaagcctgcatggacagcccacgggtggggtggatgaaggtgcacacatggtgacttgggctaaaatgggattctaagttgatgggctaacaattcggttttctggtttaaacagaactaaaaatcgaaaaccaaactaattttcggtttctgaaaaatggtaaccaaagaatactttgtttcatcggttctagtttttcagtttgtatgtccaggcctactccacatggtgtcggcgagctccaaccacctcctc

SEQ ID NO: 100671 - DNA, 789 bp, Zea Mays
atcattttcagcttctatttacttcaagaattagtcgtgttctagagactcgacttattctaacttatatcaaggcacacttaagcatagtcacacaatagatgacgtgatagctacgtagtcatgccatcacttcaccccacaatcccaagtaacaaaataactctaaccgaacttggcatttagccgatcgattcctaacccatttttcttaccaccactacacgacatgcctaatacattaaatgacttgttcacaattcacatacatcttaaccaaaacattcccacatcgcttgcaacttaacctaagcttcactacacaatttcaggacatctacttaattcatgaatatcatcgtcacacacatcgactcgatttgaattaaccacacatgtctatcacatgaatggagcatttcaacaaatatcctaaaacaaactaacttcatcacacatcttgcattacaaccctacttgacttatttgaagtgtctactcgaaaccgtgagcacaatcatacactatatgcgaagcataattttaacgaacgcataatacgcatcgtcacgacttgacctataaatatagagaaagcgatgactactctggcatgtcaccacctctctatttaagccaagacaatttctaccatcgactaagagctctaagtattaaataccttactactttacacgcacaataaacctcaacttaacacaagtgacaccgatggaatttttactaaactcatcatgcgcataaccttgtctcgcatacaaccatata

SEQ ID NO: 100672 - DNA, 874 bp, Zea Mays
gcaacatgcacgagctgctatacgagacgaaggctactggcaaggagcagtatcacaacaactttggttgttatggcttcatgcctcgccccgatgtaagttacccgaaaaggtggcctggggcctggatggaggaatgattttatgttaagaataatttagttgagagggaagatataaaaggaattattcaacgccccatttggtctcacttcggcatcaggaggccagccaccgctcttgggaacgatatagaggcatgccagagaagcttcaacactgtgtgtacttttattggcacaagagacctggttcaagaacacatcgcctacagagtatggccgcttgtgagtgaatgggagatgccgaaggaggctactgctggttctagtcagggcggcctggtctatttaaaatatactttcagatatagaggcaagtttgatgagccaaacgatgaatggttgagcagtattgaggcaaccagtgacgaattgcttggggcctacacaaggactgaagatgatgcaatgacattggccttcgaaggccgagacaagaaaagattgaatagagtttttgacatcattggtttcgtataccctgattattgctatccctcgcgaaagcagggaaagaaaaggaaaattgccgcttcggccatctctgttgtgtcgaagggcaaaaagatcaaggtcttaacacactggtcgagatacattgagacggccatagtgccgaagcttggtgaagggacatctttcactgccgaagcagaacaacctgctcccgccatccctggggaagacctgactcaatttccgaaggttcctgtagcaggtccagccaaaacgccaaaacacgatgctgaaac

SEQ ID NO: 100673 - DNA, 414 bp, Zea Mays
ctcttagctatctcccggcaaacggatatttctttgttatccgggagacagtacaggaaatcttcttcgttactaccattgaacactaaagccccattcggatatttcagtcttcgggcaaagtgtctggcttctagtatttcttcctgggataatttcttccccgaagcatgtcgaataatgtagtcaacatcttcattgggagcttcgggagcaggagcttcggtcttttctggtacaatctgccctacagttttgtcctcaggcgcgacaggcttcgcctcgatggacacttaaggcccaacttcggcttcgacctgaactttcgtagcttcggcaattttcttaggggcagggctcaaggccttcgtagtctctataacagcgtctagtacgctggccatcctcctcttc

SEQ ID NO: 100674 - DNA, 305 bp, Zea Mays
acactgcagccgctggatgttaatcaggagacgctacgcaaagctaggagccagaagaggaaggctaccagcccaacacctcaggaggaggaactggaccaagagatcagggaccttgaagctatccatcaacaggttcaaaagaagagagagagaatgcttcggctcaccgatctccagagaaagattgatgaggtcgccgaagaaatgcgccatctcaccgaggaggaacaagaccgaaggccccatcacaaggagcttcgtcaagagaattcatataatgatgatgaatggtatggtgattt

SEQ ID NO: 100675 - DNA, 289 bp, Zea Mays
gtcgagaatcttcactggcttttcccggtattggagatccttttgaatctgaattgcatctgcctcgatgtggttttctggtacttttaggcatttgcggagctgagacacatggaacacattgtgaatacctgacatggattctggtagctcaagacggtatgctgcgggtcctactcgggcaatgacggggtagggaccgacgaaacgtggtgctagctttcctttcatttggaaccttttgacaccacacatcggggagaccttgagataaacgaaatctccttcc

SEQ ID NO: 100676 - DNA, 768 bp, Zea Mays
ggaccacgtagttgttgtgctgcgaataacggcttctgcgtttctgagcagcggagaagaccaaacgtttgttcaataacccgtatccactcatcggcttccaatgggtcctctgccttgacgaataggggtggacgggtttcagagaagtccagataggtggtttcacgggggccttgctgataaccccttcctgcctgctgctggaattgctgctgacccgccatttccctaaggaagcgggtattgtcggcggtggcattcaccaaggcggcaatcacctcggctaatgtgggaggaaccggaggtgggtttggggtaacatcccgtcccccagaagttccggctgcgtcctatcctcgagtcctggtcggcatctgtggcaaagaacatttgaagtaaacataatgtgccagagaaaccttccattttacattactataaaagtaatgatacagactcgatattacataacaggatacattacccattatacaaaagttcaccctattatacaacagtacaccctacaatacactactccacttctattacaccattagtcctgctttccattactcttggcggcctcatcgtcaggtgtgggagtccagacatcaaccaacctcaaagaaggagggggctcaaaaaggtctaactccccacccagcgcgcgtcccgcaacgtgagatggtccggcttccgcctcagcagggtgtgcaggcacactagggtgtaattgtgagtatagtacatggacttcctcat

SEQ ID NO: 100677 - DNA, 648 bp, Zea Mays
cagcaacatgcgagtgcataacattaggttgcccatgcgggaagagacggaatttattcatgtctctaatgagcgggagttctggacgaccgctaacatgcataggtactacaggtaccttaattccttgtccaggatgaccgttctcccgaagggcggaaatcaaatgaacgtccttggggagagtcgagtcttcctcctcctccttgctccaaacagtctcgctcgcatcaatgtgtttgacatgatctgggaagagatcgtctgtgcttcctggtctcctcttagagggtgtcttcatgcaccctttatcatgaagatgatcgaagtggtcacccagacccacttcgaaaaaccagtcaaacactcccactacgtaccctactgggttgattcctccaacccagctgctcgtacgaagcgggctccctcagggtctggaggccctgcctcctccactgagccacctccccagcctccccatcatccatcttcctctcgccccgctgctgcctcgcgtccctctcctggccgtggatctcccatgccacgtgctcgtggtcgtggtcgaggtcgtggccgagggatgggtgctcgcttggtccatgggtttgtggcgtttttctccatgtgccgcaacatttctgc

SEQ ID NO: 100678 - DNA, 464 bp, Zea Mays
ggcatagacgcattgcctacctattttgcttaaattggtatgtgccaagtagcatatatttttgggtaagtagtactttcagtgtagagatgcttgcgtgccagttacctaaggtcgctacaagttatggaaccttccactagatggttgccaactggtttgcaaaggaaactgattcaccagagtagaaccttggccatacggaacaatctgcgtgttcttgcctccataagcatgcacagtttcaaatgtttggctcccattagttgccatcctttctgcgatattactagccaatacagatgttccgagttctttgtccatctcagatgccaacttattgtgttatggactgtttccatctccatccttgtcatctgaatcgagaactattatgtcacccttttctttttgttcggctggctccacagaatggttggtcgatttgccacctccgattttgc

SEQ ID NO: 100679 - DNA, 1072 bp, Zea Mays
ttgttccaagatcagctgtcaggagggtattgactgaaattttgtttagttacagaaagctgaattgcagtgaaggatgctcggattggagctcttttgtgaccaattcatgaggttttggactaatgattttatagcaaagtgaaagaacatctaaaggtcaacaagtttcatgagaagggttggtctgtctgctgtgtaaaattcggagaagagggtgatgcaatcctatctgtcaggtgaggtgttagtgctgtttcagtatctgaacctgaactctttagtgttttcactctactttgctgcacaataactcttgttctgagtgttttaaactttgaggtgctataaaaaattggtagagctatgtttagggaataacttttgttaaggaagattggtctgttgccttgtgaaattgtgagatcaaagggactgaacagggaagtgtgcgatgtggtagtgatggctgatgcagttgattcagtgtttgggttaggttctgaagatcttccccttcctgctggtttcacttgtgttcttgagttgagaaaaggttggggtgggtaactaaggttctagaggcctcacccccctgcagaaaatatcaagttttgaacctattagtgcttatccacagtggaggtcttatctgctcatttccctgtctgtgttactgaacaaagttcagtgccttgctatgcatgtgatcatgcatggtgttggtgtttggaagccacgtgtgtgagcttatgcagtgctggcgtccttggagtcttttccaccgtggactggatgagctcagtgacgcctgcccctgccttcttatcatgtttgcttcgagacttggttcagtagaaccttttccttgtccttgagttctagccaaagttcatcgtgtgagtgttgtagttcttgtgttcatgtcggtgttaaaccccccccagtcacactggttgatctgctcccattcttcgcgtggcgttttctctgtgtctggtgatcacgcgttgacgtttcatcctcaccgtggtcaggctagtgtgatgttgtttcacgtttttagtgttct

SEQ ID NO: 100680 - DNA, 710 bp, Zea Mays
tgccgaagctgacagtgataacgaagatgatgatggcattttaagtccgagcaaacctagccacattgagtttggaaagtccacggttaaagctgaagatctggttataatgaagaaattaggatattttggagagtatgatgacgaactagttcgatttgcaggggaagaagtgattccagaacaaagaaatgatgaagtcgtagtttttaaaagcttcttcagggtaggtcttcgattccctctgtacgagatgattggtgaagttttaaagaagtttgaaatctacctttatgaactcaacccaaatgccatagttagaattagtgtatatatatgggctctccgaagccaagggaagagtgtcaacgctgaaggatttcgccgggtgcatgagctccactactagactaacgctagagctgatggactacataagaacttcgaatgttacaattttgcgtacctgaaagtaccaaagctcctgtgatcggatatagcaccaagtggctgactagttggacaagtaatggttttatgtgaaagctaacgagaagaagagggagaagcttgtgactatggtgatgagtctcatgagactgagctttggcatgccacgaccattatgcgatatgcaactcggttccccctgccagttagccgaagtggaattcagggttctggcagagcatattagtactcatgatttg

SEQ ID NO: 100681 - DNA, 831 bp, Zea Mays
cagaaatcagagggttcttttgcaattgtacacgactgaaagggtacgctctaatttggaccgccagatcgattccaacggtcgggattagatccgccataatccgaaccggtacacgttggccgccatcggatcgatgatcaacggaccaaagccatccacaccagccctcggtcgtgaccgctagatctgatcctaacgcccaagatttcatctagccgaatgggtatgcatggcgaaatctcagccgttaacatagaaatcggtggacataatgcttgcccccaaccttcacctccaccggtcatcagcagaaggcagcaccaacatccctatggcggcgccacggtttccccacggtggaagtcgccggagttcttcgggacggtgccccattgctccccctacccctcaacaccgagattcgcaacgaggagaaagatttgaacacgtcggggatacttaccgccgtagaagggctacggagggagctggcctcatttgacaatggcaccaggcgcggaggtgagccataggtgagaactcccggccatgccccaccgccatcaagccagcagatgcgttgcctaggtgcagcgcagattggagtatccccagcttccctcgtaaagccattaccattgcttgactacgaccctgatgtgcactctctctcctttcccttccccggatccctggcaaccccaaggctgcagcccgacatggaggtcgaagacaaccgcaccaccgcaacgaaacgacgggataccctagatttattgtccgaacgcaaggccgaggaacagcaaatcccattgacccgcctaaaac

SEQ ID NO: 100682 - DNA, 504 bp, Zea Mays
tacagaaggcggtggccgaacctaacggatcacagctgatcggccatgcacctagagaatcggcagaggccgttacatgaataagagactcggtcctagctgttacaactggatagactcgttgacacccccctcaatctcgacggtgaggtctgctcgacgagattgtccctgaagtccaaaaacagtgacgaattcagcgcctttgtaaacacgtcggccagctgacgttcgctaggaacatgatgaacacggacctgcccgagcgccaccttctcatggacaaaatggatgtcgagctcaatgtgtttcatccgccgatgatgcaccggattgtgagacatgtagactgctgaaacattgtcgcagaacaccacggtggccttcggtagagcaaaacgcagttcctggagaagatggcggagccaggaacaatctgcgaccgcgttagcgatggcgcggtactccgcctctgcactcgatcgggacaccgtcgtctgtcgc

SEQ ID NO: 100683 - DNA, 481 bp, Zea Mays
gtcgaatgccgaagaccgttgatgcggtctttttcgacatgttgcatcttagtttttgcgggggatttttgcagatatattacatggctccgcccgttaaaaacctcacccccaggaggaaaagagtgcgggcctgaataatgttgtttggtgaattacaagggcgcgtaggccctgaggacttagacaaaaaatttgcgtagattgtcaatattccaggaatggtctaggtcttcgccggatggcgttgttagcctgtatgtgctaggggacgccttcgacttgacgatgaacggaccttcccactttggctccagcttgccccgtgactctgtccgggtggttcggacgagtatgaggtctccttcgttaaattctcttgggacgactgcctggtcgcgccaggcctttgtttgagcttggtatttgttgagggcctgcagggcgaagacgcggtctccgtcgatgaggtctttggacg

SEQ ID NO: 100684 - DNA, 314 bp, Zea Mays
cgagaaggcacgacagtttatcctatttgcatcgtcggtcattcaaccttagccggagtttaagagttgaagggaaccatatgctgtcacacccaagattggatcgtaggttcagtgtctgtgacccagttagcttgggaggcaggccaagtgattttgatgggaacttcccattcatgggatcaccagatgatcattgtatcgaggaggatacaagcaacggagcacatttttcacccttcccatatggctatggtgtctctgcacctatggaagaaaatggttatcatccaaatacaccgtctaggtaaatt

SEQ ID NO: 100685 - DNA, 317 bp, Zea Mays
catctgccctgaggtccgggagttgttcgttgcgggctttttccacaagtcttgctgactctgggtctaggcgttgagctttgtatatgaggtcttccagcattggtttgacttcgagactgccgctgtttcccagacatgtattcagttgagctgattctttcttccaatcttctaaaaagttggttccctttattccgaatggttttcgactgagggtgtctaccaccacgttggccttcccggggtgataatgaatttccaggtcataatccttgatcagctccaaccatcttcactgacggaggttgagttct

SEQ ID NO: 100686 - DNA, 332 bp, Zea Mays
gaaagcacaaatatcgccgcggtcattcaaaatttcctcaaaactttggcttccccccttatccactcaatgacgccttcggggtcgcctcgaatgaagttctcctcagaggagtaggcacctacctttgcaaagctgtttttcaattttttcacgcaatccaaggatttttcgaagcatctttccttggattcgtggagctcctcaatatttttctctagcctggccttccaccattcacttatttcttagctggctttcgcgacttcacaattttctttggcttcagcaagttgttttcgaaggttctcaacttcggctctttgggcttc

SEQ ID NO: 100687 - DNA, 448 bp, Zea Mays
gacgaacatggcggcctaactggcacacatgacatagatgctcctcaggtgatctagtacatgggatagtgccactacgagtaagctgcagcaaggcatgacgtccggggtgtccaaggcgacgatgccaggtagtagaagatgtggtggtggcaaaaacagcagcagtgtcaggcgacgaggacgaagaagaggtggcatgcgggagccgaagggtgtagagggggccggtgctgtcacatctgaggagggggcaccgagttgccgagtccttcacagtaagaccagaagagtcaaactcgacagaacaagaattatcagcggtaaaacggcgaatagaaagaagattgtggaccaaagaaggagcgacaagaacatcgggaatgcgaaaagagccgagagggccagcggcacccacagatgtgacaggaagacacgagccattcac

SEQ ID NO: 100688 - DNA, 562 bp, Zea Mays
agtggcccgagttcatcctcaacgcgatatttcttaccccgagcagttatctacacttcactgagcacgaatcgcaacgatggcgacgatcatggcgcgggatcactggcagcgatacactgaatctggcgatcttcgtcaggtcactgtaccatgggaacttgattcaggcgcctgacagagtaggtttcagggtcttgatctcaaatttttatgtgataacttgttaaccttcctataacaaagttgttgatctatactccagctttaatcttgctatagtaatcatagtcaaacaatcactggatcatggtcaaatctgatctcaaagttcacctaacttcactgctagccaatattcagttcaaagactgactgtcagcccgactttaagtccttttatttccaatttctgtacaataccaatgcttagtcacttaacaaaacttgtactcctaacatagctctacaagtttgctatgttgacaaagagcaaaattctcaagaattctgagatatggagttccaaagttgaccctagtcaactgaatttagacttaga

SEQ ID NO: 100689 - DNA, 391 bp, Zea Mays
caaatctggaaacatcaaggtgagggctgctgtcaaagggtcacactgaaataaagaagagtgacgtcgttcgtgcatgggaatggaggagtgtactaggagtgcatccatccatgcatctttcattcattccttcctgttgcttcctttcgcatgtcatgccaacgctagctttcacttttgaggttcatacaacattcttttccctatccctttgttgttggtggtagtgtgtgcgtgggctgatgagtgtgaaaactactagtttttacagttttatccgcatgcatgcatgcctctttgcatggaccatggctttattattatatattttttacaccctccccgtccccggtctcttcttgctctactagctagggtgcctgcctgg

SEQ ID NO: 100690 - DNA, 597 bp, Zea Mays
taagatgagcttcatccaaaatttgttggcggacttcagcatctttaggcaccactatgcgatcattgaaccatattattccttggtcatcttttctgaagcaatttgctttgccggcttctattttctcatgaatatggttcatacccttgtcggttctttgggcatcaataattctctttagaagaacttactcaagctttaattgtgtaaaagttccgtgttgtatcatacccaagttcgacttttccatttcttgacatagggtgatgtcaggggtccttagtgtaaggcaatgacaggaagctttgcgactcaatgcatctgccaccacattggtttttcctgggtgatagtggatttccaagtcataatctttaattagctcaagccatcttctctgcctcatgttcagttcaaattgggtaaagatatatttcagacttttgtaatccgtatatacatgacatatattccccagcagataatgacgccatatcttgagggcatgaacaaatgtagctaattccaaatcatgagttggatagtgctcctcatgccggcgtagttgacgtgaagcgtaagctataactcagc

SEQ ID NO: 100691 - DNA, 526 bp, Zea Mays
gcggttctgggctgctgcaagctgctcccgcaacatcaaggtgaactgagccctttccgttaacaactgtgccacatcaacgatagcatcagatgggatatgaggtgctgctgcaaacggagggtcataaccgtacaacactttgaaaggagaacaagccagggaagtgtggtatgtggtattgtacaaaaattctgctagaggcaaccaattcttccatttagaaggttgagcatggactgcacaccgtaggtacatctccacacattggttaacccgctcactctggccgtcagtctgtggataatatgtcgtgctcaggttcagcttagtgcccaacaacttgaataattgactccagaatatgctcgtaaagattttatccctgtcactaacaatagatctcggaagatcatgcaagcggaccacctgatccaaaacaacctgagccacttgtgttgcagtgaaagggtgtttcatagctataaaatgagcgtacttcgagaaacgatccaccacaaccaag

SEQ ID NO: 100692 - DNA, 417 bp, Zea Mays
gtcagctaaaaatcaccggacagtccatgctgagcaccagatagtccggtgtgccacgcgaccaacggctattcggccatgttagctgtgataccccaattttctgaaaagaagctaaatttccatttctcttttctttcatgttcttgtggcattggggtttggagtttcaggaggcattcctcagggaaacagtagatcttttggcattttttctgctagggtcgggagctcagatgggagagcgagtttgggccattgatctcgatccgatggatgggagcccccctctcctccccaaccctagctgaccccctctccctctccccaattgttgcagccgcaccctccctcttcctctcctccccatttgcagccgccctctaccctctccacgacttcctcccccctctagat

SEQ ID NO: 100693 - DNA, 552 bp, Zea Mays
gataaactactggagatagtcttaaattcttgtttcctctagaggtgataacgcgtattaagatatacttgtatcgagaaaaattgcatgtacatactcttggtggataatactttctttttttgtgggggtgtggatcagtggatgtgtgaaacggatggagaaaaaggatatgaagacgtatacaggttggtgtgaactgctgaaactttccgatggtatcattgagcgtgcattctgacctgcgatataaagctcttttatggccgcgcctttgctgctgcgacctttattttcctgcccagtcagtgccgcgccgtgcccatctggcatcaggtttggttcaacacatgccataatcaccactcactgccgtggatcatttcagtggatctggtctggagagttattatgtagtagcagcgatcgcagctcggtgcctcggtccgacggaccctcttcacccgttacctgtgtgcggcaaggaatcttctgctcagcgatggcatgccacatcttgttgcgagctttgatgatgatgatggtgctaac

SEQ ID NO: 100694 - DNA, 292 bp, Zea Mays
atgggttgaaggaacatattaagtcttctgtaattttacatagacctcctactctcgatactgcttgtgctctcgctcaattgcaggaggaggtctcggagccacctcggatggaaactcgcaagttcattccaccctcattgccaaagcacacacaaactcctctacctctacctcgtcctcccccaacagaggctgcacgtccccgtcaactggacgaaaagcttgcgtctatgaaggcctaccggcgtgcgaggggactgtgcgacaggtgtgcggagaagtggtctcc

SEQ ID NO: 100695 - DNA, 482 bp, Zea Mays
aagatttgcagctggtcttcaacagcctgaggcgataccagtggaagctcaatccagagaaatgtgttttcggagtaccagcagggaagttactcggattcattgtcagccaccgaagaattgaagccaacctagaaaagatcgaggctatcatgagaatggaagcgctacggtcatagaagaaagtgcagaggcttactggatgcatggcagccttaagcaggttgatatcaaggctgggtgagaaaggcatgccattctacaagttgctcaagaaggtggacaagtttcggtggactacagaagcacaagaacctctggaagcactaaaaaagttccttactacgccaccaatactcaagccaccatgccgagccgcgccgaatcatccggcagaagatctattgttatacatctcctgtacgactcacgtggtaagcaccgcgttagtagtcgagcgggtggaggaaggacatacgtat

SEQ ID NO: 100696 - DNA, 433 bp, Zea Mays
gccatccttctcctcttgggagttgcggcaggagctttctgcactttcggcaattttgtctctcctggtggacttaaaatttctggcattttcaatattttttccacccatggctctttggccttattatcttcagcttcggctggcccgactgtaggcacctttggcactacaatcggctcttcgacgctctgcacattcggagcagcttgtttcacttcggcagtagaagaagttccctcgccaaattcaggcaccacggccggttcaatgtatcgcggctggtgggtcaggaccttcatctttttaccctttggcacagcagtaatggccgaagcgatagtttttctcttcctcccttgcctctgcaatgggtagtgataatcagggtatacgaagccaatggcatcaaatactctgtttaatcttttat

SEQ ID NO: 100697 - DNA, 433 bp, Zea Mays
cctaaggatatcgtccgtttgcctgtctagttggtccactataaaagggtttgatcaatcatgccttcattcatattataagcgtggaatgtcaattcagaccaatcacaccacacttggttagggaatcacgcattttgtattggttgctttccggattgtgtatttaataatggaattttaaggaatcaaacaactgactatacattattacaaagtacaaactaatggaataaagattaatcaactatgcatgagaagaggatcctaggagatctgagttatctcacttcttacttcaactctattggcattatcttatggtttcaaaagtggcacctatagatgcaatttattatttcatttctacttttaaaacaacaacaccttttagtcacatgcaagtttgggtatgttatattcgaaactgaac

SEQ ID NO: 100698 - DNA, 419 bp, Zea Mays
ggtcaatgttcaaaacactatcccaaaaaaattcaaaatgaaactgtagttgatacaaatggatttgcggtctacaaaagatcgaataataatagatttgtcatgaagtctaacatcaaactagataacagatggattgttccatataacttgacattgctcaagaaatatcaagcacacatcaatgtagaatggtgtaacaaaagcatattcatcaaatatttgttcaagtatgtgacaaaaggtccggaccggagcaaactatacctacaacgagttttagatggtcaagacactcctattgatgaggagacaaatacaaggaatgaggtcaaagaatacttagatgctagattcatatgcccatatgattcatgttggagaattcttggttacgaaatccataggcactttcctcc

SEQ ID NO: 100699 - DNA, 549 bp, Zea Mays
gtctttaagcctttcaaaagtttttgctagttatgttgagcctttgcctctttctggaggaattagctttgatttaacttttgtgctaattttgtgctccaacttggcattgtctgctagctagtggtgttgagcccctttctgcctatccttgaggaccagccattttctcacttggttgtgttgagtctttggggaccaagttttgctcactctggatgaccttttctggcttttaagtggcttttggttattcgagtgagtttctcttcttccttttctaatgatttatgttcatgtggtggtgttgacaatacactcatcaagggggagattgcgaacgcaatgttgacttgtcccttgtggttcaggatgatgatgagtgaatgtcaatgggtagcgtattgggttgagccatgaactaactggggcatgagttttgtgttgtgaaaccatgtatgttggcttgtggtgtgcaggtgtggagcataagtacgatggcaaatggtgaaagtgaaggtcatacaggttcgtgtcgatggatcggga

SEQ ID NO: 100700 - DNA, 394 bp, Zea Mays
gtcggggtgagtgtgtgctgtctggagcatgtcggagcagacggagacgaacacaaatggaaggtcattctggtcttttggcgatgcttattgctaggggtgtagatagtatggatattatccatctatattcaaattcgatccctctaaggggactaagatctaatccatatccgagtccgagtatctgtttcatattcgacctttatctgtatccgtattattaaagttggatatttaagatatcgatattaattcaaatcttatccgacataagtcgataatatatgtattagattcaaatccgtaaatataatatgaaaacaaatatggaatgaacaatatctgtctgtatccaatccgattgcatccctacttattgtttattaggcta

SEQ ID NO: 100701 - DNA, 762 bp, Zea Mays
ggtgtttcactcgtctagtcgataaatgttgttataaataattgcgctaaaacttggtcataagagtgcagtgggcacatggtgtaggttggatgtgataagtagattggaagtgtgggtttgttgagcactgtattgttgaaagggtatatcgaagtgcatggtagtggtaattgcatcaagttaatcggtagtgtctcgagtacacgccgccacatggttgtatgcgagacggggaaatataaggtgtgctcgacacgaaagttcggtcggtgtaggtagaaattgtcttggcttaattagagaggtgatgtcatgccgtaagtagtcatcacttcctctacaattataagtcgagtctatacatgttaggcgttccttaaattgtgcttcacaaataagtgtatgattgtgcttatgacttgaatagatgtcttcgagagaactaataggttcctaaggcaattaggtgtaaggtgtttgtagtgacgctttatcccaaaaggtgttaagtctgcgcataaataagagataagtgtattttgtgtagtgtggattgattttgagtgcctgtgccgcaagaaatgaattactgcgcgcataggcgatgaatgggtgtgatgaagtggtgacatgctgaagtagtcatcgcttcccttgcggttaagtccaggtcgtgtgtaatgatgctatgtacgtggtgaatgcatttgttaaatgtatgtgataattttagtgcactaaatgatttggataaaattt

SEQ ID NO: 100702 - DNA, 491 bp, Zea Mays
gcaaattcctggtatacttttaatgattttatttgaataatagatggcgggttctatatctaaatttactaggggttcttttgcaaagaaacacagtcgaaggggtattgttgtgcctcagccgtccagatctatatcgacgcccaagattagaatcatcattcaatgaacatgtactctctcccccatggatcacacatcaacggccgaggatctaccacgcgtcgaactgttctcatccctctgttatccgatcgacgcagatgggttacgcgtcgatcaaatcctatatgttggccagggatccaacggtcgagcgaatctcttctcaccccctgctccaccagccgacagcaaatagatccatgcagcgcacgaccagttccagtgcacgcacggcgacgccctagtgcccctcctcctagacaaacatggtgaaacgaacgtgtaggtgaagccgaactacggaggggtttgcttactaacggttg

SEQ ID NO: 100703 - DNA, 485 bp, Zea Mays
ttgatacccccgggagtaacttattcaaatcttgacatatggttctttctaaggaagcctgcatggctcgtcttgccgcatcttgaattctacgacaactttcttggtgttgagttaaaatcatatccataatgaatgaacgatgtgcatctgtcaacacagcactgtcgaccacaatgaggttagctcgcgtacgacggttatttcgacggtggcggcggcgccttttcggtgacatggaatcttggacataaggttttgaaaccataatttctgatgatatgggatcagaaagggttgcagttgggtcgacatgacctttcctgatgtcatcattggtgggaccaattccttgccacctaagcacacgtccatgttcaatcaaaccgggattatagaccggagatgggatgaactcaggagcctcaactcgtagctgaggtctagtatgtgactcatttttaaaggatgatgtattatactcc

SEQ ID NO: 100704 - DNA, 454 bp, Zea Mays
ctagacagcttttcttcttaaaggcaatgctcaactcttttgctgactccactgggcttcatgtgaattaccataagtccaacatttaccccatcaatgtcacggaccagaaaatggagatccttgcaaatacttttcattgcaaaattggatcattgccctttacttacttagggcttcccttgggtctccaaagacctaaattgagtgcttttctaccccttatccagaaaattgaaaaaagactggcgtcaacctccatcatcttatcacaggctagaaggcttcaaatggttaatgtagtcttctcctctcttccaacatattacatgtgcactcttaagctccccaaaatggtgatcagacacattgacagactcatacgacactgcctttggagaggtgctgatttaaatgccaagaaaccccctcaagttgcttggagttcggtttg

SEQ ID NO: 100705 - DNA, 461 bp, Zea Mays
ccggggtagccggataggtggcccaaagtacattactgcccccagtcagcgaccacatttttacaacatgtactgtacaacgaggtaattacagtgccgcagcccccactagttacgtgtacacacaattatacccactgattacattgacaggtgggccccacatagcatcattgcgtgtccacgaccaagataggtacgtcttctgcattcgctgccttcgtccagacgagccttcgcatctcctaccggcccttatcgagatggctcatttagaaggcttcagttccggacatctcgtcccttgtagtggtcgaggactcccgagccctcgtcttcactgaccgatggccgatgtcaatgaagtcattgtcaagtgaattctctggtcagctacagtgctacagttagttgaggtggttggcgaagacttcatgtttctgtccaaaggcctgttcgac

SEQ ID NO: 100706 - DNA, 504 bp, Zea Mays
aagcgtcgcacctacctgctcgagatgaacggcttctagtctccttggccaatggccatctctctctcctgcgcacgcgcgtcgtctgctgcagcagcaagaccccccagcgccgccgcctccgttggttttagcctcagctcggtcctgatcgggggaacactgaggtgttccgtccttctcgaatgtcgcagcaaccaacgctgatgtctcctcggaccattgtgaaaatagtagtgtagcgaatggagtgggcggcgccagcagcaaagcttttgctacgttttgaacaggatgaaaacagtcactgttttcaatcaaatgttgtccgagagtactgtacaagtttctgagacgaaatcacggtctcattgatggagaaatcactttttcgatcaggccagtagtgtgaaaaaactttgaacggaattgcagcgttcttgccattgtattgccatgccaagagtgcagcctttgtggaatgcttcttttcttgcacgttat

SEQ ID NO: 100707 - DNA, 590 bp, Zea Mays
tgactgtgtacattggatccagtccgcaccatgtggaatggagtgtcactgatactgggcacagattcaaagacacctgccaagtcgtcgctcgcaaggcattgaggaccctgtgtcaactttatgaagaagaagtggccgacaccccgctcagattctttccgccctttcagagagaccgtcccgtttggatggctaggatgcgtgcattggaagggaagcagattcttgaggatgaccccacagtcacgtacctcattgcatacctgctcaccctggatgcacaatatgatttcttggcccgacaccaccgtcagatgattgctcgagcagaagatgaagagaagctcaaccgtaagctccatgtggatctcaccacagctcaagcccgtgtagctaccttggaaagtcgtgaagtcattgctgttgaagccctgaagcaagccaaggatgagcatgtccagaagttgatggaggcctacttggtaacccataaccaacgtagagccctgcggatccaagagcccgcttcatccaaccctgttcaacccatgagagccaaagatccccagattcttgaaggtcacccg

SEQ ID NO: 100708 - DNA, 778 bp, Zea Mays
agaaagagcgggaggaggagtggttgaacttgccgcactagatagcacgaattgggcaaccgaactatgtggaaacccaagcaaaggagtgtgaaagagtagtgaaagtatcgggctttgagtgcaaaggaaaaccaggagggtggaatcgttccccataataatagaggatggaatggatgtatgaggagggtgggagtgagataacatgtcggcatcaggagtggtgtggtaggaggccctggagtcgaccacctaatcgggcaaggtgagaggcggtgtcaatgcaatggtgttgaatgagttggtgagggagacttcatcccaaccaccatccctagggaatgatggaggcagaggtcccctgagcgagaggagaggtagagtcgacgacgagtgtggaagaggggacgctgaaggcggtggagcatcgaagtagacgtggttagtagagctagctggggtagacacgacaaggaagcaccctgggtcaggcttggccacatggagatggtcgtagtccaaggtttatagaaggatggccacacaggaccacccccacgaccgtgaggccaccatagggaggccagtgccctcgtggctattgtgtgcggagatggtgaccatcgctagagctagtagcctaacgagaagctttaggagtagtgagagcgatcgaagggcatgcagagcgcacactgagttttcaaggacgcatcatagagcgtcaggcggatgcgtgggacttggcatccagcatgagatccttgagaagtat

SEQ ID NO: 100709 - DNA, 545 bp, Zea Mays
ataccacccgcagtccaatggagttgtggaacgcgcaaatggcaaaattttcacagctgtcaagaagatgctcctcgacgataaaaagggcaagtgggccgatctgttacccgaagcagtctgggcattaaacacgactgagtgcagggcgactgggttcacccctttcctccttctatatggatcggaggccatgaccctacaagaaataaaacatgggtccccacggacagtcccatcagctgtccccgatgtggacgagcccacttcaatggacctgatcgatggagaccgggtcttcgcactacaggccctaaacaaataccaggcccaaacaaaagcatggcgtgaccacgcagtcatcccgagggtattcagcgaaggagacctcgtactcgtccggaccgctcggacagagtcccggggcaaactggagcccaagtgggagggccctttcatcgtcaagatgaaggcgtcccccagcgcatacaggctcgcgacgccatctggcgaagaattggagcattcctcgaacattgataatc

SEQ ID NO: 100710 - DNA, 398 bp, Zea Mays
ttatattacaaagtaaaactcagattacatcatactttatagaagttattacaggagttttttgagctacttttacaagactattcaagcttcgacactatctctggagcttcgttcttctactctgcaactgcagcttcggtctggtcaatctgtacgaaagtattataagccaaattcaaaaattcaaaggaaaaggtaagaataaggtatgattttgttaccagcttaaggtgactccgagcttcgtcaccagctttgcttcgaccaccctttgtccatactaactttataaatctgtttgcaatatttcgagccagattcggaacatcatctaagtctgccggtgacaggctgaagttgggtctattaacaatcttgccgtgttcacagccaga

SEQ ID NO: 100711 - DNA, 279 bp, Zea Mays
ctcgaatatcaactacaaaatatatctaaaactccctctttaggctagctatctcctacaaaatatatctaaaattccctctttaggctagctatctccagtgtttacccatccttgtacctatattcaaatttcaatctgcgaattgcacaatctacagtgcaaaacagtgtattagatgatcatatgagtgaattgttagacaccgtcttatggtttgccagtaaacaggaacctataggattgtcaggacgcaagtataatatgtagagaaagcac

SEQ ID NO: 100712 - DNA, 298 bp, Zea Mays
gtgactgtgatcctgctccaacaccttatgaccctagcatgctattgagaaagaatcggaggatagcaagggatcaattgacatacttctagatcattggctcgctcatgtaccttgcaagtgcaacaagaccggacatctcatatgctgtgagtaagctgagtcggtttgtgtcaaaaccaggagatgatcgctggcgtgctcttgagagagtgttgcggtatttgaaaggtactatgacatacgatattcattatactagaaacccaaaagtgctggaaggctattgtgatgccaa

SEQ ID NO: 100713 - DNA, 735 bp, Zea Mays
gtacgtagcactgtgtcaaccactacggtacgggcaacccctcgctaggggagctcgggtatgtgaccgagccctcggccttggccttggctcttagaagaaaccaagcaggaatgagtcaacaacaagtacaataccataccacaagccatactcacatgggtacgaaacatctcctcacagtacgtgatcaactcatgtcctctaggaaggtccccttggtcctataaatagggtagcctacagctttagaaggcaggcgaacacttcacaagttttctcctccacacggtattggcacttgcctcaatcaaacccagggacttgggatccttccctctcccgccccgcttgtactccctactgcaagcacctatgtgcgagtaatataagtctcattccccctctattggagttagggcctctcctagcccaaaccaggataaaagacttgtgtcaacttgcatcaccatctgggttaggggcacgcgacattatttcactagttggttaggtccatggatccaaacaccgaaagcctccaaagcttcccatccttttgctactttggaagctggcttcggcaaagtgaacttaggcagtttctagtccactctaattgctaggatccggaccaccgcaaaactgatcacacttacctcttcggaggcataccatgcccatctcaaagctataagggcttcatcatcgtcaaattctgctccggagctaccc

SEQ ID NO: 100714 - DNA, 470 bp, Zea Mays
gaaaattgagacggccgaggtgccgaagcgtcctgccgaagctagggaaaacggccgaagaaccaaaattagggaaatcggcagagcgaccaaaaactctaagctcgccgcaagagttggagctgccaaaggtgtcaaaaattcctgcaataacgccaaaaaggaggagaatggtcaacgtactggacgctgttatggaatcttcaaagtacaaactcctgcttcagtgcctgatagaaagggtgaaatcccaaagaaatctggggaagctggcataacactagatactgccgaagctggtccatcatctcttattgaggcatattctttacgagctattcctctgaccttggaaaaagaaagtgcgcccaagaaagttaagtctcctgctctcgaagtgcctgctgaagagctggaatttatcgtgcgacatgcttcggggaagcagctgtcgaaagagcagattgctg

SEQ ID NO: 100715 - DNA, 424 bp, Zea Mays
tcaagcagaaagcagaaaatacaaatgcttccgttaggacagcaaaggaattctatggtttggagatcgattggttgttcccaaggaccctgagctcaaaaagaagatattggatgaggctcacctttcaaaattctccatgcaccagggcagcaataagatgtatcatgatctcagatccttatactggtggaccagaatgaagagggaaattgccaagtatatatctgaatgtgacacctgccagagaatcaaggccagtcatttgagggtagcaggccctttgcgaccccttcccataccatcttggaaatgggaggacatttgcatggatttcatcgtgggattgcccaatacctcccggcaccatgattctatttgggttattgtggataggttgaccaagaccgctcatttcttacca

SEQ ID NO: 100716 - DNA, 398 bp, Zea Mays
tgtcgatgttggagactttgaagtttggaggccactggatagctcagagttgggggtaagagcggagaccccgcacgtccccctatcctctcgtcggtgatcgtgtcgtcagtcccggggaagcgaacgtgcgtcatgtcgcttagatcatcccagggctaggctgctagtggaagttgtctctgactcggttctagtcacacagctacacgccggtgcgccatggtcccaatcatactcctctcgtcgccttatctcatcctcgtgcaagcgatcgcgcgaagcattgatgttgcttcgcgtgtctcaccggctgttgatggcatggcgcaggtcgttcagcgggtgagcgagggacagaaggtgatttgccacctaggtgagcgtttgcctatagc

SEQ ID NO: 100717 - DNA, 879 bp, Zea Mays
attttgtgaaatttgtgatgtcaaaactcacttaacttcaaaatgtgcggtggctcgtgcctgcaaaacttttgcaataccttgcgggtatgcggtggagggattggggttttactttataccccaacccaatccagtaaagcagaggcaaggtggctgcaatggtacagtgactattgtggagggttccatgaatgaagagcagattttgaatgagcttaaaaggttggtggctgctgattgggactagtgtgtgaagtgtgtggagaacaatgtgttctcgacgtgtttcccttccaggggtgaacttcaccgtatgatcgagtggggaacaattcatacaaaatttggtgcacagatgcttgtcaaggaagaggggcttggagaggaaataaaatatgagatgcctaaggcttgggtgcacttcactggtttacctaaggaacttagagagtactcggtaatctgggcggttggttctatgctaggcatctcaaaagaggtggatatgttgtttacttggaagtttgacagggcaaggttagaaggtggccgtgcttgacccgaatttgattccgcaagtagttgatgtggtaattggagactacttatatgaactgaaatttagggtggagtcagaagctgaaggtgaccagcctttgccgatggatatggatcatttcgggaaaaatgatgatgatgaattttaggatcaaaacaaggatcacaaaatgggtgaaagagggaataaggggtcaagcttgaagggaacatcaaaggattcagcaggggcagttaacaaggtgtcagattctgtgctgaacagcaacacgaccagtgggaaatcggtgtgcgctggccctacacagctggatctag

SEQ ID NO: 100718 - DNA, 421 bp, Zea Mays
gtcgggtacaactctgaaactggactgacagtgaactaggaccaagtttgggagctattttgagtattaattagtgagaattaaagtatggttgctatggcaaaatcaaagttggattatagaccaacaactttgttacaggtggattagcatgttgttataaagaaatcagagatccaagcctaacaaaacgcttggtcagacactctgaataagaataccatggtacaatacacagaaagatctcaggttcagccccccctcaccgccggtgacctctgcgcaaggattcgcgttgatcgcagtgattcgtgcaggactcaggcaggatagtaccgagagggtgaaaatatcgcaaagggagtggatttggtcgcggggtgaagcttatcaaccgcgcctatagccgtgcgacgtggcc

SEQ ID NO: 100719 - DNA, 390 bp, Zea Mays
tactgaacaattcatgatattgctatccactgaagcagcttctaccaagactacctctaaatcatttcaacttcgcggtcaacttcaaggcattgatgtgctgattttattagactctggtagctcccattgcttcctgagtgctaatcatacttctgcattgtccgggttggcgcgtctggacactcccttatctgttaccgtggctaatggtgaagttgtgcaatgtacagtggagctgccacaagctagctggtatatccatggtctggaattctgttgttccttcaaagttatccctctgccatattatgacattatattaggcatggattggctggagatgtttagcccaatgacagttgactggaaacataaatggctatcatt

SEQ ID NO: 100720 - DNA, 658 bp, Zea Mays
gtttttgtattggaggtgcattcttttcaggactattgatgtcttgaacactatgttctgcatctgagtccaaattcacaggtatgaaaggtatattattcgaaccctgcaatggtgtactggtattggatggtggaatgcaatcaggaaatgggtttacttctggtggcccaagaggattcctcacaaaattcaaataatgattccagtacatagctgattgagaggccggaatcatggaagattgggaagaagtattccctgtatgcatgggtgcccacaatgttgtcggaccttgagcagggtttggaaaattcagatttcccacgaggttacaatccatagcactctgctgcatgtaagccgtgggccacatagggggtggaggaacaaactgctggccaatagatgagtttgacatggactgagaagaagtcgcattgtttgatgggtccattctagtaagggtggacaggggacagattaagtgagatggtaataagagtaacatttcagcatatgcatttgaagtaatgatttagaaatcaaacataataagctgtaacaattataataaaaggttcgcattaaaggttacagtactaaaccaaacacattagagttcatactgagcaaagttcccagactacaattattc

SEQ ID NO: 100721 - DNA, 671 bp, Zea Mays
gccatgtaggacgggtgcaagcacgaaacatgtttgaggccaccctctctagcgtgcacgaggacatcatacttgtattgtgaagataagcaatcacccactattatagcagcgagctcaccattggctggtaagttgtattgtgcgtcatgacgtgtgttacagcctaacaatcgcaacatcaccttttggtcaccttcttcgtctaaatgttctttagcaaagcgaaatgtcgcgaccagcttgttatgcttatctagcatgttaagtaataaacgggccacctctggatccggacgatcatggacatcagcctcattctcaaacatgcccaacctgttttgcacctcatgttcagtggcatatatgtaaagttgtgcaaactgtggtcacaatccatgactgggtagtagcgagccaatgcgatggtgtacgacaccattgattttgaaaacataaggtgcagtatcgttatttatcgatctatcaatgacggcatctagtgaggtaaacgcgaaaagggaattgtatgagagaatttgcctaaggaaccttctggcacgactatcaccatcgaatcacagtaggtcacataagggtgccggtggacatttgtaaggctccaaaacaatcttacctcctctgcaacaaaggttgtacacaagtctgcg

SEQ ID NO: 100722 - DNA, 414 bp, Zea Mays
tcgagaatgagcacgtactctccgtcagcgaggttgcagtctaatgaatgcaatgagtgagatatatgtatgctatgatatgcaatgtggtagtagagaaatgattaaattgataaagtaaggtcaaatcttactatgggaattctagtagtatacttagcaaatttagggtcaagtatggttattttaaatggtcagattattttagtgccccgctgatttccttttagtgtcttagtgaaagtttattatgatccttgctgaatttattggggttagattcattatcttactaattctcgcttcttctcttttcctattatgcttttaaggtgggcttgaactacaacatagctttataaatttccaaaaaatctgtaaaattacaatagtttctcactagtgtataactct

SEQ ID NO: 100723 - DNA, 917 bp, Zea Mays
ccacataaggtaattctctgatccacttccctgcgaacttttcattcttgtcgaagactttcttcctgagtgcttccagtatcattccattagccctttccacctgaccgttggctcttggatacgctactgacgcatatttgatctgaatgctccgttgtttgcaaaaatcaaagaattcagagctagtgaaattggatcccaggtcgattatgatgctattcggtatcccaaacctgaatattatatcttgtatgaattccactgccttggctgaagttagataagcaatgggtttgtattctatccatttggtaaatttgtcaatggtgaccaacacgtgagtgtagcctccctgagctttcttgaacggtccaatcatgtccaatccccagcacgcaaatggccatgttacgggtatggtccgcagttgctgtgctggcaaatgatgctgctttgataaaaattcgcaagctttacatctctggactaactcggctgcattaatctttgtcatcggccagtagaaaccagacctaaagaccttcccaaccagagttctagatgttgcgtgtatcccgcattgtccggcgtgaacctcatctagcagttgcttcccagtaaccgaaggaatgcacttcatgaggactcctgttgcaccccttctgtacagtgtgtcccctatgagggtgtagtgggctgactgtcttgcgatgtgtttcgctgcggctttatcatctggttcctcttcactctttatatacctgatgataggctccctccagtcattagagtctgactctggctggctcaaaacattgcactcttctgcttgatctgaggaaatgctcgggcgtggcaccttctggacaaaaacaccagatgggacctgagttcgactggatcctagtttcgac

SEQ ID NO: 100724 - DNA, 808 bp, Zea Mays
gcaggaccacaatgcatttgagcaagcgcgcgaggcggcagagcacaatgcacttaggcaggaggacgagctggcacgccaaggttcactgatgcgtgatgatgatgactatggggaggactacgatggagaggccgatggagaggctgatgacgaggttgttacaacgacacagacaacgaacttcaggtaattttattttgacgaggagttctattttttgttggattgatattattaccagtgcacaatttacaattttgtaggtttcgacggtcccttagagttccaccgacacaacccttggaccaacgtagggtcataaaccctgcacgagagaggagttgggtggaggtggcatggagtggcaaaggtcaccggacaccagttaacacaatgctgggatctatagctcgttttcactatccaggggtggtacaactcaacggggcagagataggggcgtatcactgggctcactggggcctcaaaccctatggacccgaccgtactcaccaagacgcagtgtggtcatcgttttgggtgagtttattatgtcttttaaatttacttatcgtgggcgtctataaatgaatttaattgcttcttaattttgcaggaacaatttagattggacgaaacaacgaacgaagaacatgtgaaatgtgtattcctcaatgctgctagaaaagttataaatggttcaatgtcagatgcacgggtcaaagctgttaccgtgtacttcaagaaagtgaagggtcaaagaatgaccaacaagcaggcatgtgaaatccacttgacaactgag

SEQ ID NO: 100725 - DNA, 562 bp, Zea Mays
cgcggcattggcgcaagtggcggtgtggtttctttgcacgtggtaaccggtgcgccggttacatgacatgtgggccctgttctccatgccggaccgccggttgcaacgaaactgaaagggtgcacaaccgtggtgcggttgcacgcttcttgcgtggcggtccgccttttcgaccgctggtttcggcgaggatgagagagcgcttaaccgcggggcggttgcatgcttcgtgtgtggcggttcgccatcttcgcgtttcgggtcagtttgtatgacatgtgggacctagcccctgtgtcgtagggtgggaaccctggagcacgtcgggggagactgtgcccgtgatgctttgggacgcgagtggggagatctgcctttaaaaagggatcgatctcttgggcagtagccatgccttttctcttctcgcattcatcgcgtctttccatctttcgggcctccagatggggtgcaccggtgttgccttcttcttgctgctgttggagaagcacggcctcgtgggggttggcgctctttagtcatcgctcggcttcaaggattttca

SEQ ID NO: 100726 - DNA, 567 bp, Zea Mays
tttcgggtaactgaaattgatacgccactggcccatatctttcaagaataagaaaaggaccaatgtatcgaggtgcgagcttcccttttatcccgaaacgtgttacacctttcattggggagaccttcagatagacataatctccaactggaaagtataagggtatccgtcgtctgtctgcgtaacctttttgacgagcttgagctttcttcaaattacgaattattcgctgaactttttctttggtttcctttaccatatctggcctgaagaaacttctttcccatggttcagaccaatttaacggagtacgacattgtcgtccatatgtaattttgggtaacttttttgttctattacccggttgattgctctgttactgagaatttgttgccatgcctatgtaagaatctatgtcaattgtgctcctaaatcaatcaactccagatgttgactcctgcttgtcaaccctactgttacctgtttgttataatcatttaaccaattgatcggtttgtttgttacctattttacaggaccacttagctttgatgatggaaactcttg

SEQ ID NO: 100727 - DNA, 586 bp, Zea Mays
attaactgatttatggatatttacattctggaagacactagagaatataggtgggataggttatttgctattattcttgctgcaacttgtggttcagtcgtctctgaagatggttaccataatgtacttatgcttagagaatcaatatttgttaattaattgatgaacatgatttaattttaatctacttatcctggattaaagtccacatttcctttctctgggacaatgattaagtctacaatatatatattgcttaactactcatagttaatttcattacatttgccttccttgcatggtgtttgtgctgatggattcatgatttcccatcatttttgaagtaatgtacacagtttcgttggaacacgaaagattgcattagatgttggttgatgtttattgatgtggcagttcgtttttagtatagtactttccattcttatgctctgttctagtagttctaaacatggtattatatttgttatgtttttatgggttgtatacatgaaaaaaataaggcctgtctttttaatagtgcaacagaagcgactgacaacagttttatttgtgaaaagcacaaaat

SEQ ID NO: 100728 - DNA, 619 bp, Zea Mays
aaggtgcaaaggcggcaagacccagcaatgcccagtatatttttgtctccgaggtactcaccagctccaagtgcaatatgatagagctagagaagatagcctacgcggtcatcatggcttcgcgcaaactaatgcactacttcgaggcgcacaaagtgcgggtcaccacagatcggggtctaggagacctatttagaaatcctgaagtatcagccaaaatagccaaatgggagccaagcttttcggatacaacgtcacattcaaaccaaggacaacaataaagtcctaggtcttggccgactttatagtagactggacagggcctccggaatcacaccagcatcacatagaaactatttggactatccactatgatggtgcatggtaccatgcgggagcaggcgctgtagcaattattacatcacccacaggcctcaaatacagatatgttgcgtgtctccgtttcgcacttgaatcaggcaaatacacgaacaatatagcagaatacaaagttgccatccttggactccactaactaccagccctaggggtgacaacgtgtatagtcaaaactgattccaatatagtcgtcggccaaatcaaaaaggactgatccgcc

SEQ ID NO: 100729 - DNA, 425 bp, Zea Mays
aactttattttagtctatccaaaataaatattgtcctcaattccagaacgaagtggttggcaatatcactggcagtgcacatagtaatgggcataaatgctgctgtggtactggtaggtgtagggccgtatatccccatcaagattaagtaataattagccgagcagcatcttcatgcatgtggcggggagagccaggcagccagggccagggccatcgacgaattgaaaggcggggcgctatgtatgtagtacgtacattgtacacgatacatacattattggctgctcagatcgcactagtactagcctccccacacgctgcatatgcggcacacacacagatcagaaaataattaaatctggctatacctgtccaagatcacgtccttaattaatcttccggaccagccaccggcaccagca

SEQ ID NO: 100730 - DNA, 729 bp, Zea Mays
gaaacttttagatttcttgtttcttaaataaatcctaaggtacacggtataactgagagtgtcagcatttgtatacaggaagtttcggtattcttctagtgagacattatccaacgtgtccttctctggtacacttcccttttatgccgtttgcagcaaagaaagtcggtggggacaaataaaacatggaatcaaacattgatccaaatacaccaagcataccatctaagtcttcctagaatagtctcttagcactctcattgtgtcgtacttgggggcaaactcactaattacgttcaagaccaaacacccacaagaagcttgactaagataattctatccacctactttctcgcatccaccacaacgttattgagactcttattaatcaaaactccaccatttctatttgcagatgtccctatgctatataccaaagcttgaagttgatatttcacaagacaagcaaaattctaaccataccagtaaaaacaatgaaattactctaccaagcattgagatccactacacaattaaaaacacaaaccccgtagtgattcttcgcaaatatattaacaatatttttttcttaagtaaatgcaaagcacatatgaatgaggaaaatgaaggatagaataactaaaatgagtctatgcccctaagaaaaataatcccaattatatgagaattcaagcctttgcttgcaaccagataactgaaatcgcaaga

SEQ ID NO: 100731 - DNA, 454 bp, Zea Mays
ctgcacaacagctgagagggcctaccagtacttggtgggcaaatttgtagcggttcaaccggctggacatcagatcacttgcgaggaattcaagctagcattccaggatctttatgttccagagggagtgctccatatgaaacaagaagaattcatccggttaaagcaagggggagatactgtaatgcagtatctcaacaaattcaaccatctagctcagtatgccatagaccaagtgaatacagatctgaagaaaaagaattgttttatgaggggacttaatgatggacttcacggaaaatggcaacatgtctggatcttacctatagtagggttgtcagtacagcactagcagtggaagcaaaaataacgggcatggaaaatcaaaggggtttggaggtgaaaggtcaaatcaaggacctgagaagagaacgaggttggtgatccaaccttt

SEQ ID NO: 100732 - DNA, 641 bp, Zea Mays
tctccctagagctaaaaagacttcataaagaaaaggtactctgtcacgcattacattggaagataaaaacgtaaagcggaaagttttctatctcgtcctgcatggaaagtaaaaaataaatcgaatagacagtgtgaaatacaagaaaggcatagatagatgtggctggagacgtcactttttggacataggtagcttccatcttgccctactgcttgtacggacgaacgggaatatatatagacgatgcaaagctaacggaatcaatatctagtattctagctccatatatagcttacactgatatagtagtggtgtgcccttccagtcacccaaggggctttagcaaacctcagcatgctttctcctagattctcctatcgtgatcaacccctcccccgccgtttaatatattgcgataagatatgctggcgactgcagcagcccccgcgcgcggctacgtacctgcactgcacacatctctctctctctctctctctctctctgtctctgaagctgaagctgtcccgatgaaagaaccaactggatgtgtccagaagctagctagccttgcttggttacactttcgagtatatatgatatttctggatgtacgtctaatataattagacggattctct

SEQ ID NO: 100733 - DNA, 380 bp, Zea Mays
atttactaggaggaacgataaaacgaaaagagttgagttacctgaagattggagaagaaggagggtaatcccaagtcaggagaagctgcgtcgtagctcgacgaaggaagatcaaccgaaagaatttgaagaacattgtcaggggttgactcagccccaccagcggatatcagaattcttgcatctggctcgctgacctccaaggcgactcgctcgctcgaagtcaaagaagcatgcatcgccatcaccccatcagattgtggtggagacgacccgacatggacatccatggaggtgtgggaaggagagctcacttggacaccctcgggggctgggttgtagctcgcgccacccaccagagccggatcattaccggcaac

SEQ ID NO: 100734 - DNA, 587 bp, Zea Mays
tactattgccgtcccaaaatcaccggtgagagacgataggcaacacgaggagtcggaaagcctctagagcggttggtgggctccgatccctcggtcaatagcccagacactagtacatgacctagctttagagttcacaaggtgtgccacctaacctatacccaattaggaaggtgttgatgttattcgaattggttctcttgcataaacagacacgtgaaaacgttagtccgagtcgtattcggtttcccgggctgtatcgactagaaatagccgattgtctctcggcatcggatcatatctatgcgtcaaggacacacagagatgaaacatgtggaacactgctccactctcatcgagccgatccaatctactgtaattaaagctttcactgcataatcataacatcctacgcgtagccgggcctaacgagcatgaagggtgagaggacgacgaccagatcaaaggtctaagaactagccggagccgattccaggaacaatccctgttcaagtcgatgtgaaacacctaacacgtcataagaacatccgacccatgtgcagggcatagttatacggatataaagc

SEQ ID NO: 100735 - DNA, 661 bp, Zea Mays
gtgggtgcgcggattgcgctcgggggacaatcggggtgttcaaggactcgactaatcatgaattcgtcgccgtagtggagactccgctgcgggatcgcgacatcacgggggcaggagaatcttcggctcacatcgaggtaaatggtataccatcctctccgcttttcgatgggcatcgcgttggggggcgcagattaagctttggggccttgtggtgtggattggcgggcggtccggtggtgggctaccgtgcttggggcgtcgccgccgtctggttgttcggtgagagagagaagacgaaccgtgagccgttagattagagtcgacggcccggattagatgccgcataccgtttcgattagataggattcggaccgttggatctggcgcgtgcggatcagattagatcgggatgccgatttgatcgcgtccacccatgaccgtcgattggcgatccgatggtggggaatcggatctaaacttcattaaaccttggccgttgatcttgaatcgtgcgtatcctgctccgtaccggttcgggggaagcgcagatgtaatctgggccgccggtttctaatcgggcggctgtgggcttctaataccctttcggcctgacacattttcttatgagtccctacagtttgttgatatcaacccgcaa

SEQ ID NO: 100736 - DNA, 916 bp, Zea Mays
tactttttatccactatcaatttttcatccactaataattcatcgcgggcccacaacacagtgccaaacagtgtaagggcgcatgaacagtgaaccgccaggagtggagggagagagaagcgctcccctcggtagagggctccgtagaggcaaccgttgcgcgggtgggaggacttctgtacacggcatgcaaggggagaggaaagtatagcggcgacccgtgcagacagtctaagtggagtagcaaactcttcaatgcctaccccctcctcctatccatacagatgtttaggagctccttgctctacattggtaacccctacaccctcccgtgcacgcggggagcacgccagatgtgagagaatactagtcgaccgccttccatcgatattgtggtatgtagtatttgttagttagaaaattttagtgataaatggtgaatagatatagaaaataatattttataattgtagtagggtataacgggatggtataggaaaaaacaaaaccgttagagattggagatataaaagtatccaaaacagtgagatataggagaggtagaaatataggttaccattgaagagtctaaaatgctgacaagtatgggatgatctcgtgttgtcagagtatacatcaattggtaattttggtaagataactagaaaataaatctaccccaattctatgctgcactattaattgactcatatacacatatacaaaactaattatccatacaaaaaaatcaaaagagcttcaaaaattaccacacttcacatggacaaggcaagaaaacaagcaacaaagggtgaatttctctgaaagatcaggcagatggctaataagacagtagaaatgagcagcacaatgggagtataaccacttaacaaaccacagatacccaactctgttt

SEQ ID NO: 100737 - DNA, 629 bp, Zea Mays
agagaggtagatatggagagcactatgctactattctagggttttggttgctcgaacaaggaggcaaccaagggttgaatgtcttggtttgctaggctatggttcgatctagagtgttttggtcccttctccaggagtctgtgtccaaccttatatactagagagtagtgggagtacaagttacgtggttacaatgttttcctaaggtttctcatcctaggtttcgattcttcttcggtggtggtgcacatcatcctttatcttgtagtggggtgtgactacataccaagtttcccccttaaaagcatctagaccctacttgggtttcaatgattaatggcaacactagattattaaggccaacatgtgtttttagaggcagattgagttaggtcaaagtaatggtgattgattggtattatatagtttttgtgcctctattgatagaaatcaattatcaaattttaaaggatgagtagccccaaacgtgtctagtgtgcaccagatttgtgccaccgcataggagatagccctgttcagaatggagttaacaccgacgtgtttagtgtgcaccatacttggtgcaccagaaagggcacctagagagcaatgaagataagtgataggcc

SEQ ID NO: 100738 - DNA, 474 bp, Zea Mays
cagagaagcagcactcagaccagtcaaaggtctaatgtccaacaacagaatcgtcaaggaagcatagtgaacacaccagccaagaacaacaatgcaactactacagttcaacccaatggttgtttcaagtgtggcaaacttggccactatgccaacaactgccctaggcgtaacccacagacacctcagaagaaaaacaaccagaggactgaccagaacacacctgctcatggatctgcacagaacaagactccgtagaaccagagtagaggaagagtcaaccatgtgatagcggaatcagttcctgaggatgccgacgtggtgtatggtatgtttcttattaactccatacctgcatcagtttgatttgattctggagcatctcattccttcgtaacaaagtcattcgtggaaaaacataatataccaaactatcccttgaagaagaaactattaattcgatcaccaggaggt

SEQ ID NO: 100739 - DNA, 485 bp, Zea Mays
gaacggtgctcctttgtctaacacgatagtccttggtattccatgcaaatgcactatttggtcagtatagatttctgcatacttttctgccctgtgggtggtatgtactggcaagaaatgagctgtcttggttaatctatccacaatgacccaaatataatcatggtgtcgggatgtgttgggtaaacccacaataaaatccatgctgaggtcctcccatttccaagatggtatgggaaggggctgtaaggtacctgctaccttcaaatgactagccttgattctttggcaagtgtcgcattcagatacatacttagaaatttccctcttcattatggtccaccaatacaaagatttgagatcatgatacatcttgttactgccggggtgcatggaaaatttggaaagatgagcttcatccaatattttatgcctgatttctggattcttaggaacaaccaatcggtcttcaaaccatagaactc

SEQ ID NO: 100740 - DNA, 298 bp, Zea Mays
agaatgtccccggattaggcgtaatcttaagggagctgtccgtctttctcgcgcccgacaccctcaaacatcagagatagatcgagacgaagccatcgggttttccttaagataagcaaagtctgttcgctattagctaggagataagatggaagagtgtgatcagcgtgtgcgtagggagcgccccactgtcgcgtatataaggcctaggggaaccccaccattttcatcttattagcacctctccattcgggaaacaccacttgtaagcacaccacacatacaaagccaccccagg

SEQ ID NO: 100741 - DNA, 278 bp, Zea Mays
gcagctaggcgataaagaccccagatatgcagggatactgtaagtgcatctagcccttttgtgtggttttggtggattgaatgacaacacagttaaaggactgacaagtttgctaaatgttgaacaagaaattgagtatattgaatacacttgaataacgtataatgagttgtatactaaggttcaacaacaagtcaaacttgatgatattctattgaagaatgaatcaagagtgcataagtgaggaaataccaatcaaaggtcaaatgacaaaggag

SEQ ID NO: 100742 - DNA, 443 bp, Zea Mays
cgccagtgttctgtgcacctctgtgattattttgccccaagcctgttttcttgctgcacctagatacttgtgccttggtccaactgttctattacattttctaggccagcaactaggacgagtacttggaacacttattcagcgttgctatctgttactgacttgtgtgccacatatatatatttagtcggccttcccagagccccagctttctctcgggcagaacaagtacttctttccaatcacacccacgctcgttgcatagtcacaccagtcaccatttgccacctacattgctggtaagaaccttgtaagagaggggtaagacgcttcataatttgtataccaccaccaccaccctgagagatagttgtagggttcacattgtttgttgcctgtttgtctctgttttgtgataacaatgacatgaccaaagaatcaaa

SEQ ID NO: 100743 - DNA, 895 bp, Zea Mays
cggtggtcttccagctcactcccacccggaccaggtgagatcatcctgtagatctgctcatgaagcggccttgattcgggggatcgatcgttccttgggtttcggtttctggaatggtagcaagaacagatttttaagaatgaatattttcgcggttagataatttggtctttgcgacggttcatgtgccgtgcattttgcagttgcagtgtcctaagatgcttttgtccatgtcaggactggagttgcataatctcggtgcagtttgcccaatcaaatgatttcatctttgttattattgttttgttgggattggtggtcttctgttagctgtaaacttataataagagaaccggcgattattgcatactgttaaaaaaactataactattagacggagtagactagttctctttcaggttgtcatggaatctactgttttgtcgaaggtcactgacggaagctgtcctggtcctgttttcgcttttcaggttcgacttggtcctcatagcgaatggccggaaggagaagtttgcatctggtttgttgaaacccttcctggctcacctgaaggccgcccaggatcagattgcgaagggagggtactcgatcacacttgaaccaatctcagagttcgacgtgtcattgttcacgagaggcgccgtggagaggtccgcttctagatttcgatactactctagtacagttatttctggcattgcctatttgcctcttgggtcaattcttgtgtcagttctttgcaggtttgtgcgtttcgtgagtactacggaggtccttgagcgagtcacaacactggagtctgagatcctgcagctcgaggatgccattgctatccagaggaacgatagtcttagattaaaatgtgtaagcgcgg

SEQ ID NO: 100744 - DNA, 322 bp, Zea Mays
ctgggcagcaaggagccaaggtatagccccaagcgcaaaatgcttctgcagcatgcacgaacttatgtaagaaacgaaggccacgagaaaagaacagtatcacaacaacttcggttgttatggatttatctcccatcccaactcaagctacccagcgccaacattttggaaaagatgaccgggaaattggatggaggaatggttttatgtgaagaacgacttggtagcgagggaggatgttaaggaggttattatgcgtcccctatggtcccgcttcggccttcgaaagctgaaggatgaaatcgatgaagccgccgaagca

SEQ ID NO: 100745 - DNA, 396 bp, Zea Mays
ctggaactaaaccctaggggcttatgtgcaaaagtgatgaacttttgggctaaagtgcaaaaaccaagccaaataagcattttaagtcatttggttcaccaatatgtggacttgaaagcaaaaccctaagttttggacttaaatgcaaaatggacctcatttgagttctataccaagtctgaaatttagtgttaaaggctccactttggggctttgtaactttcaaagcatagggtttttgccctaggtcaccacatcaaagttgaagaccaaacataggagaacaactttgcttaaaggtgtgggcattgttgttaaggaaaaattgaagaaaatctcaacctaagttggactgtcagactggattcattctgaaactcagcttttcagtgtaac

SEQ ID NO: 100746 - DNA, 582 bp, Zea Mays
tcatattacattgccaaaatgtaataattatatagactccagtgtacaacttgactttattacttattttacataagcataacacttagactatactattctagtcttcttcatcctttgttgattcatttcctactgcaggagaccattcgtcagcaaggttcatggaaggagggggcctaaaaaggtccttcatttgctgttcccgatgatccggctcccattgcagcaacgtctggagtcacgtccgggtgcagtcgagcatacaatacatgcacttcttcatgtaaagtattacagtacacttgcaggctttcgaggcacgcactaagctctaccacacgagctagagctttcgcttcgcagtcccaagcgaaagaacgcgagttgacggcccaatcaatggtcgtatcccgttccgagatttcgtactgcaagcggctcacttcggctgacaattctgctatatggtgactgtcctgctctcgtgccctattcctgtggtgtaactctgactggagttgttccatcctggcttctaggtctccaattgggtcattactgcaactactacttccttcg

SEQ ID NO: 100747 - DNA, 281 bp, Zea Mays
tgcttgcattagaatattaagaatgttggtagaacccgattaagtgattattccctattaaactaaatttgtctgtatgatgtttagaagtcacagtaaatgtatgtgtgcctaaagtagtttaataatagagtaactaataaatgattaaagtgaatgtggtaaatgtttgtacgagtgatgtcgtgtttgcgttggttaattataggtagttcgtcgtcttcccagtaatgttgacttgttgtgcccgttgacatgtagatagctagcgctagtgtgtg

SEQ ID NO: 100748 - DNA, 273 bp, Zea Mays
cggaaagggtgccaagaagccaagtgcggacgacggcattcatgcgaatccaatcaggtgactcgggaaaaacagaatcagagaggacgtggcattccagggaaaatttggtgagggtgagaaggaaagattcggaccagcgggcgtaaaagttggagttggtgtcaaggagtagagggacaagagcccggatgttggttactgcaacagcctgggcgtgaaggtttagcagcgtggctgcctcgtggtggagaagagcagcatgcagagttg

SEQ ID NO: 100749 - DNA, 679 bp, Zea Mays
tttcaaacaagtactattgatgtgattagtcatgggtaaaaccctagagtagggtaattaaccctaaactgggcttagaagtgtaaacatagcctaaatgagaaaaaaaacttcaaaactcatgagaaataatcttaagatatccccattaatggacttaagtggcacccaaaccctagaagaactaaaaaccctaaacaaacccttggaaaaccctggattgaaaccctagggggttatatgtaaatgttgcccacttttggacccaagtacaaaaatcatggtattagggcaccccaaagcacatggttcacacatttgaggatttccaagtcaaaagatgtggaaggggcttatttgcaaaaagccactcaattcctctcatgtggctaagtctgaaaatagttgaacaaggctgactttagagctctgtagttttaaaatacaaagaatttgcctagggtcaacatatcaaacttgtagagctcctataggagtacaactttgctatagggattaagccttggtgtcatgagaaattttgagataattagatccaaagtcgggctgtcaggcaaccctaagtctgaatcctcactagcagtaaagtaggatgaacttagagctcgatttagagttagattcattgctcgattgagggtagtttctatagcagaat

SEQ ID NO: 100750 - DNA, 977 bp, Zea Mays
tgaaaagaggcatttctggtggccaaaagaaacgtgtgactactggtatgcctgcatcatgccattttatcaatataaataaatgatttgtaatttctccaagaaactctcaaactattcactacatgtataatcatagctattacagccgttaaatagaggatagagggccgtccatgaaatgcagcatagctatcagttattttctgaaattgcagagcttatgtttattgttcttttctgtagtagcagacctaggtaccctttggggtctagttacaaacacagagccccatggactctaattcgtcacatattttaattgatcggaagcttaatcagtatgattagttaactaggaattctaaaataaacctatggattggtttaagtgatgactctggcactgctttcctctgttatttatacattgtttctgtcatatccagcataaagaatcctgatgttaacttccttggacttcaataattggtttggctgtaggtgagatgctaactggacctgcaaaggctttgttcatggatgaaatatctactgggcttgatagcaacagcacatttcagattgtcaagtacatcagacagacggttcatgtgatgaattatacagtgatgatttcccttctccagcctccacctgagacctataatttgtttgacgacatcattttactgtcagaaggttacatagtctaccatgggccacgggaagacatccttgaattctttgagagtgttggtttccggtgccctgaacggaaaggagtggcggatttccttcaagaggtgacttccaggaaagatcaacagcagtactggtgccacaaccacgaagattaccattatgtgtcagtcccagagttcgtgcaacatttcaagacattccatgttggccagaaactccagaaagagttacaagttccttatgacaaatctaaaacacatcctgctgctttg

SEQ ID NO: 100751 - DNA, 439 bp, Zea Mays
ggtcgttgggacagttttgctgcccactgtgagttcaacagacataatcccttttgcttgttatggctcccctgaaaacccacttagattcatattcgtcttaattagttcactctctttgtatcctaatttagaaaacacggatagcggcattacatttacacctgctcccccatcgaccaacatgccccccattggcttcccatcaatgtgaccacgaacatataatggttttagatgagatccctgctcatttgtttttcaaacacagcacactcagcccccaatgttagctcagcctcatctccctcttctgctctgaatttagtaggtaaaacaaacaccatgtttatatccatgtccccttgtgcttcagcgatttcttctttatcagaaccactgctgctatcatcatctttttcctccctggccaatcgtt

SEQ ID NO: 100752 - DNA, 326 bp, Zea Mays
tataagttgatgcttgtatataaaactcaccctattaagtgacaggcagagctcctgccatttgcgttagaaaaataatatatagtgatgcttatgcatcatcaacacatgcaaaatctgatcatagagtagcgatataccacgaacgttatctgtgattactagttgattcagattgacctgtactagtccggaaataggcaaatcaattgaacacaaatgtgttgtgggcaggcatcaatcagatactagaattaagcaagttctctcacctgtcctccaaagttgaaaatgaccaccttaacatcatttgcgatccctagttc

SEQ ID NO: 100753 - DNA, 273 bp, Zea Mays
agaaatttgagatgttcatgatagaagagtttgacttacttccttggatttcaagtgaagcaactcaataaagggacattcatctctcaaatgaagtactcataagatatccttagaagcttgggatgaaggacgcaaagcctgctaagacgccaatgggaactaacggacatcaggaccataacgcgggtggtaagtccataggtcaaaaggtataacagtctatgataggacccttgcattatctttgtgcaagcagactgaatattatga

SEQ ID NO: 100754 - DNA, 343 bp, Zea Mays
ccaattgagtggtgtcctacaccttcttccatagagagcttcgaaaggtgccatccttaggctagattgataactgttgttataagcaaactctgccaaggagaggtgcttatcccagttcttgccacaatcgattccacaagctctcagcatatcctctagaatttggtttaccctttccatctgaccatcagtctgtgggtggtaagctgaacttctgattagcttggttcccaaagactcgtgcagttgttcccaaaatctggcaacaaattgggctcctcggtcagaaacaatggtccgaggtaatcggtgcaaacacacgatctggtcaatgtacaac

SEQ ID NO: 100755 - DNA, 980 bp, Zea Mays
cgggtgtggctgggtggtaagtgcaagcttctccaccatgtcgctgctggccaagttgttgcagctacctccatcgatgatcactcgacatgaacgctctttgatgacacactttgtttggaacaatgtgtgccgctgattttgctccgctttctccatttgtgcgctcagcacacgctgcacaattaggctctcatagcggtcggcttcatctgcattaatatgttcttccgagcagccctcacttcgtgcatggtcggccacaagcaatgcaagtatatcttcatctagttcactactagatgagtactcaccatcagctttgaccaccaaaacacgcttgcttgggtagtcatgcataacatgtcaaaatcccttgcagcggtggcactgaacatctcttgttctacctgtggatgccaccgatgaagtggttgcagcaggtttttgcgttgtctttgctgctgaatttgcagggttgtcacgaggcttgtcgctagatggtggggctgctgttcgagctgacgatgaataacgtgcagcagcacgcccagttgatggaatacttgagcggggctacatggaaatattcctccctgcagaaatgttagtcctggtacttgcacgtcgtccttgtacttccctttcaactttgcaagctagatggaacaaacaggttatgttattgtactctttataagcaaggatgtcctgaatttcccagtttatcccgcccaaaaatctagccgtagcagattccacagcctcctctaaattgcaacgtagcatgcccatttgcagctcttgatagtattcttctacacttttagtaccttgctttaactgctgcagttggtttaaaagatcacgtgcatagtaagatggaacaaatctagccctcatgatccgtttcaaaacatcccaagtttgtggcatgttatgaggatttttttgccatgttctatccaccaaacggaaga

SEQ ID NO: 100756 - DNA, 294 bp, Zea Mays
gtttgactgtcctgtgatttgcagtggaccacgcaacgcaatgctagcactgtagtagtgtccatttctattattgttcgaggcatcttctgcctgctcgtaaatccaattatcctgcaatcattagttttttaggtaaaatctgcaaccttaagccgtttggttactttatagtgtgtttggttggatgtacaatgaggaatgaaagcgtgcggccataattttatagtgtttggctaagagtcgagtggaggcgaggcgagctaaacaccatagaaatttttggtggtggcg

SEQ ID NO: 100757 - DNA, 476 bp, Zea Mays
cttgactgcttaaaccgcaggttgttttcaatatcgtgctttcagctttcgcaacgtaactagattgcctaattgcaaaggcctccagtgtcagcctcgagcgttcagagttcaattgacgcaagtttctgcaggatatagacagttacctacctaaagctgttttctgttcgatccgtgctgcgatattgaaaccatgaacacttaatgctctccaatcgtatccacggtggcaactgaaaccactgcaggagttggagtggcacagatgcggtgaggacagaggacacggccaagataggatgattgttatggttgaaacgatagtgatgacgtggctttgccagagaagagaagaactagtataatgacacttacggggttttgcttatgtaggatatatagattttacattttaggccctctagacagatgggctgcacagatatgggtgttcaagggagactgtgttagtg

SEQ ID NO: 100758 - DNA, 507 bp, Zea Mays
cgacaccccactttggtcagacttgatagatacttttgcaatccgaagtgcgaggagtttttcgacaattatgggttgcacactctttcatcttcggtctctgaccgctgctcgctacttctatccaataatgctaggccgaggcgtccgcgttccttcaaatttaagatttttttggacgggtttactaagtttccaacatgtgtggtggaacaggtctgatcgaagctagcccaacatcaatgaaccttcccataggttgtattataaactccagagcacaacccagacgctcaggagatggagctccaggcttgttcttgagtctaggctgtccatgcatatggccatggaagttctccttaggctagacctagcacagtgtcggactactagtcatgtctccgaatcacactgaagatgcgtttccttggctatgctgttattgaaagggcacgaaataggttaagccttagattctgtgatgcaaacaccaaattatttcac

SEQ ID NO: 100759 - DNA, 1023 bp, Zea Mays
atttgatgcatacgttttcatttcttgcaagtaaggacgatcaaaggaaagggtgaaagaaacactaataaaggtagctgtgacgagataggcgaatcattacctgctagtatattggcatgcatgcactagctagctaccaaccaccgagagccctagaagagactagactagagtacgttcgagtacttttgaggccgccaaatagaaccaactaagtgctcatcgtcatcgatggtgcctgtccaaagcacacagagagcagcactagctagctaggatttgaaccacagctttttctagcgtgaccaacagcactagctaggcaagcagccgaaataacgcatatatatgaaaaggaatttggttccgcaaaaaaaaaaacggagaacggaaaaggagcaaatcatgcatgtggacggagaacgcacgcaccacgcgaattaatcctgcctctgcatggggccacgcacgccgtcgccgatggacacatgtatggcatgcagcgcttgagctacgacctgcttaattatcagtagcgaagaatctcatcccacatgcgtgtttcttcaacacgtacgcatggacactctttagtgtcaaagctaaagctgagaattcaaattaaccttgctattttgatcgcggtgggctcttaaaatgattggacagatgcagcaccgtacccacgccttacaactctcctagctagctagccgccccgcaaccacactagaattgttctagcctagtagcctgtgtctgtgtctgtgtgtgcgtgtagcgtgtcctatggaagacggaaatttcagctgcccagaaaaacacacacatgcacgacgacgacgccaccagtttgccggtcgacacatgctagcagtgatgggcaggcctttgtcgatcgccatttattctgtgcagcaaactctgctggctttaatttgcggaggagcgagcaaattctactctccccggctttaatttgcggatttattacaagtcgtcatcccaacttcattggac

SEQ ID NO: 100760 - DNA, 379 bp, Zea Mays
attacacttacttgttttctagtacaagtcgctaccagttttgctatgactttctactaccgaccgaccgttacataggcttttttcctccgttcaatatataatgacggaggccaactttggttggttaatccaatcggttcatcgatggtcagcaagaatgatggttctaatgatgatcctgcacgtatttcgtgtgtatctcacaagtagattttaaaaaccccgtgaattaacttgggtcacagacgtggttttggctgtattgacagcatcatttggtttaactggttagtctttgccttgggatcaaattggttattgggcagtcaaaactgttacaggtgtacccgaagctattccggtaatagggtcccta

SEQ ID NO: 100761 - DNA, 510 bp, Zea Mays
cttcatccaaaatttgctggcggatctcatcattcttaggcacaactatgcggtggttaaaccatacaacaccttgataatctcttctgaagcagttggctttaccggcctccattttctcatgaatgtgtttcattccctcatcatttctttgtgcttcaattattctttgcaggatgactgactcaagcctcaagtgatttatagtttcatgttatatcattcccaggttcaacttctccatttcttggcataacgtaatgtcagaagtcttcatggtaagacaatgacagaatgccttacgacttaacgcatctgccactacattggcttttcctgggtgatagtgaatctctaattcataatcctttaccagctcgagccatctccttcgtctcatattaagctctgactgggtaaagatgtacttcaaacttttatcatctgtataaatgtgacagacattccccagcagataatgacgccatatttttagggcatgaaccaccg

SEQ ID NO: 100762 - DNA, 366 bp, Zea Mays
cagaaatgctcgatcctgaccgggactcgatccatgacctccccctcttggggtcagaagacagacttagctccccatcgagcaaggccaaccacattggcctaggaatgcctcatcgccaactcactagagggccactccccactcatgaagagcctcgaggagactcccaccagtgttatgatacgtgtcgtggtgtccgctctgccttggctcgacttgtctcctcaaagaacaccatcagagccgatcccttcctggggcatctgaggccatgcaaccaaaaggcagggattaccatgatggcagacagggcggttacgtcggggcgctgggtggatgcacaccacaactaccgacacatgt

SEQ ID NO: 100763 - DNA, 300 bp, Zea Mays
acttcaatgtttgagacgaggcacttccctaacctgctgcaggatgatctgcatgtgttaggaacatacgtctgacccttgcatgagacaaagcgagtgtctgagaccccttgggcttgctactgcatcactcgcgttcatgtcagggtgatggatgcaggagataggggtttcacgactttatgagctcatgagtctctgacaccgctatccacctacattgtttcagtcagcaatgctgctaggcgagctctatggtctctcagccacacttaccggcagcagctgcatgatacgaag

SEQ ID NO: 100764 - DNA, 397 bp, Zea Mays
ccctcctctaacccctcacctgctatgtttgctttctcctctttattgtctatcacagaggaataggtggagagccttagggatgaggagctgctattggtgaccatttggttcatgcagttccactgcagcgatgtggcaggtcgaaggatggatgcttcaactttggcaaccccgaccactttgtcaccagttgccccaagaagggccacaggaggctgacccatgtgaccaccactctgatcgccgcaaggggaagcgggagtacacctccggcaagcacaagtctaagggaggattcgacaagcaggcactcgagaagaagtacctccagaaggctaagatcaaggagcacacctttcttgcctcccttagcgacctcaaccacgactccgat

SEQ ID NO: 100765 - DNA, 799 bp, Zea Mays
ccaatagttgttgggttgctgactttggggatcagggttatgaaagagctgttaagagcagtcaactgaacttggccactgaaaaatttatcacacaattggtatatgtcatgcttaatgatttcccaacaactcttgtaaaaggcaccgttaaagccgtctggaccaggtgctttatttgctggcatttccttgaccactttgtcaatctcatcatgagtgtaggactgcggaagggaggttaagtctcttggggcaatgagatgatgcagatcgaagagcatcggtggcgttgtggtagacccaagtctgttattgaactcatcccagataattgcttctttacaacgatggtccgttatgagcgtaccattctgatcctcaagcccagttatggtgttaaacctaaaccgctctgttgctgccgcatgaaagaaactcgtgttttcatctccaaatttggtccatctgacagtgtacctttgtctccaaaaaatcttttttctttccagtagattcagggtgtgcttcttcaaaatatttctgaagttgaactcttgtgtatataggggtctgatctcttctaatctatccaatacaaggagaacattgttgcaggagcttatggtgttattaatcgtagatagactttttccccagcgttttagcactcgtcgcaaaagcttgaatttagctgcaattcttgaggcgatattgttagctctttggttaatgttccagacctgctgaaccaactcagagaatccaggttgttggatccaatggttttcaaaacgga

SEQ ID NO: 100766 - DNA, 358 bp, Zea Mays
ggaaaactgctgcttcggccgctccagatgagcctgcaccgaagggcaaaaagttgaaggtccttacccaccggccacactatattgaaccggctgtggttcctgagtttggtagggaggcttcttcagctgctgagccgaaagaagctgctcctcccacgcagaagattgaagagctagctgtaatgccgaaggcaccttcggctgagctaattgaaacaaaggttgacaaagataaggctgaaaggtcaaacactgaagaagtaacaaaaatgcccgggattttaagtccttcaacagaagcaacagtgctgaaggcagaaaagagctctgccataaccactagaagaaaaaggat

SEQ ID NO: 100767 - DNA, 482 bp, Zea Mays
agcttggtggatcacaggggtttatgggccacagtcgagcgctgagaaacttgttttcctttaagaactaagtggcctcacagcacaacgttggacaaagtggttggcgttaggagatttcaatctcacatatcaagcctcagataaaaataattgtaacttgaatcggcgcctcatgggtgcattcaaatcaacactggacaacctacaaatgaaggaaatccacctcaatggccgccgctacacttggagcaacgagcaagtgaatccaacgctaacaagaattgatagatttttttgtacaacggaatgggagctgctttttcctagctgctatctacactcccttccctccctcatgtctgaccacactccgcttctcctccagggagaattgactacgacacatagcccctctttccgtttcgaaaatttttgggtaatgatggagggattcaaggaggctgttcaggctgcctggc

SEQ ID NO: 100768 - DNA, 293 bp, Zea Mays
tgaggtacgattatggccagtggaggttgcggcaagggtatgataaggagagacttcatcctgaactctggatcttgattccgctagctatttaacttgatctttgaagacttgggttgatgcttatccttctttgatgtggttggtcttctttggaccttcttggagtcaccatccgagttagggacatgtagttaagataattatgggtaggatagatttcatgaggtaggttggttagaatccatgtcggttaaaacagaggggttatgcaactatcgaggtggttacgg

SEQ ID NO: 100769 - DNA, 346 bp, Zea Mays
cgaactcatactcaaactctaaaaagcaggtattatatacaatctcatcattgttacattatatgttaatttccactttgcatccaaatattagacaaaaccataataatgtcaaaaagattaccattttaatgttggcaataaactgtcgagggacataaacatcccacctcaacatataccagactgcaacattatgagctcatatacgtcttcccacttgctgatgtttgacgccacaccgcaaaaacatgtatatgtttcatatttgttttatcctttgtaatctcaattatcgattaaatgtaattgacacatgactgagggtttaaacatagtatcattg

SEQ ID NO: 100770 - DNA, 599 bp, Zea Mays
ctatctcgtctttcttgtgaccgctccaccttcggatcttgatctcctctcgtcatcctcaccttttgtcctcttgtactctcgcccctagtcccgactcctccaaaccctagatttcatcgttcgccactattcaaagtggtgttgctgtcgtagctcgtcttctgtgtgtgtgggttttaggccgacacgacacaccattttagccagttttttggaccggttcggcatgaaaaatggcatgatatgtcatgcctaggtcgctggccaagcacgaagcccaactagaattggtctgatgacatggtgcgccttgcttggcccaacatgatcggacttagacttgacttggaccaggaccgacccaattgttcatctataggtcctgtttgtttcaacttctgatcgttagaatcagtttctagcagccaaacgcttcgcttctcagcccgattctgtaaaaattgcttctatgaaaatcaccctagtcaacgtaaatgcagaatttgctaagttgtcgcgacagcaagaatctgtcacgttctaaaccctaaaccatgcacgtaattctcgtagcagctagattatttaggtgattg

SEQ ID NO: 100771 - DNA, 594 bp, Zea Mays
attcatttataactgagtcattcgtggaaaaacataacataccaaagcaccctcttaagaagatgttacacattagttcaccatgaggtgacatgaaggccacacattcatgcttccatgttaatctcaatattcaaggactagattgtccagtcaacctagtggtcttgggatccaatgatattgatgtgattcttggatgcgactggttgaaaagttgtgatggagtgatacaatgtgccaaaggaacaattatgttgacaagtccacaaggtgaaagaatccaagttagcacagacaagtcaacaaatgcaaaaggagagacaatggtaaatcacttggaagaaacgcccctggaaaatatcatggtagtgtgtgaatatccagacgtatttctgaaggaattaccaggtatgccacctgactgtgatatagagttttctattgaattattacccggaactgcacctatctcaaaaagaccttatagaatggatgtcaaagatttagttgaactaaagaacctgactctagaatttttattgctcctcgctcatctaagaagttcactttctaaccaatcagatggtgaac

SEQ ID NO: 100772 - DNA, 472 bp, Zea Mays
cctcaggattagcaaatcagaattgacttcaagtttttgagcgaccgcatctgcgatatcagcgactggcacaagcacatcactgaccacaaagatagacactgcgttcttcaaatcctcttctgctttatccatcaaactgttccaatcgatcacacatgggtgctgatgatgcactgggctaggtacagccagaggggtctcgtcatttccgggttgatcagattgtccacgacccaaatcagaaccacccctaggggatgacttgcgctttcgatggcgtctgcgtcgcgggcgggagggggccctgcgagacagaaccagctgcagctccgacgtcactggatggagtaacaaatgctcgtgcatccactgccccttccatcatctcgaaatggacccgacccttctcaatgcctagaggggagattctacaccagacactgactctcttctccacatgcacgatcct

SEQ ID NO: 100773 - DNA, 579 bp, Zea Mays
gttggtctccccgaatcaaagtgctttcatcaagggccgatccattcaagacaatttttttgcttgtaaaacaaacagccaggttcctccaccttcagaagcaggctcatattctcctaaaactagacattacaaaagcctttgattcagtgtcaggatcatttttactggaggttctccagaagctaggctttgggctgatctggcgggatgttctcagtggtctgttgtcatcctcaactacacaggtcttactgaatggaatccctggattcaccatctttcatagaagagggctacgacaaggggaccccctctccccttcgttattcatcctagttatggatgtcctcagtctgatttttgctaaagcttccgctgttggactgctgcagcccctatctacaagggcgttgcaacacagggtgtccctttatgccgacgacgtggtttcttcatcctgctgacttggatttgaacctaaccatggatatgatggaactctttggtgatgcctttggtgatgtatagagacggatgtggcagtggttcagaacgttcttccatgtgagctgaaag

SEQ ID NO: 100774 - DNA, 529 bp, Zea Mays
gcaatggagtccctagccatatctggaccatcgttccagctatatgacgaaatacgcagtgatggcagcagcagaccagaatggaaacaactgcatgaatagatccacaatggcacccaatcgacgccatggcacatctaagagggcctaatactacatgggtctagggtatttgtaccacctacatcaccacaatagttcacattctaaagctagcacatggcgcaggacatgaagggttccaaaagacattacacagcttcgtgcagacttctacattctgaatgatagaactctggtccgtgactttgtcaaatcatgtacagtctgccagaaaaacaaaactaaggccttacacctagaagggtgctgcagcccttagaagttccctcacaagtttgggcagacatagcgatggacttcgtggaaggcatcccaaaggtgcatgacaaatcagtcatactaaatgtggtggatcgtttctccaaatatgcccatttcattgccctgggacatccttatactgcag

SEQ ID NO: 100775 - DNA, 427 bp, Zea Mays
gaactgaacaagattaagttcagtgcgtccgccgctgacgttccttcgccatgatttgagctcgcgccacgattggtgttgttgagatgtggatcaatggagaggtaaaaggtctcgggtttggattcggtgaccgagttaccgttctagccactaacaccacttgtcttcaccatgctcccttcaccgttatcgtagcaagacaccgggcactccggccatccacgcagctggttggaggccctcgtgttgaaccactataaatggtccgcggtaagtccaccacgttattggcctgaggacaccgtaaaggctaatgtggagctcctcgggttatcgccgccaccatgcttcctcggtcaaattgaccaccgtcgtggtgactccctttaaattgagcttgccctcagtcccgcctctccgttac

SEQ ID NO: 100776 - DNA, 388 bp, Zea Mays
ttacgggctctatttgatggcgaggagcttagactgatgttgtttaattttcgagaggctggcctgatcccgaagttgacatggccgttctttggtgaattcaagtggcaacgttgccctcgccccttcgccaaaggatggctatgggaacttgtttgcggaacggaatatcttgtatacgaatgatagcttcgtgcttgttgtttgtcccgttttcaatttaaggtgtgcccttcgttgttgcacttgtgcttgtccggttgcattagtgggcgtctttggttcagagtggttgtctctcggacgacttcgtgctatttacaaagtgttctggttgtgctgatccagttgcacccttaagcaacttttgtttggataggtaatgtgc

SEQ ID NO: 100777 - DNA, 703 bp, Zea Mays
cttctcttaggagttgtggcagaactcttttgtgtcttcagcgctgttgcttctgttgaagggcttaaaatccctagcatctttgttacttcttcagtttttgacctttcagccttatctttgtcaaccttcgtttcaactagctcaaccgaaggtgccttcggcattatagccggctcttcggtcctctgcacgggaggaacagtttctcttgattcagcatctgaagaggcctccccgccaaactcaggcaccacagccggttcagtgtaacgcggccagtgggtaagtaccttcatctttttgcccgcagccttcagcacaggctcagctggggcggccaaagcagcagcttttctcttcttcccctgtccccgcagcggatagcggtagtcggggtagacgaagctgatgatgtcaaaaactctattcattctcttttttcctcgacccccgaaggttgcaaatagcgcattatcttttgccttggaataagctccaagcagctcatcacttgtagcttcgatgcatttcagccagtcattgtttggttcatcgaacttatccccatacctgaatgtatacttcagccggactagatcaccttcgctagacttggtgatggtctccttcgacatttcccagctctctacaagtggccatactctgaatgctatatgctcttgaattaaatctcttgtat

SEQ ID NO: 100778 - DNA, 325 bp, Zea Mays
aagccttcggtatttggttaatacaaggccagatatagcatatgcagtgggcattgttagcaggtatatggaagagcctagagcaagtcattgggctgctgtcaaacaaatattgagatatcttgcaggcaccatacagtttgggtgtgtgtacaagagacagggctcaactgaacttgtaggttacagtgacagtgatctggccggcgatgttgacgacaggaagagcaccagtgggtgtgtgtttctgttgggatcaagcttagtgacatgggcatcacagaaacaacgggtggtggccctatcatcatgtgaggctgaatat

SEQ ID NO: 100779 - DNA, 1795 bp, Zea Mays
ttgggatggaaaaatcagatagataaatttgaaaaagccagctgaaaacaccatgcagcagctgttgttgcataatgcattagtcttgttttccccccctctccaatgcataatcacataatgtataagtcctgatatcagatttgcttcttcctttcgacatatgaggtcaggcttgattgtatagttaaacaattaccttatgggaaaaaaatccaggaacgaatgctatgttccattgccatcctcatcaagttgttgtgcaaatagtattgcaggaaagcacaaagtcaccaaaaacccccacaggaaccttttccactcctaaagtgatggaacctgttggtatctctaacagatatctccctctcctcaaggaaagcacacataaagtcaccaaaaatccccacaggaacattttccaccactgaagtgatggaacctgttggtatctctaacagatatctccctcccctcaaaagatgatataaatttcattgcctcatggcagtcgccacaaattcggaggttctttatcacccgaagggttgttcctgggctagtgcttatgagtcccaaagcgacagctagcttctcactgtgaacagcaagaatatcatctttctcttgttcctccacatcatgtaggacaaaatctgtgcttggtacaaagcctagcttcctcatctgaatattaagctggtttattttctcaattatcgcagtcatcatagggtgtgaatcatcaccagccaacaacatatgcaccttgttcttgatctcaatccagctacagcctttttccttcttcaagcctacatccttcatcatctctctaaccctattaacccgatcccacattttcttagaagcataaatgttagagagaaggacataattaccagcattttctggctctagatgaaagagcttttctgctgcaacctcagccagatccacgttgccatgaacccggcaagagcctaataatgaaccccaaatataagcatctggctcaaagggcatgtcacttatgagatcatatgcctcatcaagcttgccagcacgtcctagaagagtaaccatacatgcataatgttccatcctcggagaaacaccatactcattatgcatttctttgaaataatgacgcccttcctctgtgaggccagcttgcgtgcaagcagcaagcaagcaggtgaaggtgaccatgtcaggcttttgtttgcacttcagcattgagtgaaacatccaaactgcattcacagcctctccatacatagcatagccaccgatcatcgcattccatgacaccacattccgagataccattgtatcgaatattattctcgcatccttaaccctgccacactttgcatacatgtccaccaaagcactgctcacataaacatcatggagaaagcccttcctgagagcaaaacagtgcgctgacctcccatgcatcagagctgcaacattggcaaacgctggcagcacacaagggatcgtgacagagtttggttcagtcccttgtgcctgcatctccctgaaaaactcgacagcttccaaatccttaccattctgcacacaacaagcaacaatcgaggtccaggacacgacattcagctcaactccccggtcaacaaactctttgaacaaccttagtgcctcgcagacttgcgcgttccgagatagtcccgcaataagggcattgcaagaagcaacatccatgtggctggactcatcaaacacccgaacaacctctgcagcctggccgcacttcccgtacatgtcg

SEQ ID NO: 100780 - DNA, 1226 bp, Zea Mays
gtcatccccgatgtagacgaaccaatgtccaaagaccttatcgacggagaccacgtctttgccccgcaaaccctcaacaagtaccaagcccaaacgaaggcctggcgcgaccacacagtcgttccaagggagttcaacgaaggagacctcgtactcgtccgaaccacccggacagagtcacggggcaagctggagccgaaatgggagggtccattcatcgtcaagtcgaaggcgtctcctagcgcatacaggctaacaacgccatccggcgaagacctagagcattcctggaatattgacaatctccgcaaattttttgtttaaaccctcagggcctacgtgcccttgtaatccaccaaatagtattattatggcccacactcttttcctcccggggggtgaggtttttaacgaggcggagccatgtaatatacctgcaaaaatcccccgcaaaaactaagatgcaacacatcgaaaaagaccgcatcgacggtcttcgccattcgaccactccgaagtcagtgcgagaggcagcgcagactaccctcgcgtgcgacactccgcgcaaaagtcgcctaagcgtgcagccggaatagcacaacaagtgcgttaatcgaagtcttttattaaaaagacactccgcgcaaaaatcgcctaagtgtgtagccggaatagcgctaattgaagtctcattaaaaagacactccgcatagagtcgcccacgagcgcagccggaccaacacaggtgtacgaatacggccaacaggccgcatcaccatacaaattacaattacatacacacggcgagggcatcacatattacatcggctcaaccttcgggatgatacccatctccatgtaattaaacagcattatcctcaattcctcaccctcaaaaagcttccgaagatccccaacgcctatgcccgccccaatcggcgaggacaacaattctcgtttaccatcccggtctactcggagacggccacgctccatccccatatgacggtgcctgccacttcgtgaaaattcacccacactatgttttcccaccaccctttgccgcctacactcagcactcgcaccatgaagatcctcagcaccctccacacgcggagaagtctccgccgcagccacatccaacgcaacaaaataatccaagccttcatccgaggactcctccgtccaaggaaacgaactctcagattcaccatcggactcaaaac

SEQ ID NO: 100781 - DNA, 391 bp, Zea Mays
ggcacagagaagcggtggctggtgaccaatagcgtatggacagagggttaacaaaccgataacagatagacttcaccaccttctttttctcaccccaaaccttggtagtacaaatatcacaagttatttcccccccacaaccagctagcatagaatcttatccccaacttacctagaagtaactggagtccatagtggagggagatctttattatatcttttcaaacccaactctgaactgctattgcataactgaattctctagattcctttcctctgttcttccaactctggataaggatagaccattctaaacacatcaaacttgctcactaagcatgctctctaggttcactataatagcctagagctaaaaatgcatggatcagaa

SEQ ID NO: 100782 - DNA, 471 bp, Zea Mays
gccgcatgtgtctttgtcccttcatgcatgtggtgtgcccggcctgggatcgatgagctccgctcccggttccgctcttcatcgaagttccggcgatatccgtaggtaccacggtgagctagcaatctagtttgttgatgtcctcgtcgtcgtcccggccccgttcatgtctgtacgaacgccagattgtgatttcctagcacgacaggtccacgacagcgccacgttcatgcaatgtgtgtgttgttatcgcacagatcgaagatgtagtaaatcacgcacgcatcaccgggatctgaacattctgatgaagattgaaacacactggcacggtgcgggtgacgatggggatagcggaaacatgcaaggtattactccctctcttccccatcagtcactaatactcactaagggagtaagggcgtgattggatacacagttgcgtccgcacagggctcccgttgagtgtgc

SEQ ID NO: 100783 - DNA, 307 bp, Zea Mays
ttgtttttgtatctcttttgcactaaccatggcagaggatgcaaatgcgcggcctccacattctccacgaacagcgggcaacattttgaacgtcaagtaaggttacacacagatgctctcaacgaagatgttcaagtaaccaatgagcgcattggtcaattagaaacaacacaaattgttgccaacaacatattgaccacattggaacaaacacttgctgctactaatacctctcttgcagcaattattacacgattagataggatggaacaatttgggcgtgaaggtaggcaacaaggtgataatg

SEQ ID NO: 100784 - DNA, 636 bp, Zea Mays
atcgaggagtaagacgatatagagctctttatcttcagttcatgttttgttctgctcggtggatgaatccatgtcttgccatgctattgttacagaaatcgagaaaatgattcttttttgggggtttggatttagatttgtactgtttttcatcttatttcaagcctgattagaactctttatctggttggttggagatatggggtgattggggtagtgtattgtagcatgtctccatattcacaattcttcatcaattctcggtgatggactcttacctatctgctccagctccttacttgcgctaaaactgaacatggaccctgaatttgggaattgaggcagcaccagctaatacaaattgttgcttaattatggagatgatcactgattgatcgcaataaaccaaacagatctgggtccgaatgtccgccgcttcattttgaaaacacaacatcaagaaatttccaaacgatgagcatgcaaggctgggcttacagattttaaagtgtagccactcacttacaggaacaacaatgctacttcttcatctagcctccctacaaattgattgattgtgctggccaacactcaacagtcaacactggcaaatgttggatgcatgatttcaggaac

SEQ ID NO: 100785 - DNA, 564 bp, Zea Mays
ggcctactgtttagtgagatttgcatctctcttacgtaccacttggtgcttgagcgcactattattgtattcggagggggcttgtagtcttatgagaccacactaaccgtgtttgtattgtggccgccaccatatattgaaggaaacgaggcatttgatggtttggtcagaagttgaatagtgaagacggtggagagcggtttgggagaggccatctcatagacctacttgcgtgtattgaagtcctagaagctatccatagagttatctaatcgaaaactgagacattatatatgaggacatacttgcaaggggctccaataagtactaaggggaagcatgattttcttgatacctcgataaaaataccacattcattaacgggaatttgcatctctgtctcaattaaaatttcacactttgtttattgcatacttaggttctgtgcttactttcttagtttagcttgctagggttgggatagtattggaacctaggttgcataactcttttgtggtagagacaacaacacatttagaaaaccatagttgcacacttagatat

SEQ ID NO: 100786 - DNA, 272 bp, Zea Mays
gacttctcgacgacaagaagggtaaatgggctgaccaactacctgaagtagtctgggccctaaacatgaccgaatgtcgggcaaccggattcacaccttttcgtctattatatggatcggaggccatgataccacaggagataaagcatgggtcgccccgaacaagcacatcagcagtccccgacgtcgacgaaccaacgtctaaagacctcatcgatggagaccgcgtcttcgccctgcaggccctcaacaaataccaagctcaaaccaag

SEQ ID NO: 100787 - DNA, 800 bp, Zea Mays
gaatctctagaggagtagagggaatgccatacttttccacaaaactagtggctatgaaggagtgggatgctccagaatcgaaaagtacggtagcgggagtaaattcaacaaggagctcaccgagcactactcccggagcttgctgagcctcctggacatcgacgtgattcactcgtgcccttccttggtacggagccttgttctgctggctgacggaggagggcgccttgggggcggatgccgaggtattcttggggccattcactgagttggagtaggcgggtcctggtggcttcagctgcggacagttgttcttgaagcgactgggatcaccgcagtgctaacatgcattcgccgggggttggttgcttgccactgagggggaatggaaagagctctgactctgctggttgaaccgtgatggggcgggtccagctggtctactgaagtttggccccttgggtggaaacccaaatgatcgagtcttctggtgccggtcctgctgctgtgcccggagaacctggaactttcttttgagatgccctttttcttcctcctttgccctttaaacttgcatggccttgttggaaaggtgagagaaactgaggaagtcttggctagccagaattgtcttgagttctggcctgagtcccttcaggaaacgggccatcttcttgccctcggtgctgacatcatctggcgcgtagcgggctaactctgtgaacttgtgcacatattcgctgacagatcttccgtcttgggtcaattctcgaaactcgtcctccttaagctgtacaagt

SEQ ID NO: 100788 - DNA, 578 bp, Zea Mays
gcctaattaaaaaccttattaggtaaaacgcacacctcgttagatatcctagaaaggaaaaaagagtacaactagctcagtttataattcaaatgttcaaagttattacaagccaaagtgtcagattaaatcagaatttagaaacactttacacttcacagtctcagcttcacaagatcaatacaaactcaggcagcagcaccagcaccagcaccagcaccttcttcatctagctagagctccttgaaggactcgtccaactcattgtccaccacagcatgttgtgcccgttgttggtctagctcccaatctttgatgcacaccaacatctccactgtctctgcattcaagcgctgtcgccgatcctcaagaattctgccatacaaactaaaagtagactccgaagaagtagttgaggcaggaacagacataatgtctctagccataattgaaagaattggataggttagttttatgctcatgccaccaatttaagatatcaaaatcatcctcataggcagccacattgtcactgtcaaggtaaacagttagctcataaagacctacaccaggtccac

SEQ ID NO: 100789 - DNA, 707 bp, Zea Mays
gctaaaacaggatggcggttttagaaggaacaaacctggttagcaagtgagatggagtgatattgcatctatgggctttgcctgatgtcacccaattttgggtgctagaaatgaactttttggatgcaagcatcaacattttttgcattgcagccatcactcccatcaagcattctagctcagactaatgagattgttctatagaaacatcacctttattattaacaattacaaaaagaaggcagctatttaagagggttcattttatttgtgtaggctcttcttgttctagcagatcaacaagatgacatattagagaaattgttgtataactgcacgaagggaaaaataagtttgttgtggactcacacaatgcaaatgtggattgaatagagccacagctagcagggagtgatggaacaacacaacaacatcgttctagttcctaatctcttttttgctaggctaaattcggcaagaacctagaaccacctttcaatcctgcagaacaaacatgttatatgaagtgcgcaaaatcaacacagatctgaatattgatgattccacatagggcaaatgataacaaaggcagacactcctaccttagacctcctatcatgtagatcgaaaccctgtcttgctcggtgctggtgccctgtccctatcccttggtgaatcctaggtcaataggtgtgggggaggcacca

SEQ ID NO: 100790 - DNA, 397 bp, Zea Mays
caaaggctaaatgtgataagttgaaagatgaaaatgaatttttaaatgccaaatatgacatagttgtaaaagctagtgatgagatgaaagaagaaaacaaaactatgtcatccactgtaaatgagcttaaatcctccctaaaagatgctaaggataagtgttacaagttaaatgaagcaaatagggagttgaaagacagactaataaaaattaaggaaggctatacaaagattaaaattgatcatgataatcttcttgttgcaaatgagcttttatcttgcaatacacatgaggctattatccctgttgttaagattgatgtagcaacctcatgtgatgatttgagccaagatgatcaaactagtcttcatgatgaactgactgaaaaagttgaagc

SEQ ID NO: 100791 - DNA, 937 bp, Zea Mays
caccctgagttaagtaagcatgcaagttgacagtaaacaatttgagtgcctttgagaatgaagtctttttattgatgatatatttcccaatttatagaatacaaggtcgtctcaatagcctttgaaatatagctaggggtaaaatttcctgagatgttctatattccatgagttcccaatttctgtgccgtccatttgagtaagacgatatgagctaggccgagtgacttctgctactatgaatggtcattcccatagtggtgacaatttgtgtcgtccctcccccgttagaattcggcggaggacgagatctcccactgcgaaggattgatgtcgtatggccttatcatgatagcgcctcagggtttgctgataccgggctgactgaatcaccgtattcaatcgttcctcttctagtatatcaacatcctccaatctagtggcctcagcttctgctatgttttcaaagattaatctcggtgccccaaacttgagatcagcgggtagcactgcctccgaaccatagaccataaagaaaggagtgtttctatgcagagctcggctaggttgagtcctcaggctccagacaacatatggcaactctctgatccactttcctgcgaacttttcattcttgtcgaagactttctttctgagcgcctccaatatcatcccgttggctctttctacctgcccgttggctcttgggtgcgccaccgaggcatatttgatctgaatgcttttttgttcgcagaaatcgaagaactctgagcttgtgaaattggatcccaggtcggttatgatgctattcggtattccgaacctgaatattatgtcttatatgaattccactgccttagctgaagttagagaaacaatgggtttgaactctatctacttagtgaatttgtcgatagcaaccagtacatgagtgtat

SEQ ID NO: 100792 - DNA, 372 bp, Zea Mays
gtggtgttccttctccagctttgtctgctctcgttgatctgcaagaattgtctctagcaaattttgatcagactctcgaagatatggtccctgaagacctgttgtcggagccggcagatggtggaatgatggaaatttgtgctgatgtgcttgctgtcggggtagagttatcccgagcagcgtctcgtgcctcattgaccttggagcatggttttaagagtcaggaggctgatctggattgctctgttcccatggaggtggttgaaaatccttcagccttagaggtggctgctacagagaactcggtccccaaggatggcgcttgcgtttacccagcccccgagggtgttgccggtgatgatccggcttggg

SEQ ID NO: 100793 - DNA, 335 bp, Zea Mays
caaaggatggcgcctggagtggtttatcgtggagaatcacgggaattctctccccccacggtcagggagacaaccagatgttcgtactccgagctggatcgagtcccccacagacatggaggtggccgaggcaggggctctacttgctgaggttggattgttgaaagagaggggtctgaatgcagaagatgtggtcaccgattttatttttaagaacattcagcctttaaaggatagagcatacccggcttatttgtatcgaggcctcgctgattcgacccgggttaccaacagaagaattcctgctgtggacttggtcagccggctcgagatga

SEQ ID NO: 100794 - DNA, 335 bp, Zea Mays
tggttggtcccgagtcctcaacctcttgtccttccgtcaacatcgtggtggtcggaccacctccttctcctagggggacttttttgccccctggggatgttgttccatcctttcggcaaccagcaccttgctcatcgcttctgtagccgctgcaacgtataagtacaacggctccctggctccggagctactagtattggtagggacacaaggtgctgtttcaactcttgaaagactcgttctgcctcttcggtccaagagaatggaccgaacttccgcaatagcctaaagaagggtagcgccctctcagtcaaacttgagatgaagcagctaag

SEQ ID NO: 100795 - DNA, 600 bp, Zea Mays
ctgttcaacctcggtcgccgtgttcgcctgactcatggccggttcagataagatcaccggagttggccgcctatcgaccgcacgccacgtgccttggtaccttaccacgtcgcagtaactcgtattacgcatgtccgttgatcatcggtgagctcaccacagtgaaatccaccaatttcttgcgacagtgctccccctctctccggccgccatcgcgccatctcaaattcatgggccaccacccttgggccctataaattgagcgtgccattggctccgctaggtagtcacacacccaatacaacaactcgtgcctcgaatcatccaccagagctcaccaatttgggatttcccccaaatcggtcaagaacaccatgtgtgtgagctcgtcgcgatcagcgctccacaggtctaatcatgttctcctcgctcttgttctagcattcctgtgtgcccttgaagctcgtcggcccaaccaattgcactgaaccggagtagatcaacgggaacactttgaattgtccctggattgcgcagtcaccgtgagcagagaaattgggggctagaaccttgcaattgatcgaggggaaacgattgtta

SEQ ID NO: 100796 - DNA, 419 bp, Zea Mays
agctggtgcatgcatgttctcagtccacgttggctgttgcatggggtacacgttctggtggagtttggcctgccagctgttgaggaagaacattaggatgaagcacgtatgttggcagagactccaaggccaccgacccagcgggttctgcggttccggagacggattctgtttgaacaccgggtctcgacacgcttttcagagacgtgtcagccatattagtagaagaatcgccagaatgttcaggagagcctgtaaccaattgcgatagccttgggtatggttcctgtgcagaaggaaatattaccggatgttctgttaccggagggttagcaggtacagataacacatgatcatttccaataaaattaccaccattgcccaaatgcaacatacgtaaaacatgcgatggagaggat

SEQ ID NO: 100797 - DNA, 374 bp, Zea Mays
gtatttatgcaccggggcaaaggaaatctggcaaggtagagtccagctggtcggatcccaacggggtcgcgttctgttgcgagttagttacatgagtggaagagagagctgccaatgtgggtccacgggcagtgagagcaagcgagcgactacgggatctcgtcgtgtgtgtgcggctggctaagcgagtccataggtcaggcacgagcgtgtgaggctgcagggtgtggcccttgtgttggcgctggtggttaagtgtgggctggtgagagcgaggtattgggccgacatggggagggatgatgagccgcgattgtggttttgcctaaggtgttgaggcttccctcttttttccttttgttattttctttttc

SEQ ID NO: 100798 - DNA, 312 bp, Zea Mays
cagcggagtacatgagcttgccgaccacccaagacttggtgctggacgccgagcgtgtcaacgactccaccttccggtgttacgtgtattgcctccacttctttgcgcttgaggtctgccctgtcctactcattgacgaagaacccgacaaccgttgtattcgcctcctctcctgcaaggtatctttcgacatacaaaacttcatgcttcaacaatggcggcagttgtttatttctgcgagtagctattagtgtctcgttgatacaactatttagttttgcttgcagctagagggatcactgctcatggagg

SEQ ID NO: 100799 - DNA, 663 bp, Zea Mays
gcatcgtaacaaacgcgacgcctagaccaggttgttgagcctagccgtgaacctcaccgaccgtgcggactccaccccaggtgtataaagcccaaactcgtggtctgccatttacaaagccgtcgacccagatcacaaaggaagcatcgccgttgctgcgagaacagagagaggagtgatgggaaaagccgccacgatgattctcagatacacgccggcgatgagctctcggggatcgactcagaacttcaccagatcgctagggagacgctcggggccgtgccaaggcacgagggaggccgggtgaagcagaattcttcgtcggacttggggtgggtcgctgtaccgcaccgtgttgtgggtagggctccactcgttgccatacgcgataagaagacctccgttgtgttcgcttttgtctctactacgaatagcgctaaggaatcgaagtctgaacgtttgtgtgcgaggatgatgaactccgacgatgtctccaccgtggctagggtttgctccatcggctggttgggcaggtgaataggtgagaggggaaacgataagcatcgaccgttgatcctgatacgaacgggcgagattagaaggagggtaaagattcacctagttaattaccagtcgttcgatccggatcggtgggatcccggg

SEQ ID NO: 100800 - DNA, 937 bp, Zea Mays
cagggctaaaacgcagaaggcaactcttgagtttaaggtatgctcgtctggaggtcgtgtcaaagctaagttggttgatacttggattcagtttaatgggttgccggttgaattttgtacggtgcctcacatttggggtgttggctcgaccctgggggttgcatccgatgttgatatggcgttttacagacagcatggcatatgtaggatgtaggtcagtgtgatcgatccacaggaaattccctttgcggtggatgtcgaaatagccaaggtcatctatgaggtacacctatgggtggaaaatggcgcagggacagcggtcccaatggcggttgatgatgattctttctttgatgatgatgctgatagtaaaagtgaggataaaggttttgataggaacaacgaagatggtctcaacaggaaggaaaatgctagtgatcagccccttaacaagctggctggtggggataataccgggcacaaatcagttgctctcggggaagtcactaccattgcgggtcagccgatagatggggtgttagctgctggttctttgggggtcggtcaggagctacctgctgatccattggagtccagcatggacgggaatgttgttgatgatgagaagcttttgatgagtgatgctatcgggaaggctaagcaatctgaggtggttgctgctgtcaccgatcaggctggggctattattgctgatcatgtgccaatggatagtccagagttgatgcaatcgcctgatgatagctgtgacaaattgaagcagctggctgctattccagaagcttcacaatctgtcgcagctggtcgcaagaggaggacgagcatcacggatgaaaactccttggcccgtgctgaaacgctgaaggctgaatgtaatggaggtaacaacccatctccctcctctatttcatgtaataaa

SEQ ID NO: 100801 - DNA, 473 bp, Zea Mays
cccccgaaggctgaggacaaggcatcatcttcggccctggtatatgtcccaagcaactcgtcgctagtagcctcaatgcatttcaaccagtcatcatttggttcatcgaacttctctctgtatctgaaggtgtatttcaatcgaactaatccaccttcgctggatttagcagtagtctccttcaacatctcccagctatccacaagtggtcacactctgtaggctatgtgctcttgaattatatcccttgtgccaatgaaagcacagacattgctaaaagtcttctgacacgctttggcatcactttcaatagccaccttcggccttcagaggccgaatcgagaccagatggggcgctggataatttccttaatattctccctttcaatcagattatttttaacataaaaccattcctccatcctggccctgggccatcttttctggtatgtcggaaccggatagcttgcatt

SEQ ID NO: 100802 - DNA, 369 bp, Zea Mays
accttgagagctcctcctgctctgaggacagggaacatcttaaccgacaatactcagttgaccaacttcatcgcggcaataacaacgccaccagaaccaccactgatcccatctctgccgaaaagtaacacgaccaattcatcacatacattaaaatttcagaagcaacccatcactagaagatcaagtgttaggttggctgcgaagaaaaactttaatactggtactaaccgagatgcaatatccaaagctcaggaaatcattcgcgccaaacttaacaattctgcagttaaaattccagactgctctagttcttcagactttaatgattttgatgattcatttgagcagatcgcaagtctattcaca

SEQ ID NO: 100803 - DNA, 499 bp, Zea Mays
agtggagcccaatttgcatgagcaaatagtcatggcatagatcggtgacaagggtgttcaagtcattaaggaaatgatcgaacagaaggtggataagtacaaatgcttccatcaggacagcaagggagttctatggtttgaatatcgtttggtggttcctaaaaatccagaactcaggaagaaaatattggatgaagctcatctttccagattttccatgcaccccggcagtaacaaaatgtatcatgatctcagatccttgtactagtggaccagaatgaagagggaaattgctaagtatgtatctgaatgcgacacttgccagagagtcaaagctagtcatttgaaggtagccggtaccttacagcctcttcccttaccagcttggaaatgggaggatatttgcatggattttattgtgggtttacccaacacatcccgacaccacgattctatttgggtcattgtggataggttgaccaagacagctcatttcttg

SEQ ID NO: 100804 - DNA, 326 bp, Zea Mays
gaaaagcataatatatcaaactatcctttaaggaggaaactattaattagatcatcgggaggtgaacttagagccactcactcatgccgtcagactaagcttgagattagaggaataagctttctagtagagctgataatcttggaatcgagtggaatcgatgtgatacttggaatagactacttaaccaagtatgatggagtaatatcttgtgctaagatgatggttacattaaccagtccgcaaggagaaagaattgaagtcaatgttagtatgccagcaacaacaaaagccatggtaaatcaattggaggagaaatctttgga

SEQ ID NO: 100805 - DNA, 399 bp, Zea Mays
cttgtacgagcacttgcatctttcttagactccaacagcttttgtccaactgaggcccatctggaggacttcgggtagcccatcaagggccattcggatggcccatgaagcgtcttcgggccatggtgacctgggggatatcaatcccccacatgggcctacaaacaagggcaacataggaacacagaggagatggcaagaatggcaagggcaagaccttcagagcaacctacaggcagtggcactagaggcaaccatttataggcgcacaagtacgcttagtgtcacacgttgtctccaagggccaaccactacctagttaccagcaccccttcgcttgccaagcattaatagcacattggctcatttcgtgaaggatcgaacgacacatggatcgac

SEQ ID NO: 100806 - DNA, 439 bp, Zea Mays
aaaaaaaatattaaggttagtgtggttttcaagagtgttttggtacaacctcttaagaaagtttgggctgcacagcttatcccctcagcaagcggagacttccttttttggctggtgggagagatcttcggctcaggtcctcagtctggaaaagaaaggattggattctcttattgccttaggggcctggatgatctagaatcataggaacaacgtggtgtttgatggcaggaccccttgtatctccttcctccttcaggctgctggtgaggaaagggagaaatggcagatggctggtgccaaaggtctttccttcttggccggccaagcttcctagctcctagggctgtggttttttagttttgatctttatggatagttttgtgaatgcctgcttctggcctccataaggagtgtgttgtatctgggtcctttctgc

SEQ ID NO: 100807 - DNA, 925 bp, Zea Mays
ccacaatccaatggtgtcgtcgaatgcgccaatggcaagatcttcagtgccatcaagaaaaggctcctcgacgacaaaaagggcaaatgggcagaccaattacctgaagtcatatgggcgctgaacacgacagtatgccgagcaaccggtttcacacctttcctcctgatgtacggattcgaggcaatgacaccgcaagagttaaagcacggatccccccgaacaaaccaattagctgtccccgacgtcgacgaatcaacctccaaagatctcattgacggagactgtgtccttgccttgcaagccctaaacaagtatcaagcctagactaaggcatggcgtgacaacaatgttgtcccaagagaattcagcgaaggggacttagtaaacataaggaccaccataatagagtctcggggcaagctcgagccgaagtgggaagggccatacatagtcaagacaaaggcatccccaagcgcttacaagctaacaacatcatctagcgaagacttagagcattcatggaacatagataacctccgtaaattctttatttaagacccagggcctaagcgcctttgtaattcttcaaacaatgttactcaggcccgcactcttttcctcctggggggtgaggtttttaatgaggtggagccatgtaatatactgccaaaaagcccctgcaaaaaatccagccagcatcatgagtgtcgaaaaagaccgcatcgacggccttcgacattcgacgtacaaaacagtcaccgcaagaggcagcctagactaccctcgtgtgcgacacgttcaagcaaaagcctcctaagggtgcagccggacatgcacaaataagtgcgcaacatcaccctaagggtgcgaagtctttactataagacatgtccgagcaaaagccaccaaagggtgcagccgg

SEQ ID NO: 100808 - DNA, 844 bp, Zea Mays
attgcctttaactgttatgtcgtattctctagttttggatcttcagtcagatttgtcctagcttcgactggcatagagcgaactagttctgtgacaggagcaaccccttcatttagcttcggcacgtcggctgtttcaatgcgcctgggtcggcgcgtcaaaactttaacctttttcgacctcgtcacactagaagttgctgaggtagcagctttcctcttcttcccttgcttttgcgtggggtagtagtagtctgggtacacaaactcgataacatcaaacaccctattcaatctcgttttgccccaagcactgaaggcagttgtcatagcttcatcttcggccttcaaatatgccacaagcagctcatcgctagttgcctctatagcatctagccaatcatcattcggttcatcaaactggctcctgtatcgaaaggtatacttcagatagaccaaaccattttggctggagccaacggcagcctccttcgacatttcccatccgtttgcaagtggccacactctgtaagaaatatgctcttggaccaagtctcttgtgccgatgtaagtgtacaatgtattgaaagctgcctgacacgcttgcatgtcgttcccaagtgcaatgaccggcctcctaatgccgaagcgagaccatatagggcgctgaataacccctgttatatcttccctctgactcagatcaaccttcacataaaaccattcttgcatcaaagaacctggccaatttttccgaaatgttggcacaggataactggcctcagtgcggggtacgaagctgtagcagccaaaattgttgtggtattgctcttttctagtcgcct

SEQ ID NO: 100809 - DNA, 515 bp, Zea Mays
aagaaaatggactaatttccctatagaaaatggaaatccattgaaaatggggtttccaaactagcacttggaaataagctacatgatgatgtgttagtagagagcctttaaactgatcttgaataacgaggcacattccaacgaactatatatgaatgatagggatcctagtaatgattaagatcttcaaaattgatcaggatcttcaaattaaacctgcatcatctatgtcaaccatgtcgcatcaacaagatcaccacacatagatggcatctacaacaaccgctagtcagtcattctatcaagttttctgctttttattatttgcaaataagctacatgatgatgtcaaggttgtttattaatttttgaattaatcactatttgtttctcaactgcaaaggtaacggtccgaagcatctgtctcgggctaatttatagggacgggcgatgtcaccaagatgcgaatcgtcgtagccggatggcagtcgtttcgaatcccgcgcgcacgcgcg

SEQ ID NO: 100810 - DNA, 486 bp, Zea Mays
cccttctaaccgttgggtatactgtaggtctgatggcacactagactggtaaggtgcaccccttctgctgaattccatttacaccttctctgtgtgtagagtatggtgagtggtccagtggcacaccagactgatccggtgcaccaatctgccaaagccccaaaaattacatctatgtgtgcccgatccggtgcacatcagacctgttacgagaggtccggtgcactctcaagtacctagatttaatccattttggacacaactttctaggcttcaatattgtcttggacactttgatgacttagacaaacatatcttgagcccatttaaacactcttaagtcatagatcttgatcttttaattccttccttatactttctcatacttaactctatttgacccctggaatactaaattctacatctgatctttgaaatgttccaatatgttactatgactttttaggacttatctaaacactaaat

SEQ ID NO: 100811 - DNA, 743 bp, Zea Mays
gcaattattcttgtagtgactagggtctccgcagtgccaataggcatttgctgggggttggttgcttgcaacggagggagcctggagggaactttgcccctactgactgaaatgtgacgaagtgggtccagctggcttgttgaagcttggtcccttgggtggaaacccaaaggatcgaattctttggtgcctgtcctgctgctgagctcggaggacttggaatttcctcttgaggtgacccttttcttcttcccttgccctttatacttgtatggccttgtttgagaggtgtgagaagctaaggaaatcttggttggcaaggatagtcttgagttctggtcttagccccttcaagaaacgggccatcttcttggcttctgtgctgacatcgtcaggtgcataacgagccaattctgtgaatttgtgcacgtactcacggatagatcttcctccttgagttaattcccaaaattcatcttccttgagctgaacgatcccttggggcacatgatgttctcggaaggcggcttcaaattctgcccaggtagcatctctgacggcaacgctgaaggtatcccaccaggatagggccatcccagaaagttgatgagcagccagatgaatacgctggttctcagggcatccgatggcttctaacttcctttttattgtgcgcagccagtcatcagcgtcgagcggattgctggatccagcgaatgtgggaggcttgagccttagaaaat

SEQ ID NO: 100812 - DNA, 619 bp, Zea Mays
ttgcttagtttcagttttggcttgcgctttggcagcttcagcaactttctttgtaggagcagggctcaaggccttcgtagtctccagcacagcaccaagcacgttggccatcctcctcctcttgggagtcgcgacagaagccttttgaaccttaggcagttttgcctctgttggagggctcaaaatttctggcattttcatcattttttcaatctttggttctttagccctatcaaccttagtctcgactggctcaattgtaggcaccttcagcactacaatcggctctacagtattctgcacaagcggagtagctttcttggcctcgccaactgaagaggtccccgcaccaaatttaggcaccacagccggttcaatgtaacgcggtcgatgggttaggaccttcatctttttgcccttcggctcagctgcagtggccgaagcaacaatcttcctcttttttcgttgcccttgcagcggaaatcaataatcggggtatatgaagccgatcgcatcaaaaaccctattcagtcttttcttcccccgacctccgaaggctgcggacagagcattatcttcggccttggagtaagctccaagcagctcattgctggtagct

SEQ ID NO: 100813 - DNA, 344 bp, Zea Mays
aactacaaaccatacctgtaacttggccatttgcatgctggggattggatatgattggacctttcaaaaaagctcaaggaggatacactcatgtactggttgctatcgacaagttcactaagtggatagaattcaaacccattgcttccttaacttcagctaaggcagtggaattcatacaagatataatattcaggtttggaataccaaataacatcataaccgacctaggatccaacttcacaagctcagagttctttgacttctgcgagcaaaagggcgttcagatcaaatatgcctcgctggcacacccaagagccaacgggtaggtagaaagagccaac

SEQ ID NO: 100814 - DNA, 310 bp, Zea Mays
tatgccttgaatagaggggattataggaaacctggtatcacaaaaggtcattagctagcccaataacgtcttcatccactagtggtactctattaccgtcttgtgcgaatacaatgcccttgacatcaaggaaacatcatttttacttgacatcacggtgatctattgttttgaattctttatattcctacttattagcaactgtttggtggaaaaaaggtgccttacaaccttaacctatgtttggacagttctctcatgcactttggctaaattttccatggtctttattttattttgagaaacaatg

SEQ ID NO: 100815 - DNA, 1487 bp, Zea Mays
atacatcatgagtgggaagtggatcggtgccacgctgtggctcggtgcctggcgtgcttaatacggttagtcatttatggtgggtcagtccaaggccaggcgtaggatccactctagtggttctcttctaacacgcctgtcctccctcgttaggctccaccatgctaggccctaggctcgatgccgcggggttccatggtggggcagatccttctagggttggagcacctgcctcttccgacttactaacagaccctagcatttatgggctcttcccatagcgcgctcaatgaccgacggtcctagggactgggatcatttccccgacagtagccactgagggggagtgtctcctttcgggggctggtaccgagtcgagcatttgttgggtcgaacattgttttctccctttctgtcgcttgtcgctgtcgaatggaaccaacaaagtccattgttggcttcagtgggacgctataagtagaggtccgctctatgcttacccccaacagactttagtcgttgctttgtgttttctagaaccaatatttagtcaagagggtttcaatgcctccaacctctcagggtcccatcagctggtcaaggatcacaataaatgcccagctccggagtggtctcactagggtcagtccaggcgccacctatcacaggaaaggtgggtagtgatcacgagattactcgacccacatccctccaaagtatggtgactaaccttcctcacagggtggtggggctcaagaatcggaggtgaggtcatatcgcttttgtcttccagctcatcagacggggagttgaaggtcggccgttgtggcggcaaacctgcgtcgctagttccacccgctagcactgttggcaccccggtcattgtcgatcgtcccatgacggtagtgaggttggttagggctagcccccaacctggtcatattatcttatgttggagggtcatcgcttcctcctcccccgcccctcatgtgttgtcttgtgaggttgggcccttggcccttccgctgttggcgatggccaagttgtggggtcggctggaatagagatggcaatgggcccctgatccctaatccctggtggggatttcatctattaggggatggggatggaatgacatagctccccacggggatcctcgtgtactaaaaatcatccccaataggtgaactgaggatggaacgttccacttgtccctgtccttgctccccaccgaggattcaccagtctaccacagtatgtgtataatgtatgaagaataatggctgcagcccaacctaatcaattcctcgtcacaacttgcaagtagcctagagtaaaaatgcaaaaggcccaaagtaggcaagcacacatagtcacattagcagcccaaaaggcacacaccacacacgtatgagaatgtgccatataaaataaacaatataaccctagtttttgtttgctgctgtcgagtgaggccaggctcctgg

SEQ ID NO: 100816 - DNA, 1281 bp, Zea Mays
gtccactttgaatcttggcgggctagtttatgccactattaaattggtcgtgcctcggaccggcccgccagacacgactcgtttcgtcatctatagtccagtacatccatcctcatagtttctgatctcgtgagcctggaaaaaaagcaagagaaaaaactttatcacgtctcacccccacaccatatacctcgccacacgtctctgcctctctcctcaccatatcgtcgtccgtcgtctcaagggcaaaatcgtaggtgtaccatgaggtgtagcccactccgtgtgatccaaaccgtggagcacgcatttagatccgcgtgaggcgaactactgcatcctgccgcacgcgatagggatcaagacaataattcagaaaatccttgtcggctaggtaccgaagggaataagtatgtcaccgaagggaattaataattctcgtcagtattaggctaattctttccgatacatggctaatgaggagtggtattagtgattaattaattcccgtcaaccaccaaagagaattaattaatactcgtcggtcatgtgtagtcgacatttaacactagactgcgcaaactcctgtcggtcccgcccttggatgacctggattataagtacgtagatattgcttgtggccaacggcaattaagacattatccccgtcggcttagatagctgacgggaattaccccacgatcaataactctcgttggctatggtcaagccgacgggagttatcctatgttgttgcaaaccagtagcctattttactaatttctcatctaaccacacaaacaacaagcttatattgtatatcaattcccatacatcacaaacaccattcacaattcacatacatcacatcatcaaatacttcacattacaaattcttcaaacaaacacatagaagcacatattcatttcaaatcacaacaacgagacaagttaaatattttgttcaccaaagcacataaaatttagtttaacacacaccattcatcatccataaccaaagacaaaccacaagtccaaatataaaaaaatagcatacaatggtttagggacaaccacttggatggttcgagctttggtcactgccaccaccaggaggagggtacacaaagagggactcaacaaaagtcgatccagctggttcagttacactcccacccattcctagtgtagcctatgtaagaatgcaaatatcaacaagttaagtatacaaatgtatcaaatcataagaatatttcgagagttacaaaacgtatctggtct

SEQ ID NO: 100817 - DNA, 557 bp, Zea Mays
ggttgagatgagtgctcggttgtgagtggataacaaggaagcggcgaaaagatcataagggaggtgaatttggtctctagcgagctcatccaccgtggtcgtgtggcccgcgccgtgttcttgcaatcactgccggaggtcaccgtttctcgcgatcgtgacacgcagctacccgactcatcgtgccgtcgagattgtggcaagcattgaagcatgtccctcagccgatgagctgctagcgcgccatggtgaaaaattccaatgccatctaccgtcgcaccggcgacctcgtttctgctcaaattcacgttggtcgtggtcggcttctataaattggatgctctgtaagctccggctcctctttacgaacacaggtcaccgccaatcgctcctcttcgtccaccataggtcgagacctccgtgttgccctgaaaccagccatggacgccgctagatagtgacccgccgtggccacgcctcttccggtaggctctgtcagttctttgttttctttcttccttgttcctcggtgatgctttctgacttgaggaggacat

SEQ ID NO: 100818 - DNA, 325 bp, Zea Mays
gtgacaggccgtacaagccgacaaggctgcctcgcgtgtttccaaggcgcacaacggcatgcctacgctgcacgcatttaatgtccgttcaagataacgcgagttaccgatgcatttatctcgggcatatgagcaatgtcatcatgaggtgccgctcggccacatgatacgcccgctgttgcgcaggccggatgtgacaacacgaagatatcacattaattcatacatacatcaacacaccctatccttgcaacatcaacatgctggatggtttccaaagcagacataggacgatagacagggagaacatacctgatcgtggagt

SEQ ID NO: 100819 - DNA, 855 bp, Zea Mays
gtggtgaactggtgttcaattgaaaccctaacttattctgaatgtttggatctagtctgttttgctcataatctgcttattcccttcatccttttcctttgcaagtcttccccgtgagtttttcttgaccgtgaggaaccagtgcttttggaaccggtgcttcgaacctactactaacggaggcgagttcttcgtgtccggcacataggtaatcagatctgcttggtgtgtgatctgtgtaatagtggtgcttgactgatttgtaacatgtctataattttggtaactgatgctttactgaagtaacttgtgttaactgaatacccataatagagtgttaccttgcttgcctggtgtgtgttgtcactacttagttcacttgatacagcacacttgtgtcactgtccaagtaacttgtgttaccttgcttgactgatgcttttatttaaaatgtgttatctgatgcttaacttttgtaacttgtgttaactgatacccctgtgttaacttgtgtaacttgtgttagctgatacccatgtgttaactgaagcaacttgtgtaacttgtgttaactgatacccctgtgttaactaaagtaacttgtgttaactgatacccctgtgttaactgaagtaatttgtgcaacttgtgttgactaatgcttttctggaacatatgttaactgataccttaccttgcttgttgttgtctcaccttaccttacctttgattgttgttgtattaccttaccttaccttaccttaccttgcttgttgttgtattaccttaccttaccttgcttgttgttgtcttaacttaccttaccttgcttgttgttgtcttaccataccttac

SEQ ID NO: 100820 - DNA, 298 bp, Zea Mays
gcaactttggattgtaattttttggctctgtattcccttaggaactatttttgagcagaaaacttacattgcgctctcttaagaacggcttttgaagcttcagatcataatttttggccctgcattcccctaggaacgacttttgagcttcaaaatttacttcattcccttagagacgtctttagagcttcgtaaatccatgaggaagatatatttcactctggtgtaggcacaattattacaagaaattgaaattacgttcttcattacttatttttcacacagaaaataaaatggc

SEQ ID NO: 100821 - DNA, 430 bp, Zea Mays
gttgtaacaaccgaaattctcgtgtagcccatcttctctagccttcgtctgataatgaagctcgtgcacccggcagaaagtttcggctagcgggtccactccttggctttgaagagcccagataaagacactgggcctaacgatggcgttaggagtcagctaatgaagataaattttgaaatcttccaaaacatccccaatcatttcatgtagaggaaaccttaatcctgctttgaagaaacttctgaaaactaccacctcatcattttttggcttcggtgtggtttcttcctcgccaaaacgaatcagcttcttctcggcttccccgaagtagcctagctttatcatcatgggcatatcagcctcagagacagtagactttccaaaatccaagtggctgggcttggatggcatgacaatgttataatct

SEQ ID NO: 100822 - DNA, 327 bp, Zea Mays
tgaaacaagctcttcagacggctccagtcctccgccttccggacttcgctgttccttttgtggtggaatgtgatgcttctggcacagggattggtgtcgtgctccaacaggaaggacatccagtggcttattatagtcggaaactggcagatcgtcatgtgaaactcgcagcttatgaaagggaattaattgggttatccaaggccattcgacattggagaccgtatttatgggggcacccattagtggtccgcacagatcatgccagtctgaaattcctgctggatcaagctctagtaactccaccgcaacagcactggcttagca

SEQ ID NO: 100823 - DNA, 955 bp, Zea Mays
cctttgcaccgcctgttcttgcagtcgccgcctcttctgtgacttggcatcgtcgtctcggtcaccccggtcgtgatgtgatgtccaagctctctagcagcacctccgtttccggttgtaggggatcttttgagcacctctgtcatgcttgtcagttaggtcgccatgttaggctcccattccccatctcctcttctagagcagcaggcatttttgatctgatacactgtgatgtatggacatcccctgtaatcagcatttctggctataagtattatttacttattcttgatgaattctcgcattatctgtggacttttcctcttcgtcagaagtccgacacttttcccaccctgtctcacttcttcgcttgggtctccactcagtttagtcgcaccatccggagcatccagtgtgacaatgggcgtgagttctataacaatgtgtcctgtgacttcttcctctctcgtggcgtccacctctgcatgtcctgcccctacacgtctcctcagaacggccgagctgagcggatgattcgcacgacaaacgatgtagtgcgctctctccttttccaggcttcccttcccgcttcttactgggctgaggcccttggcactgccacctatctcctcaaccgtctccccaccaaggaggttgcccaccccaccccttactttgctctcttcggcgtccatccctcctacgaccatcttcgtgtcttcgggtgcgcttgctatcccaatctcgcttctactgctcctcataagctcgcccctcgctccactcgttgtgtcttcctcggctactctcccaatcataaggggtatggtgtcttgacctcgcctcccacagagtcctcatctcttgtcacgttgttttcgacgagtcggacttccctttttcctccacccccactgcctctctcaccgacctcgacgtgctcctcgacctcgac

SEQ ID NO: 100824 - DNA, 437 bp, Zea Mays
gccgggtcatcgctagggcctcggtaagctttgttcttcctctctttggtattactgaagctagcaagttgccattaccagtcagtagaggcagggtagggcgtgagcgtgagatcttgacaccacgggtgggttccttgcggtggtctgcgccgctgtagatgcatctggcgaggaagataggggttgaagaaggcgccgtagtcggtgcgtgtggccgggggaagaagaaataaaggaaaccgttaattggtagatgaacgacccagatcagtagacgtattctctctgctagaaatgatcctggccgctaagtattgatcgggcggatgcgtgtggggcgctggtgtttaaaagatggaccgttgagattagatctaagggtagatggtggaatcggacttcataaaatataggctgtagatccttggtccgat

SEQ ID NO: 100825 - DNA, 344 bp, Zea Mays
taatggtaactacattgatttttgacatcaacctatagtaaaaaagatggcagaacttatcttaattatgtgaaattgtccgaggacaaaaacaagaagaggggaaaaatcatgtggacaccctaattattttagcactataaataatggagagtttgaaatagacagataaacgtctagctcaatcttaggttgtcttgattagagagtgtatatgaccatggaaaataacgttttgcaatgcagactacactattcatagagtagactttgatatagaaggtgaaacaggaggtaagatagagagtatgttggagatggccttacttaggctgcctccagta

SEQ ID NO: 100826 - DNA, 1569 bp, Zea Mays
gtcacacaccacccggatgtcctgcacccgcaaggcagcctcacccgccaccaccatcgagaaaaagattctcgacttccttgactgacgatctggaagcaattgcaacaacaaggataacgtgaactttggagaacttaccaagaataccacctctctacccgacggcgcctgcaataacattgtcttccaaaaatatgatatcactacgcgatactgagatagccaatccatacccaagataacatcaaatgcccccaaagaaataacaacaaggttagctgaaaagacctcatcagcaagaatgacggaacaaccctgacaaactgaacagctactaatggagccattagcagaactaaccataattgggtgacccaacctttgcattgaaagaccagcctgcgacacaaaattctccgaaacaaacgaatagctagtgccagagtcaaaaacagcatgggccataaacgaataaactgagatcgtacctatcaccatgtctccctgctccctgccatcagcagagggtagcacataagctccagaaatacccgcagaagaggaagctcctgaagtgaagttaacagaggaaccccacttagtcgagggtgaggcagacgcggagctccaaactaagacagaatagaagtagtcggggcaggagtaggtgcggccaaaaactaaggaaaaccctgcatcggcacgaactaagaagtcctgggcacatagaactgctgcggagggagtggcactgaaaattgctgctcagcgcttgacatcatgttgacagtgccctgagaagaggaggaagtcactggctcccatatgagcttcccattgggattccttctacacaccacatccttgtgatcttggctgcagatagagcacctgccactccactgacactcagcacggcgatgcgcatcaccacaacaaaaacacaccagccccagcccgggcttaggaacagcccgatacctctgattatttcctccagaagtacccgattcagaggatttgccacggtaggggtggtggctctggtgctgagacttgcccctcttgtgggctagacccccagtgttgcccctcctcgcgtcctggccacgaggctgatccacacccgaagacttctgtgactccatggtgtattggtgttgcatctccacacccaatgcctgctccactgtagtacgaaaatccaccaacggaaaggcgcctagagcatgcctgattgaaggtttcaggccctgagagaactggctcgccttctccatctcattgtaagccacatgaggaacaaagaggaccatcttgttgaagcccacttcatactcggtgacggacttcttctcttgcttgtaggactacaaatcaatcttcattttctccaggaaggtgacctggtagaacctcctctcaaactgcctgatgaaaacatcctaggacaggattcctggtgaagaggagtgagctgcctgcacgcttctctaccaaatttgagcctctcccttcagcagctgtgtgccaaagcgaacacgatcaccatacacaatctcaacg

SEQ ID NO: 100827 - DNA, 630 bp, Zea Mays
cttgggcacttctatgacttagccaaatgtgtattgagttcatccaaacattcttagtgacctctttttgttgtaacccaaccttcacattagattgcacttttcatcaagccttcgctacaactaactcctataactctaaactctgattcttagcaaatctgctattccaatgagtcagcatgaacctatctaaatgctggaatgacccaaagtctatttctttttccatttctcaatttttgctatctttatcaaagtctacacatttagtgaacccttctatgttcttttctttgctaccttattccttagacttgtgaccatgcttcttctcttctctttgagatgtcataccttgagcattatgatttgaaccatctcatcacatatgagttaattccatggcttcaaatcacttcttctatctatttgattctcagcacaacatgactcttcatagattgattagttcctcgactctatgcaagtactctcttcttcaccttagcatggtccttcggtccccaagcctctgcctgaccttcaccatcgcttagtcccttgaagccctttccttctagtctccactctatcaagccattgacccctagggcacctcgagcatca

SEQ ID NO: 100828 - DNA, 1171 bp, Zea Mays
gcaaccacttcgaggagttgatgttctcatcgtgccagaaccacggctttcccgtctgccataagctctaggagcgtgagcttctaagaacttcatcttcaagcccctgccaagaaagcaaagtaggaggaaccggccaagccaatggagcaagagcctcccgccgaggatttccctaaaacaatggggtgccttatgatcttcggttggaccaaagcatatggctaaaagctccacctcaaggcggcccaccgcaaggtgcttgcggcagagcctaccatcccgcagtatctacgatggtcagagttccccatcgtcttcgaccgccgcgaccactcggataggatcccacacccagggacctacctcctcattatcgacctagttatgggcttgaagcgcctctccaaggtacccatggacaagggaagcagcctcaatatcatgtatattgagaacttcgactgtttagggatcgcacgctccacgctacgacctagctcggcgttgttccacggcgtcatcccttgccaccaggcctaaccattgggtagattgctctgcctgtcacatttgacgaccccttcaacttttgcactgagcggctgcagtttgaggtggtggacttctcgggggtcctataacgccatcctcgaaagatcgtgctacgccaagttcatggtcatgtcgaactacacatatctgaagttgaagatggctcgaccacacaaaatcatcatgacttccgcttcgttcaaagccttgtacacctgcaagtaggccaatagcgagctcgcctcaacgcttcctaaggacgccgcctgcgcacccagaagcggatcttggaccctcgatcctgcagaagacaacgagggcttcccgaccagcaccatcgaccaccctaagtgtgcgcgaattagtgcaacactcctcgacaattagggaggggcactcgccacatcaacaaagaaaggcacaagggctgcgatgaggaggctgtgcaagatctagataggaagggtttgtaagaaaactattccctagtaccagacccaaaatctgtaccagctaggacagatgaatgaaactcggggggatgtatgttaaacaattcaagtccatgaataagagcgggctccattccttctgactaggcctgcaagcggggtgg

SEQ ID NO: 100829 - DNA, 279 bp, Zea Mays
tgacaatcctatgccaccttccgttcataccgaggatccagcgtctatacatgaccgaggaatccgcgaaacagataacatggcacaaaaatggaaaacgatacaatcctgacaagatggtgcacgcatccgatggtgaaacatggaaacactttgatgccattcaccgtgagaaagccgaagaggctcgtaatgtacgtgttgcgctggccacagatgggttcaatccctatggaatgagtgctgccccgtacacatgttggcacatgtttgttatcc

SEQ ID NO: 100830 - DNA, 610 bp, Zea Mays
agtacctgtgaccggaggtggagtcagggtagtgaccaccccgaaaccatcactctggtgtgaagtagcatgatccagatttaccaaaggatcttgtgctgacgcttgaactaatagcggcaaatgatcgaacgccttcagtttaggctgtggagtgcctcgcccagccagtaattcatccaccttgtcagagagatgacccaaatcctcccatagattgctcatgtcagtttcaatccgaggtttccaagcagagagatcacctaccactgcggtattcttctccagagccactttgatggactcattttgcgctagcaaggattgaaggagttgggataaatctgctagattcttctccatggcttccgtctgcttctgactccttgtcttgtactgaggccgcaataagtacacctacggtttcgccaggattgacacaagaatctgataccaatttgtgagagcacttatgtggatttaggtagagcgccactctcggcactcgatttcctctcacgaagcactagattcaacaatggtgagtttacatggcaaggatcgccgccacccggacacagctggttctaccttcttcaccaagtccctc

SEQ ID NO: 100831 - DNA, 435 bp, Zea Mays
ctgaatcgcaatgaacagtaaaaacagattttgaacagaaacaagatagaaaccaaaggagaaaccaatgggtaaactcgcaacttttcaataacaaggattttgagcttttagtgcaagtaccaatactcacttgtggatccctcttaatagtacaatggttcctaaactcaagaactcaaataaaaatcaaacttattctccaaagacacaattaataggatcagaagcaacaacatcaagtttgttctctagttgtggcattgaaataatagtagtatcatcacataactcttctttatcacaagggacaacaagacaatcttcttgtaacaaaggcaactcagatttatctgacaacatgatatcagtagaattactcaaattatttttagtatcatccatagaagagaaagatggatatatggaacccga

SEQ ID NO: 100832 - DNA, 505 bp, Zea Mays
gttgaaccgatgtaaggtgtgatgccctcactgtaagtgtgttactatagtttgtatgatgaggctgtgtgccttcacgtatccggctatgtctataggggcgttgcgcgcttggtctggcgcattcattatgttggtctggctgcgcctgtggttggtctgtgcgcggatagttttttggtgtagacttgtgcatggatgtaatgcgcttgcgttttggcgcgcttgttgatttagtccggctgcaccctaaggcgacttttgcacggatagtcttttgagaaggacttcgattttgcgcacttgttgtgctagtccggctgcacccttaggcggcttttgcacggatagtcttttgaagaagacttcgattttgcgcacttgttgtgctagtccggctgcacccttaggcgacttttgcacggatagtcttttgaagaagacttcgattttgcgcacttattgtgctagtccggctgcacccttaggcgacttttgcacggat

SEQ ID NO: 100833 - DNA, 283 bp, Zea Mays
gattatctttcctttcctggtattgacaattaaaagcatatgggaatatagttttgcaaggaaacgtatttggtaagaagaatacataggccagtaactggttatgatctgaagattctttgacatagcttaatctgttgttttatatcaagctttgggtaactatatggtgtaggtagatcaaaatctctgatgagttaaatggaggggttatgcaaccatcgaatggttaaggtggttgcataaggtcaggttgttgtatgtggtctagtcttaattggaa

SEQ ID NO: 100834 - DNA, 1085 bp, Zea Mays
ccaagcactagttgacttcgtatccgagtggactgagcaacaagtccctgaccatccgaaggctactgaagtatggcgaatgtattttgatggctcactaaagctgcagggagtaggcgcagggatcctcttcattgccccaggaggtgaacaactcaagtacgctcttcagctattattcccagcatcaaataatgcagcagaatatgaggcactgatccatgggttgaacatcgccatatcactgggcgttaagaggttgatggtatacggagattcactagtggtcataagccagataaataaagattaggattgctcgactgattctatgggcaagtactgtacagccgtccgaaaattagaagacaagtttgaagggttggaattccatcacgtggaaagagaccgcaacacagcagcagacgcgttgttgaagctaggatccagtcgggcccatgtcccatccggagtttttgtccaggaagtatcacatccaagtattccctcagatcaggcggaagaatgcaacaccataagccaaccaggatcggaccctgatgactgaagacagcctattatcaggtacataaagaatgaagaagaaccggacgataaagctgcagcagaacgcatcgcgaggcaatcggcccactacaccctcatagggggcacactgtatagaaggggtgcgacaggagtcctcatgaagtgcatttcctcgactactgggaagtagctattagatgagatccacgtcagacagtgtggaatacacgtagcatccagaactctggttgggaaagtttttaggtctggattttattggccaacaacaaagagtgatgcagccgagttagtccagagatgtgaagcttgccaattcttgtcaaaacaacaacatttaccggcacaacagctgcagaccatacatgtaacatggccatttgcatgctagggactggacatgattggacccttcaagaaagctcagggaggctatactcatgtgctggtcgccattgacaagttcaccaaatggatagagtacaagcccattgtttctttaacctcatctaaggcag

SEQ ID NO: 100835 - DNA, 411 bp, Zea Mays
cttcaccaagtaccctgtagacgatattgttgaggacaagccttgctttcttcatattccaatcaatcgatctgggacaaaaacaaaacaagctgctactagtttggtaaaaccaggacttgttaactacaaggataatcctgtcccgccacactatgttgtggtccaagttctagaaatcacagacagtggttgtgaagattgggagatagactttccagttgaggggatcataactttgcaggatgcaatgaacgagttggtcctttggcatcgacgcgacatcaagttgggtgatgagccgatcttaagccgtgtatcgcgtcataagtcaccaacgccgaattcaacaccaatgcaacaaaaagatagttcgatcattccacaccccatggtgcaggaaaatatgac

SEQ ID NO: 100836 - DNA, 606 bp, Zea Mays
cgagaggtgattcattatcaactgttgaatgcttgtccaattgactatcatcaacgggtacttcatttgtctcgtctgaagaatccatcaaggtgaaaccgcctacatatattgcaaataaaataaatctaaatatactaaactaaacttgagaatagtggcgacagtgttcaggtggaaacctttcaattctgtgataaacacagttttagtgatcaaaataatatcgcggccaatgggaatctttgaaccatgtaagaagctcaaaagaaactatcctatcatgtaaaagacaaccactaaaaaagtgagtggctatcagacatgtcttgaaaaacaattaaccaaaaaatcagcacaaaggtcccttcctaccgttccctccctcccaaagaaaagaaaaaacatatgttttatgacggggagtatacaaccatgatttttttacccttccaactaaagacatgaaaaaagataatactaaagctagctatgaaaggttcaataccaaatgaaagaatgattttcaaaatttggttagtttaacaacaccacaatgatatgtaatgaggttacaatttcctttggtgccaaagcacattctaa

SEQ ID NO: 100837 - DNA, 271 bp, Zea Mays
cccattgggatcagcgacagatggatcacccccattggggtcagcgtcagtaaattcaggcacaggtacttcctcagcagcaggaaccgaaggaccaacgtcccgatccaaactagatactcgccaaaggcgtctctttttctttttctgctcatcagcaggagaatcaagttgattggctcggcaagggcgtctcgggcgaacactgacaggtttctgaatatccaaggttgtaccagcttctgggagaggcgccaccatcaatgtccca

SEQ ID NO: 100838 - DNA, 793 bp, Zea Mays
cctaaagatgctttgtcagacaggctaatgaaggtcctgatggtacagtagcctgaccaagatcgtcagatacatcgcacctcaccgacggtgatccccgtgcctggatttgcgcaggccgtcacgattcgtgcttggcgcaaagtggataaccgtgggggagtaaaagatccagtggggagacgtattgggtcgcggacagtagcttatcggagggcttgggggctgtgcgatgtggccgaatggccgtggttgtaagaggtcaccggtgagctcgactgcgccacgctgtggtcctttaccacgtattcgtagccgtggcatgctcagaattactctccctgcatttgtaggccgtcgagcgccacgtcgtgctcgccagtgcaatgtcttgtcaccatcgccctccaaatcccttccaaattcggagtaatcatggccaagctctataaattgagcacctcccttgcttcgcctcctcataatgaacccagtgcaactctaacctcggtcggtcatccaccatagcctgagcaattccgttttcccccaaatcggttctccgcgccgtcgttagcatcttaccgtggccagccatccacaggttggttcatgcttctctacttggtgttctagcatcccttgagtcccctattgctcgtacgcccgcttgattgaactagaccacgctgaatcatcgagaacaccttagttttccctcgggtctcgccgtcgtcgtgggcagaagaactccgggctggactagttcaattgagggatggattaggatcgc

SEQ ID NO: 100839 - DNA, 382 bp, Zea Mays
tcgctgcaatagcctgggccaccggtcctatttcttctaggcggctgcaacaccgggtttctctttatcccgacgatgtggttcttttcatccattctatgacggaggacatcaatatggtttcagacatccttcacctttgtggagaggcttctggtttatataataataaccagaagtcttgtgtctatcccatcaggtgtcatgaggacaatctagaggcgattcaacattttttggccttgtgagatatctagttttccttgcaaatatcttggtttgcccctctctttgcataaattaaagagggagcaagtgcaactcattgtggacaaaatagctaatcaactcccaggatggaaagttgatttgttggctaaag

SEQ ID NO: 100840 - DNA, 301 bp, Zea Mays
agagaagctacttttttatattttttcctcgaacaagtcataattgtggccttcaccttattcagcagatgctgttttgtacttcccaccaggtctgctccacccacgtgtcgtcaaattactcgttaaaccggttcctacagaggtagttcctgtcgtcgctgcactccaaggtgttttgtttggccggtaacacgcaggacatagtgcaagatgtagtgaacatagaggatcatctttcttggcatctgcaaacagaagctcaagcatgacattattttggtaaaagagggaaaacgac

SEQ ID NO: 100841 - DNA, 1177 bp, Zea Mays
ggtactattcacctatctcactgacagttgcgcaaaagcccctggacttttgtttcttcacggctctaggtcctcgacggtaccgcgtcgagcaaatggtcggagttgcggtttctcggcaacaatgacccgtacatgaggcaacaagcatatagacatcgtgcacaagtctacccgagcatatgccctcactcaattggactggtccgaccttaattgatgcttgttcatggccatggcggcgctagggctttggtgagtgcgttctgagcaaccaaatgtggtagcgtttaaattgaatctagggcgagtttcactgattcaccacatgtcggatacacgtgtgaatttggacagaatgggggtgagagagtgggtcgacgtgggtgcgctctcggaggtgttccgcggctgcgaggtgatgttctcgatgccctatcatggtagtgttcaatcggttgagccgacgagctacgttaacattcaaggatgctaaaacatggcacaaagggggatgaacagacctaggaatggctgatcacgtaggatgtctcacggcggcgcgagtgaccgatttggggaaaaatctaattccacaggctacggtggagggattgaggggaggagcagtgcactgggcacataacaagaaggcggagcagggagggccttcaatttatagtgactacgcgagtgcttcacgaatttgggatgagatgatcttgcgaccgaaaggaaggtgagtcaccggagtgcaactgtcgcagcactcggtgaggtaaggaccctggcggtaaatgtactgtccactgcgacctattgcgacgtggtaatacccacaagcatgtggcatccttgtggcgagcagcggacgccgacgatgtcattccggccgatcgtgaagcaagtgggtacggtggccagctcacaatctcatccgcgatcatgatcttttcacttgtccggtaatatcatcgtcgagtcatgcatgaatcttcacgacgagcttgaatcaccgcgcctgatcaccagcggcgaggtgcactgcaccaaggatcttctttagttattgtaccatggcgatgcttattcagtgcgcctgacagagcaaattgaggagcatcgttgtcaaatttaaatgtgacaacctggttatctgactacatcaaatttgttg

SEQ ID NO: 100842 - DNA, 792 bp, Zea Mays
gcaaaaagcccctcatgcactccatatgcctaagtctaaaatcagttgaatagggctgactttggagctttgtagttttaaaaacacaaggaatttgcctagagttgacacatcaaacttgtagagctataataggagtgcaactttgcttaagtaactaagctatgatcacatacagagtttggagaaaaataagctcaaagttgtgctgtcagtcacattgataactgaattaaggtcaccagtgacattggcaagacttttgggtcaaattggaataggatctagtgctcgattgaggatagttactatagtcgatttgtagctggttggttgagctacaactttgttaaagacggattagtaagtattcacatgaaaatttgagatctaggctctacaaagtggtctgtcaagatgactaaatgagaaactgatggtacagtatcgaaaatatcccaggttcagatcatctcaccgccggagaccacgtgcaaggattcgcgcctgacgctacgattagtgctcaacggagtacagatagttgctcgggtagtaaatatcgccttgtggatgaacttgagccacttttcactccggccgccgtgtccgcctgactcacggccgattcagatgaaatcaccggagttagccacctatcgaccatgcgccacgtgccttggtaccttaccacgtcgcagtagctcgtattactcatgtccggtgatcgccggtgagctcgccacggtgaaagccaccaatttcttgcgacagtgctctcctctctctccg

SEQ ID NO: 100843 - DNA, 741 bp, Zea Mays
gtcggaatggctctccgggcagccaacgtgacttgggaagggctcggggtgaagctaagagaaagtcaagcaaaatcgaggcctcaccaagggggtagaaggtgcgagaaggactggtgttgaataatagtggatgatggagcttcggtgaagcctgggtgccgtggcgaggtcgaatgacagacagagcaagctcggtgaaggtcagagaagtagcgacaagcttcagggatcatgtcagcgacctcggggcgaaaggggaggctccggaggtgcacaaccatgacgagacatgggcaaggtgcagaagagcacgagagcgggcactgaggcacggaattggtggcggggctaagggctgtacttatagactagaagaggggaagggaaggaagggaattggtggggattgatccgaccagatcttttcgaccatggtgatacgatggcattcacatgaaaggaaggagagcatgggaagaaggaaatggagcgcagggaaatggagctttgcccgagtgggaaggtgatctcatggccattcgtccacgcgcatgtggtagcgcgatgcggtagcgacgtcgaagcgagaaaggaaaggggagaagaagaacacctaaaggggaggagggagacagacatatgggctccacctatcagcgagacggagcgtgaggtcctcttgtcagccaaggcaagggcatgcaggcgcgggcgtgggccgggtgggccaaatatggc

SEQ ID NO: 100844 - DNA, 427 bp, Zea Mays
ttcatcctggtccaccaatataaagatctgagatcatggtacatcttgttactaccagggtgcatggagaatttggaaaggtgagcttcatctagtatcttctttctgagcgcagggtccttgggaacaaccaatcaatctccaaaccatagaattcccttgttgtcctgccggaagcacttgtatttttcggccttttgcttgatcatttccttgataacctgaacacccttatcctcaatctgtgccctgactatctgctcttgcaacgtgggctctaccgagatataacttaagtcacccgaagaaacaacttccaggttcagcttgcacaattcatcgcacagggtggtaactctcgcatccatgctcatacaattgcactgggcctttctgctcaaggcatctgctacaacattggctttac

SEQ ID NO: 100845 - DNA, 332 bp, Zea Mays
tgacttgaacacccttgtcaccaatctgtgccatgattatctgctattgtaaggttggctcaactgagatataatccaaggtacatggggaaaccacttccatgttcagcttgcgcaactcgtcgcacaaagcggtgaccttagagtctatggttagacagttgcactgggcctttcgtctcaaggcatctgccacaacatttgccttgacaggatggtaatgtacttctagatcataatccttgatgagttctagccatctcctctgcctcatattaagatcagtctgagtaaaaatatacttgaggctcttatggtcagtataaatattg

SEQ ID NO: 100846 - DNA, 640 bp, Zea Mays
aggtaccagctggataggaactgctttgctctggacacgctagctgtttggactttaaaattttgaaactttttattcgaagatgatgtaacatgacattcgtattatcagagtaatgcttcagtccattaggtgtttagattgtgacatttagctacacttttctgaggcttaatgatggaccagtttctatagcagatttatgtcttactttcacaaaattattttagattaggtgaactcggttatccagtcgttgatcacatttctgtgcctttctacttggacgttacagcatttccaaatttttgatgattatgtgcagttagatgctgggtggtaccctttgatctacgtttcctgcctgctgcttagcctgtttagagcttaccaatttttactaggatctagattctttggaattgatatttgacataccagtctctaaaagaggcactagcctctacctatgtacagagatatatccttactggttggctaattcttatgggctgtttttttccagtgatctgggtacttgctgcttgggggaattttgtcgtagcttggaggagactgctcgccattttgcgttttcgatcgtcggtgagtctgtgtgcctatacgcttgatctgtttt

SEQ ID NO: 100847 - DNA, 281 bp, Zea Mays
ccatggtcttgatatggtcgcatcccaccttctccaagatggttgaaatccctcgcgcaccggagaacgcgcaaacatccccgtgatcacttagaatttcttcaaaggcttcggcctccccacttatccattcaataatgcctttggggttgccttgtatgaagttttcttcggaagaataggcgcccatgttggcaaaactggtttttattttcttcacacagtccaaggatttttcaaagcatctttccttggatgtgcgaagttcttcaatgtttttc

SEQ ID NO: 100848 - DNA, 366 bp, Zea Mays
gttatacattagtcagactataattataaatagcttaactctgattagaaagattaatctactaaatatgggttaaataaatatctaattataaaagtacgtgatatgttacaaataatattgttactacatagacaattttattacgaagctgacaccacaagaatgggttaaatcagaattaaaatgagcaagatatggactaaacatgtctgtttatacttttgtattaattttatgatttaaagtatttctcgaggcttgttttgaatattccaggggcccatctgtgataatcttacaactatccaggagcgcaggttgatttatacgaagtctgaggactcttatacacttgaggaaggg

SEQ ID NO: 100849 - DNA, 541 bp, Zea Mays
gggagacaaatatgtcgacacttatcttgcctctatagattgcaaagggatccaaaacaaagtcctaggcatgagtgcatgaagctctcttatcgggtcattgataaatgcaatcgaggctgaaccaataatcgcaaaatgaaagtcgcgagcttgaagttcggacatttatgggcactgctgaaataatgtgtggtgaatgcgatggttcaagtggtcttgtgagagacctatcccacatatatgttgaataaacattgttccgctatataatatatctggcaaatggcatgaattaaattatgcagttaataggattcttaagatccgtcatgagatcctagaaggatccatatctttgaattataaatatgcaacatataaatctcgtactagataatacattcctaatgaatgatcactctcctatgtggagagaatatctcctagatgagattatagttctttgatggaacttttccgcaagaaataaagtttgtgttaaacaccaaagtttgataatccctataaagggataaag

SEQ ID NO: 100850 - DNA, 814 bp, Zea Mays
tccggctgttggtggagggtgccttggaggtgggtgataaaacattcttggggccattcaccaagttggagtaggcaggtacggatgtcttcaactaaggacaattattcttgtagtgactggggtctccatagtgccaacaagcattggctagaggttggctgcttgcaacagatggggtgtggagggaactttgaccaggctggctgaaacgtgacggagcagaccctgttggcttgttgaaactcggccctttgggagggaacccaaaagatcgaactctctggtgcctgtcctgctgctgagctcggagaacttgaaacttcctcttgaggtcacccttttcttcttctcgtgctctttccacctggatggccttgtttgagaggtgcgagaaaatgaggaaatcatggctggcgaggatggtcttgagttctagtctcaaccccttcaataaacgggccatcttcttggcttccgtgctgacatcatcaggcgcatagcgagccagctctgtgaatttgtggacgtactcgctaacagatctccctccttgagttaactcccgaaagtcttcttctttgagttggacgattcccaagggcatgtgatgctctcgaaaagcggcttcaaattctgcccaggtagcatctctaacggccgcgctgaaagtatcccaccaggatagggccatcccggagagctgatgagcagctaggtgaacacgctggttttcagggcatccaatggcctctaacttcctctttactgtgcgcaaccagtcatcagcatcgagcgggttgctggatccggc

SEQ ID NO: 100851 - DNA, 699 bp, Zea Mays
cccaaggtcaccacaacaattttgtagatctatgaaagaagaacaactttgcttaagagtgtaagcataattgttgagaagaaattggagataattaaacccaaagttggactgtcaggctgataaagtctgaatctcagactgacagtgacctagatccaagtttgagagccatttcgactatgatccagtgagaatctacctagggttgctataacaaagttgtagagctattatagaggaacaactttgctgcagagatctggatgtgttgccatagaaatttggaagaaatttggccctaaaccttggctgtcagacacactgaatcagagttaccatggtacagtagcctgatcgggttcagtaaacctcaccgccgacgaccgatcctccgccgcgattcgtgtcatcggcgtatggattcatgctcgtggcagatggataacatcgtggggtaagaaaatcttcgccgccggtgagctggacgccactccggctagccgcggtacctctccccttgctcaccgcccctcggacaaggattctcaccaccgttaagccgtcaccgttgtccaccgcgtgtctaaccctttccaccacatcgccgtagcctgctttcactctccgttgatcaccggagcgattgccatggcgttggacaccaatccattgtgctagtgctcttctccttctccg

SEQ ID NO: 100852 - DNA, 376 bp, Zea Mays
gtatcaggatttgaagcagaagtactggtggtatgggctgaaaagagatgtggctgcacatgtggctatgtgtgatgtgtgtcaaagagtcaaagctgaacaccaaaggccaactcgactattgcacccgctaaaggtacccgaatggaagtgggaagagattggtatggacttcattgtcgggttgcctcgcaccccaaaagggtatgattccatatgggtgattgtggatagacttaccaaagtggctcacttcattccggtcaagactacttacaagggatctcaattggtagagttatacatggctcggattgtgtgtttacatggtgtaccaaagaagatcgtttctgatagaggctcacagtttacctcc

SEQ ID NO: 100853 - DNA, 914 bp, Zea Mays
ggcttccccttcagctctcaggggaaaccctgctccaatcctggaggcggtaggcgtggttttatccgaagccatctgccagggaagagagtcactattatgcacatgcaaattgttttcaaccaagttattttattcattacaccagcacattacaagcataagactactacaggtggaactacacgagagtgttccccgaggtgctaccgaactctttctctaaggtatccccaaattccttgagaagatcatcaaggctcgctagggatatatcctcgatgtcggaccaatcgtctattctagggggaggtggggctggaggggtcttcttcttcttcttctctgtttggcatcctcggttggtggtcttcttctggattttcttcttgggagtgagcttccttagcttcttgtcatagtccatctttaaggttcgataggcctcacgggtgttggcctcctcgccttctgctatgtcgagactctcctggagagatgccttctcttgcttaagctctttgacctgctgctctaggctttccactcgggagtttaggtgggtgcagtgggaggagagctcatcgtagtggttgtcgagggtgtggaggtatccggccatgtagacgatggtggggtcatcttctgtggggtctcctcctgacagagcctggagtcttttcctccaggtgggggtatttttgttgctgggtggaaaatatcgaaggggggtctcagagatctctcggctgtagttttggcacagttgtttaagggcttttcgggcaacaccctggcaagtgtctgggaagcggtgcccgatgaaggtaatttggaagggagggtggtttgggtagttccggctttctcccaggtagactgccatagagcacttctctattccattttcgcgg

SEQ ID NO: 100854 - DNA, 379 bp, Zea Mays
gttattgctatatttcttgttttcatgcttagaactctaatacaagcatcctaatttaatgcaggagtgtttcgtatgcgctatgagatgaagtattggttctgggcacctttggtggttttggcaatgaagaacagatggaaaggagtagatatttttcttaggataaggatcagagatactgcctacatgaattgtaaatggttgtccaagtgctcactcagcaggcttagcacagttgtccatgtttttccttctggctcaaggtcgtcgaggtacgaaccctcagcccgaccggccgacctcccttgcactatctcgctgcccacatagataacagtccatctctctatgtcggcgatcggggggccaagatcgt

SEQ ID NO: 100855 - DNA, 393 bp, Zea Mays
atactgtcatacattaatagtggtgtctacagcttggttgatcatggaacacttgtgcacctatttttgatttagggcccatatcttactctctgaaaaattggatctgcccttgtgaaccattgagaacccttagatgtcactgaaaatggatgctcctctaccctgaatccccattcttgtttagcctttatatgcttctacctttccaaactaggtaacaacaacgcgttagaataaataggctagctttggttagaagcaaaggaaactatcttttggtatgtagtattttcttatcggttccattccttcccgtcaaacacgtcgtactaccaatatcatcagatggggtgtactcaggtggcacttccttatctgtgcctatgtggc

SEQ ID NO: 100856 - DNA, 474 bp, Zea Mays
gccgccgtgcatagtgacaatggccgcgattagatctaggataacgcttcggttagaatcaatgtggcctgtagataattgattatatattctttggtctcaactcgcccaagattcactttaatccgttgatcgccgatttgatgtctcacgctgcgtaccgattcgatgtaagggcgatctaatatgggccgcaaatttgaaatcggacggttcggatccgcgcataacccttcggccagtcgaattgatagctagacccctcagtttttaggttaacaacctgctgtccatggccactatgcgctgggtcttgggtttcttgcgccgaggcccctgccttttctggtatttgacgcgcggtccagggacttgggaaatcaggaaaatgaattagaaaatgagttttcaatatgaaaacaattcctagaatttgtataattcatagaaaattcatattaggtccaaattaat

SEQ ID NO: 100857 - DNA, 646 bp, Zea Mays
aaacaagaaaaacttggcttatgataagtgctattgaaaactaaaactgagttgttatgagtagaggttgagaggagaagagaactcttcacttgattgttccttgtaaatgtctagttgataatcttgccaagaatggaagagggaaagtgatagaattacatggacaatagcaggcttcaccatgggactaaatgtctcatcatagtaaactctaggacactaagtgaagccctagagaacccatcgtgccttgtacctatctagagaaccatctgactttagaaccatccaccttcctcttatgtgtccagactcacttgctagtttccacattactgtctgaggatgggacaccaagttacaggtgttgttggcaaggagggtctcatactcttcctccataacgggatactagtgaggatcaactagggcactgcgaacggaagatggcataagggagaccgacgaagaggtcacaaagaggacaagataatcaaccagggaagaaacccagcgacttgtcgtatcaccttgggttgacttggcgagggtcatggtgaagggggatgatacatcatcggcttggcctagcagtagggcagtgcacccattcacactcttcgctaaataaacatgcataaag

SEQ ID NO: 100858 - DNA, 421 bp, Zea Mays
ccaaaaatcccaccagttgccccacttattcctggcacaagggactatctccacgacttccgccgaagtctttccaatcctcggcgtgaaggtgcatgatccaaattgtgcaatcttgtttcctatttttcttttttgccaatgcaggcaataattcttggcgaagacctccacagacggctgcccatcgtaagaagtaaccgcccaaacatacttcaccagcgcaaccacggcgttaggcgtcaactagtggacctgcacttcgaacctccgcaacacctccgccacgaagcgatgtgccgggagacgaaggccgacgataaaaaaggcctcaaagacaaccaattcgccctcaggcttgaggatctcctctgcacatggaacccacccgacgccgtcaccaaagtatccgagctgctgc

SEQ ID NO: 100859 - DNA, 744 bp, Zea Mays
caagagcctaatagtcatcattttaagagaaccgagacctacttaactgaacaagagcctaatcatcattttaacaagagcctaacacgaaacgataagatgtgatgatgaaccatttgtcatcccaattatctcaatatcaaataatcatcggtaccattttttcatatttaccttttcacaaagacctggattttagtgtcactttgaaatgacactatcaatctgtttctgttgtgtgtagcaggtagagccctgtgtgagccagtttccgtggtgtgtagcagttgtatcatcattttttcatatttcagacaagagcacagaatgacctccatcaaaataagatgatgcatgagtgcgaatcagttactgaatttctctagtgcgattagtgtgtttcagttactcacatttgacaaaaaacacagaaaactatgaatctgtctcacagaaaacagatgaattcagtaactatttctattaggctattggaaccaccatgataactaagcaacatttcacacaaaggatagggctaagtggattggctcaccttgaactacaccatagaatctgacagacctgcgccacgtcgagcgcttctcttcaaacctgtttcagtgggatatgacaggaacacaagaatctggtatggcttcccttcagagaatcagaggcatcatcatttttatacccgagcagcggagcaagtcagtcattttagcacgtggatatataatg

SEQ ID NO: 100860 - DNA, 549 bp, Zea Mays
cgcatttccgagaaatccaaatatgaagtttcgcggcgtccttgcggataagctctcatgccttgctgctgatattgctatcccgctatttcgtgaaggaaacgggtgttgtcggccattgcattgactaaggcagtgatggcctcagccaaggtcgggggtacttgtggcagattaggagtagtctcccttccacgtgaggttcccgcaacatcctgtccacgagtcctagatgacatctgaggcaaagaacatttggaaaatataatatgccaaagcacaccatcattttacattacttaaaaaataatgatacagactcgaatttacaatagtaccacattacctattttacatcatcatatctaaactacactactctagtttcttatcacttttggtagcttcactgtcgggggtaggggaccattcatcagccagattcattggaggaggcctaaaaaggtccagttccccacccagggcttcacccgctgttccagaaggtccggctcccattccaacaggatctgcaggtacgtcagggtg

SEQ ID NO: 100861 - DNA, 285 bp, Zea Mays
tgaggatcggattactaggaacttggtctaagggaaaagtatacgttctcaggggtggtccagagatgggtagccgcttagcctagtcatgtaccatcataagcctacaccttccatcaccttagaatatgtgactgagtacctttttgactaagttcttagaggttcggacctcgtacagaatcaaaggctggtcccaaaactaggctcagtaagacccaaatgcatggttcgatggattgaatacaaaataagtaagggtcccaagggtgcactactaaacac

SEQ ID NO: 100862 - DNA, 690 bp, Zea Mays
ggagtagcaaggtacaaagctttaagtaaacctgagactactggtgacaaggcttaatgattagattatcgaccccaatgaagctggcagcacctaggtgcaatccttttttaatatctgggtcttttgtggttgcaggtattagggttcaaggtttggggacaagcacactacattctcttttgagttttgaccatgatggtcaaatgtatccttccttttcttttttcccttttaatttgggacttggttctgtattcctatcttttattccctcttaatataatgatgataggcagctctcctgccggtttgtgaaaaacagagaagggacaaggcgacaagcacaaatgccaacaaaaaattgtgaagttctggggtggtagactaaataaagagcctactttggattggcatgtctcctaatttacttattagaatgatattttccaggtggtaaaattttgaagcatcagagattcaactttgcatgattcaattgtgcaaaactgtacccttatcacatatgcacattcagtgctgagaaaacatcctatttggtactatcatgtgaacctactgaaagagggcaggggcttaagaagaaaatagttaaactcaacttatgttgggtggggctgagggttattcagtaattccaagctagagagccgaagcatatgtagaggt

SEQ ID NO: 100863 - DNA, 495 bp, Zea Mays
gcggagccgagcgttgccgcgctttgcttgatgggataaacgccgcgcgctgggaaggttcagtgaccactccctgccgccgccgccgccgccgccgcgctggtttttattcgcttctttctgccttcttcctcctcgcggccggggcgggggcgtgctgctctctcctctccagggagttttctgcgggggttttggttgggttttcttcagcgccagccgtggatgtgtttaacgcaacagtattagtttcttcatgatcagctgtgtgtcctcaaattgagtttcgtgccgtgtaccagtcgcgcatgttccccagatcgattaaagtttcttcgcgcgtatgtatgagctctattcgaatgttctttgctctgaaaagattccccctgttcatggttacagaagggcctggagttgaagcacgaatcatcgaagcgcagcaaaactgagacacacgtcttacttcttcacaagtactgtcctctctattca

SEQ ID NO: 100864 - DNA, 502 bp, Zea Mays
aacgttatcggcagctgcaccgtctgcaatcattggtttggaacggtgggaagatggtgcattctgccatattttacactaactactaatggtgatctgatgtgtgctttaagtatgtaaacatgattgggtgctcgatgagcctatgtacatcagaggaattaagccgaggaattgagccacatatttgaggcatccttgtgcacctagaaatcgcttcatgttttgcccatccttcagataaaacgggatggatacttcctacgacatgcttgacaagtgccagatcagcgccatccgagtagtagtccgcacatgccaaatttgaaggtttttcctcagttatataatgttcgttcctatataatcattgtgcactaacattttattgagtattctgtatgttgttgcaacacacatatatctaatatatatataaagtctacatgatgcaattgacataacattattaaaatcatatatagaagtttgtatggtgctg

SEQ ID NO: 100865 - DNA, 313 bp, Zea Mays
ctgaacttcacccacaaaatagggaagcacagggaccacgtcgcaaatatcccaagaatcagtgtacaaccgcataggacggcgggttatttattaacatcgttaggggctcttttgtaaagttgtcggccgaaagggtacaggccaaccggggccgctcgatgaaggatcaagggcccagattagacagtgaactggtattctatcctggccatcagatccaggatctatggttctgaatccattcctgcgtgattggatcgtctccatccgatccgattacaacggctcagatctacctactgaaacgctg

SEQ ID NO: 100866 - DNA, 458 bp, Zea Mays
ctcctacgaggagctaccatattgttatcttcaatgtggtgttcagaataagcaggaggtaaagaaactggattaggttcaggagtataactagtagatgcctcgctacgtgctgcaactctatccttcatagggaatatatcttcgaaaaaggaggcatcacgagattcagtcacgatgttaacatgcacatctagaaaatcagatttaatcaccagaaatctataggctgcactattatgcgcatatcctagaaagacacaatcaatggtttttggtcccaatttacgtttcttgcacgcaggcacattaactttggctaaacagcccatgcacgtagaaatccaaaagcaggctttctacctttccatcattcatagggtgttttatcacccttagctgatggaactcggtttagaacaaagcatgcggccaaaatagctttgccccaccatgac

SEQ ID NO: 100867 - DNA, 282 bp, Zea Mays
ctttgagaatgaagtctttttattgatgatgtattttccgattacagaatacaatgctgccccgatagcttttgaaatctagctaggggtaaaacttcctgagatgctctatattccatgaattctctatttcggtgccatccatttgagtaagtcgatatgatcctggccgagtgacttctgctaccacgaatggtccttcccatagtggcgacaatttatgccgtccttcccccgttagaattcggcgaaggaccaagtctcccactgcgaaggatcgat

SEQ ID NO: 100868 - DNA, 922 bp, Zea Mays
aacaaactaaatatacaaataaaagagaaaaaagacataaactacataggtacaactagaaaactactctaaattttaaaaaaattcagtcaaattttttttctgagatgcaggccatgagcaacgagaatcacacaccttctaacaggtcctctgaaataatacaacagtcagcatcaactgctatgtttactcctaaaaatatttgcaatgttgtagtatccaagaatgccacacttgcacgccaaaatcgaaagcgggcacttgaacaaaaacgtttgctaaccagaggtaactgagccaaaaaaaatttgaaaccaagttcatagtattttaacatcatagtctttgatttaattaattgctgcgcaggacctaaacatagcattaacacacccatgaccagtgtttatttctcttcggaatatataaatgcccttaaaggtatgggaatagtattcttaaaaactttacacttttttatttttcttcccataaccaaccaccgacatatattgtaacaaatgcatcttacaacttcatatcgagataggtcccatcttggaacaccagactatgaatgccaacattgccatgctttattttggcatgcggaacgcaattccagtaatagatatggaattgtccaatattataattgttgcaagggtggaaagctatcaattccttcttacacacctagacctgagccattagcatcattgtctaagttccacggtgattcaatatcaaaaagatttatgagaagcatacgccagtacaattgtttatttgcttttacatccatgggtgcacaaatcgataatactatgaatgatggtcgtggtcctccacttttcaaaatatgtggccaggttcatcaccgaattggttctcttttaccaagtgatggctcatctcc

SEQ ID NO: 100869 - DNA, 377 bp, Zea Mays
tgatctcctatcgtgccaccgcacgaaccatcaagtcacgatcaacgacgtcgttcagtccaaaagcatcacatgggtaaccatgtggtgtgcggttgggtaacgaacaacgacagctggcgcgccaggtagggggtgcgacattgataagcgccgactccatggcagtcaccttcaagagcatgatcaccttcagtccaggagcagtcttctactttggaaccatctcctgtgtcatggacatggagggaactctacaccgcgaaggcagccatggggaaaccgcgaactacaccagcgagaacctcgcgagtagaacaaatgggtgtggtcccacacaaggccaagctcgggatccccccgataattgaagctca

SEQ ID NO: 100870 - DNA, 519 bp, Zea Mays
actgccttctgggcctgcggtgctgtcgatcataggcaagttccattgatagggttgcacggggaggatttttttctttctttacttcagtgcaactccatcggctattctgttgtctgcttttcgctgacagtgatggcatggaatggctgcttttttgtttgttaattaatcataggatcttcgatggtataatttaagattttttctattttttccgtcggtgtgtgtgcagaactgtaagattatatgccattagttgtgctttcagattgtgcggattgttcagttgattttgcataaaacgaactagctaagatgtgagaggtttttatttgtggtttttaaactgaagtcaataaaaatatggtcttttatattggcggtttgttgtagctctctatgttccaagggctgtttgtagctatgaagcgcttcctaaactgaagtcagtgaaaacagtttaagactataatccatccttcctaaactgaagggttcttaaactgaagtcaatga

SEQ ID NO: 100871 - DNA, 364 bp, Zea Mays
agggccccttcacttgagggcctgcgtatggttagtacgacaaaaagtattgtctttgctctgtaatcgaggccgtgttcagtctccacccataagtagccccccgagggagtggttcatggttcatcctaatgggccattctcgaagtctcttagcttttaaggtgacgaacgttgccattgatcatctggtgaactgcctcgagggggccgctggatgtgaccgttggggaattttatggtgttactgtgtgtcgcatttgcctgtctataaatacggaggtccatgtgggggcaaggcttctacttgtcactttctgtagccaaaaaacgttgctcagtcgttgctcactttctcgtcggt

SEQ ID NO: 100872 - DNA, 1742 bp, Zea Mays
agaaggatacaatctgcaaactctgcattaagcgcttcaagttctgaaggggctgattttctgattgtaaatactggcagtggtgattttgtggatgttataaatgatgttgttggtcaacatgtgaagattccgattttcgtcacgttgaatcatttaagtgaaggaacttattctgacttcacatccaggttgctccaatctggtgcatctggagttgttacatccttagctggcatggaactcctcaatgacgatcttataaaaaaagacttcacaaaggtgggctcagctgaggaactcccacaagcgagttactcttctgctgggatgctggaagatgttaataatgtaatggtcctaactcgtgattgcgagaagactaaagttgctggatttacaaaattggatgaagaagtgataaagttgatagaaatagaaaagcctattctgaacgaagctatcactattatccgcaaggcagcaccaatggtgatcatcttacgttacacatttggtagttgaagatgccctggaatgaattcaattatacttcatctcaccatctttagcatattttgacttgaatgtaattgccgatttgtcatcacacagatggaggaggttgagcttctagtggatgctgcttctcgcctgagtgagccatttttgttggttattgtggtaattttgggtttacatcaagtattgatttcagtaacatccattacatagctcattgatttcagcaacgttcattacatagctcattgatttcagcaacgtccattactagctcatatttaaatgacatgcatgcatactactgacgcaaatgacattagacatgattattgtgttatgttatataaatcatcaaatgatgctatagggaagccacattgatatggcttgcatctccctcaaaagcaatcgacattcttaatatatcttcttttctcaaacaaggaatactagtatgttatgaatattttgtgcatgtattttttacctatgtggtttgaaatatttgttttcaatatcttacatttcatgaaattcccatttaatttctactatcatttagtgccttttttggttcattttgccatctacctccttacatattcacattttgtatgggtggaaattattgttttcaagtcatctagtcgaacctagtcgtataactaccgaccagtcgactagttgcgattagtcatcgaccagaccgactaatcgagcctaatgcaagtaaagcagagcagcaagacaaactcatcttttcggtgtttgatatcggcagatacacaagaggtaggcctagatgatgaaccttgaatacggggggcatcgcctggggcgacaatagtgcagcacgggtggtcgtctggaactggatcttgtgggcggcggcattgcgggtttgcggcagcacggacggtcgtctagaatttgcgggcggcactgcaattgggcgattgcctagaactggatcttgtgtgcggcaacgacattgcggtagcacgaccgaccgcctagaacttgcgggtgacactgcaaatgtgcggcagcacgaatgactctatgcgatgtgttctggtctgcctgtagctggctgcctggtttggcaaccctaaaaggccacattagcaatccatgagcccacagatgcagcagcaatggcagcctagagcccacaactgcatcaaccataaatctcaaaagctatctaaaaacac

SEQ ID NO: 100873 - DNA, 373 bp, Zea Mays
ttcgggcaacatgagccaatagaacatgctggcaggctgatcgatcttctgtttaggtattgggacctgacacttgggcctaagcactcggaagtatgtgagagtaataatgcatgataaaatataaaagggtacggccaattgagagatccctgaacacaatccaatcgaaccaatctatttaccttatttatcttacctaggatctattggatataatttatttagccccaaaacaaaccgtaattggtcgtcgcgagtcctgttctcctcgccgtccgcccctgcccctgcttcactgactcgtgggcaccgacggctccacgagggacgtggccatacctgacgcctccacttccatggttgatctggc

SEQ ID NO: 100874 - DNA, 488 bp, Zea Mays
aaattatggacatgtgattaccagcgaatgtaagctggttgttgggatcgatgggtggaatgatcggaacggcgacgctctgtctcttccgcttgggagccatcgcaatctctcgggcggaatgagtgggctcgagaattcagaaaacggagaagcgacagaggaaaaagtaagatttaggattcggaactcaagaaggcacgtcgggtgtcggcatgagtataagttggctccttaggtcgggcattacctctaaagtgccagatcacaactcggaaaagtgaggactgcaatcgacactcggccattacctctaaaatgccgacaaactttcaagcacgcgaataaaaagcaatcaacagtggttaagtggagtaacttcatccttcaatcgtaatggggggaattaacacaaactcgaggccaactctttatgagtcagcctcttttacccctggtcactacattacattacattaccctactac

SEQ ID NO: 100875 - DNA, 618 bp, Zea Mays
aaacggtacacgcacccaacaggatagacctagatctcaactcgtcgcgctcatctagcaaggcagagtacttggtctgcaaagtggtgatgttcgacatgtgtagagcgcactcatcacattcagtcttgtcggacacctcaattgaagctctagcagactcaagttccctaagcgtgctctcatacttggatgtaaactctctcctctaacgagtagcctgcctaagtaaattatcctgactagccaaagcaacgttcagctcttctatctcagcggcaagatcatcgacagaaggtagtacctcagaagtagtgtcgtcgccgatgtctttgtcgtcgctggtgccgaccgcatcctcaccaagtgcaatggtgcagaagcctcctgcggtgttggcaatgaagcacagcccatttagcttgtcctcgacccgcctctcagtctcctcatcgctcgaggaagatataacattgtcggagtcgtggtcgaggtcgctgagggaggcgaggaaggtacactccttgatctttgccttctgaaggtacttcttcttgagtgcctccttgttgaatcctcccttggacttgtacttgccggaggagtacttgcccttgc

SEQ ID NO: 100876 - DNA, 458 bp, Zea Mays
atcatgtccagtccccaacacacaaatggccatgttacgggtatggtctgcagttgctgtgctagtaaatgctactgctttgataagaattggcaagcttcacacctctggactaactcggctgcatcactttttgcgatcggccagtagaaaccagatcgaaagacctttccaactagagtcctagatgctgcgtgtatcccacactgtccagcatggatctcatctagcagttgcttcctagtagccgaaagaatgcacttcatgaggactcctgttgcgccccttctgtacagtgcctccccaatgagggtgtagtgagctgattgccttgtgatgcgttctgctgccgttttatcatccggttcctcttcattctttatatatctgatgatgggctccctccagccattagagtctgactctggctggctcagaacattgcactcttctgcccg

SEQ ID NO: 100877 - DNA, 447 bp, Zea Mays
cactttccctatggcctaggtttgccactaaggagaacaccccattaatcatggtcattgtggaggttgacatgtataggtcatatggctatatgcttgcatggatgtgaactagtatactcttggatttgtgttgcctctagcatattagttgatgtacaaccattgaatggagacaatgctccaatatggtcccatgcctgcatcgaggcaaagaacaattcagcaaagaaaatgcatgcataacacatagcttcataggttttttatggtaccatcacatcaacaagaggataccactacagatatataaacatataatctacaggttagtacatagactttgcagtgagctgtcacatcatcattatttagcctcgacaacgagtattcacaaatagtatagagtataaacatatcctttttatatacctatcacaccaaggc

SEQ ID NO: 100878 - DNA, 368 bp, Zea Mays
tggttctgaggaagaattcagctgcggggtaccaactaaacctagtcatttggactttggaaagtccatctctgaagctgacctttcaaaaatggtgaagctggggtacttcagcgaagcaaaaaaggagctggttcgttttggaggagaggaaactactccgaagccggaaaagaatgaggtagtggtgttcaaaagcttctttaaagcaggattaagatttcctttgaatgggatgattgctgatgttttgaagaaatttggggtttaccttcatcagctgacccctaatgccattgttagattaagtgtttatatttgggcccttcgtagtcaaggagtggaaccgttcggcgaaggtttctgcc

SEQ ID NO: 100879 - DNA, 706 bp, Zea Mays
caattaacctaacaaaatcatgccaagcatgttgatttcatgccaaacaaatccacaccctggcctatgctctacaattcatacctttgccttggccatgctcagtatggggtgtagatattcttggaccatttccttaagcagtttaggtctaccaatacattaaatggcccaaggccaccatcttgacaaaaattgaaaaacacttatctttctaattcttctgtggtattgtggcctgttttggtgtcctgcatagagtaatcatggataatggcacataatttacaagaggggcattcgagagctaatgtgaagacatggcatcaacctatgctttgcctctcaacaccacccttaaagaattgggcaagcaaaaatagcaaacatagaaattctctagggactcaatacttagacatatatttgcctaaacaaacatggttgttggatggaccatctcgaatcaatctttttggcaaatagaactatgcaaatttgggcaactagggacgcccctttcttcttgtttactaggtcgaagtcctcctaccccagaagtaaccaagggttcctcttttttattgcatatcaagatgttttgtaggagcaggtgcaccccaaggaacaagatctccttgatgaacagaggtgacacacccttcttcacacaacaaagtactagcaggcttcaccacaacctcaa

SEQ ID NO: 100880 - DNA, 746 bp, Zea Mays
ccttgaccggacatcaactcctcctcctgcaccaatgccaaggaacaagcagtatccaaagtaggtctttgcaccataattacagatttgatgtcctcccgtaacccgtcaacaaagcgcatggtatagtatagggggtccgcattggattcatatgccgatagatgatcgactaaattggaaaatcgttcgacatactcgaacacggaactggttcgaattagcgacccatgttgctcacgaccgaaacaatcgtgtatttgagtgcaaaattcatgccaggaccagtaccgaacgcggtgcttgattgattgcagccaacacaccgcccttccttcgaaatgcatataagcaacgtgaatccatttagctaggccaacatcatacatatcaaagtagttttcgtagcgtgttttccacaattgaggattatctccatcgaactgtgggaaattgacacgcggtaaattcccttggctggaacgacactccttacgcccccatcccattcaataaaacgccactaataagacgtatcatcgaagcgaacatgggctagctcatggaacatacccttgactgggtcgtgaggctgaggaaaattttgaccaaacccatgctccctgtaacgatgattgaaccgatggtcgtttggcccgtctacggtggaattccgagcaggtgggcgctcgtacgttgatttgatgttggtgatgagaccaggcttggtgaagtcttgcaccatg

SEQ ID NO: 100881 - DNA, 322 bp, Zea Mays
cagattttcatcatatatgcacccctatcggttattatcatgcacccttaagctatttgcatcctcctctattttactctagcttcgccactagatgtacctatcaaaggtgcataagctacatggcctatccacttctatcatttcagacaggaactccatcttcaccattcgactgtggcatgaacttttccagttggctggaaccaagctctatgtaagcagctcttatcacgctcagtcggacaggaaaacagaattgagtaaatcagtgtttggagacgtacctacattgttttgtccatgcttgtcctcgtcagtg

SEQ ID NO: 100882 - DNA, 373 bp, Zea Mays
ggttttaggaaaatggccatttgaggtgggaatgccctcccgaaggagctaaaagcaagcagggatacacaatagagataatgcaatgcatttcaccaactggattcatggaatttcacagaaatttgaaagatttgcaaaagggtgagaaaggagggagctccactgtctgtcaggcagagaacagcagagaaggggagaggagaagctgctcaccgagggggaagaggaggggagcccaaggtcaccggagcacggccggagaggatggccgccggtggagatcgccggcgaggggaaatcgccagacgcagagagctgggcggctgggagaagaaacagagcctctggctcggcttggtcgggctggggg

SEQ ID NO: 100883 - DNA, 687 bp, Zea Mays
acttctggtcaacatcttaaattactcactgcaaagaaaaaaatcatcatgcgacatcgtagatacatgacccagcttgctagcacctttgcccttatagtacaggtacgaggtatcttttcaggaccgctacgggaggacctctggatgcttgcagaagtacataattttccttgacatgtgcacttcttttgtccaatgtaggttgcaaaatctgctgcactatcatcaatttgctactgctgtgttgttgtcattggcagctttgttaaattatgcacacctaatttcctagtggagttacagaagactgtaaatctctctaggtaaaatttctacatttttttccttttagcaagaatttgagatttggaattttctgccttgtcaccatgcataatgttcatgtttattttttgctttgtatcagcttatttaattgtttgttggcccagaaaaaccaacacgtcttatttgaaacactcaaaatttcaaggatccttgcaaaaaaagatcagcactttttcttggagagctttaccaaggagggtgtaaagcatgcaattgagtatatagtatcacaatcaaaaaataccagtcaccagaacatgaaagaattttgcctttgcttttacatgaaaacttcctcgactgttgaggcatgcagcattgcgaataattctgtta

SEQ ID NO: 100884 - DNA, 367 bp, Zea Mays
aagacctccccggcggtgaagttgaagacggtgttgacgatgatggccttggatctatcgtggatcgatgttgcacccctacctcgcgcgctagctatcagtgtttggtaccaatgacacactaaagggtataccacgttgtgcttttgagatgttggcaaagtcgctcgctgctcgatggttcgtgcaaagcacgacaaaacacaatggattatacaagtttgggccgctcaagcaagtaataccctacatcttgtgtgctctggtatgtctattgctaggtgattgaggattatagagtgtttctggaggcggaatatgactacgctatggaggattctcctatttttgtaggggttcctccaag

SEQ ID NO: 100885 - DNA, 381 bp, Zea Mays
agctccaattgatatgcaacctctcccactcgctttaggattaagaagggtccaatgaagcgaggggacaacttccctttaactttgaatctcctcatacctcggattggtgacaccttcaaatagacatgatcaccctccttaaactctagcagtcttctccgggtatccgcataacttttctgccttgactgcacagttcttaaattctccctaatcatttgcacttgttcttctgcctcttgtataagttcaggcccaaagaactgcctttcaccagtttgatcccaatacagtggagtcctgcattttctgccatatagagcctcaaacggtgacatcttcaaactggcctggtagctattattgtaagagaactcc

SEQ ID NO: 100886 - DNA, 413 bp, Zea Mays
gtgctttagagatagccgccgagcaactgaagacattggtgataacgtcagcgtcttagaaatgacagccgagttaaaacgggccgcgtcggccacttttgaggataatagccgagtgatgatgtggcacaccggtgttttagaagtaaccgccaggtgctgactgggcgcttttggaaacgacatccagctcaggaatatcccgcttatacagcgctttcagccgcctctgctttccgtgccctagttcttgttttcctgcctccaaattctctctgcaattcagctctcgctctgttcgccagtagattcgagatggcgcccaagagaaaagcttcgagttcatctacagcagtaattccccctatcgaccccaacagccaattgcctttcgcgggtaatcacatgtccat

SEQ ID NO: 100887 - DNA, 419 bp, Zea Mays
cgggtgtgagaggtgaaatgaatgcacttgttgagagtttggtcagccaagatttcgtgggagaggcagaagtaaataagagagagagtgtgagggggtatataaaggatcccccaaaagctggcagtcgttgggagaaaagagataaaaaccgattgaaccggttttcagaccggttgaaccggtttccaccaggaagatcccggttcactaacctactcagccggagactcgaccggatccaaaactagttgagccaggaaaaattccggatgaaccggttttcccaaaagttcttcaacgacttttctgacagctctgactatcagacaggtcagagcagggatggcagagcaacagtcccaaaaccggttgaaccggttttaggcccggttgaaccggtttccagggctgaaaaa

SEQ ID NO: 100888 - DNA, 345 bp, Zea Mays
gaaaaaataaattttaaattgaccacaaagtttcatattcctatatttctggatttggacaagaagcgtagctccagcagcaccgagcaccaaaatcccatcctagtagcccccatctgacgacattcaagacagaacaattaggatggcaatgcgggtttgagggctagccaacttgcatccctacctagaaacacctaaggaacccagacaacaaacatataggagtgaatatgagctgcaaaggtacatcaactactatcatgcaatttatatgtggtggacaaaattactaaattagtgggaaacctacctatttatgcagagaagtcctctatactccca

SEQ ID NO: 100889 - DNA, 471 bp, Zea Mays
caaacacaaacatggagagatagtgccacaaactctcaagtctaaaatattatgacttagttaccaacttgtaatggacatcaaggaacaaaatctcatatgctcaggttgtcaaagttgagtaacatgaaaggggcaccttattctatttgtgtaatttcagtaagtcacttccaaattttatagtgcaacacatttccattgaattgccatcaagcgaccacaacatcctaacggttcgagcaccacaattcacataaatctatctagacatctaacatcacatagagagcctactacttcacattgcaattcatacagaaccgcgacgtgacagtaataacacacaggtaatcgacctttctccacgaccttcagctaggtcaccaacagacgacatgatgactacgaaggcatgtcaccacttcatcacacccattcattgcctatatgcgcactaattcatttctt

SEQ ID NO: 100890 - DNA, 491 bp, Zea Mays
acttttgaacctcgatccgacaagtaaatttctctgtgcacgttccgaggttcggacggtgcacggtggacacaagatttatactagttcgagcacaacgtccctacatcatcggcggtttgcgctaccggcaccactactgaatagggtaccggcgttggaggtcatgtgggaggtagcaccggtgtcgaagtaccagtcagtctgctggggcggagtcagggacacagtgctgaagacggatgcaagggactgagcgtcccaagatggagtagtcggctgagccagcatgccgtgggtagcgcttccctacaaagggccggtctgcagagtgtgctgcagaggggcgcttccctgtccttgaagagcaccatgaacgtattgctgggtctggtgggccagcagcgcctggtgaggagcgatggagacaggagcagcgtagaaagcctgctgttgctgggccgtcggaggcagcagggcctggtgctgcg

SEQ ID NO: 100891 - DNA, 834 bp, Zea Mays
atgaacatcaccatgcagactggaatcagaggtagcatcaacgtcctaggtaccaacctcgacctcatgagaaggatccttttttcctcataccagggaagagcgagagggcgattgaccaccagggggatccctaggatatggcgtagcaactctgccatggacaggacacattggggagtatatttagtaacttaccactccagggtatcagacactagatcgaccaagctactttctcctaaagctgagacactgctaggctgagcagctggtgagacaaatgatgcatcaccaccacatgtgacaactgacaaaacccccggcgagctgtgataaatagaaggtttaaagataggaaattgtgaggtattctgagtagtcgccttggggtgcaatgggggaggggttggtgaactggaaatgcaacatatcaacattggagggttcggcccagaggcgaatgaggaagactctagcaatggtggctgggccactatggttgaggattagtaacttctcaagcacatcttcaacactattgatcttaatgacccctctaacagaagtgtaatctccattccccaaacatcctagatcaatgcagcacgcattgccaacaacactgagaaccacacacattctactctgatgccagtgttcaagagggtagtccacaacagcaatttctgcaaaccactgatagtttgcaatcacacggttgtatgcttcttcgtggcgctcgaaccacacctagttggcaccaaggacaagacgacccatcgatataactcttttgcgctcagcttcagattcaaagacaatcaccgccaa

SEQ ID NO: 100892 - DNA, 674 bp, Zea Mays
aaaaggtcatttttgtttgcttttgggtttagcgttcttccttgggccttcatgtgttcgttgggtgcaccgaaggtccacccaataggtgtagccctcgagctttgagttgaattctagtaatcaactcaaaggtcttttcagcctgctctcggaagatttttgatgtactctagtggtgacgcttgtccacccctagcttggttttaacccgctccgactggacttcttgaggaataggggcctggccggctgagcctgaaccaggagaggtccagctggacagcacttgaccagggccttcaatgcttctattgattggacttttgcccgatagattcttggttgcctttagtttgactgatcttgccttttgtcgttgggtattcattgtgtatatgttgcaggtcatgccgctttagaaaatctcgaaaaattcgtatggtacacccaatgggtatctatccattgaaaagtgcccattgtcttgtcccaaaatagtaaactaatgtgactgggaggtgtaatgtcgcgtctgcgcggttgactttgatttcttctggtgccatgttatgtgaatcggcgccagcaacctgtcctctttcttagagattcgagttgctattgaagtcttgtgactgttgaccgaatgggcgggaaatgaagggtcaccc

SEQ ID NO: 100893 - DNA, 590 bp, Zea Mays
cgacaacgcccagctgctgacgaagctccagaaatctgacacgcccaagcgcctttgttagaatgtccgcaagctggtctctggtactcacatgatcaatatccacttcacccttgtcaacacaatctctgatgaaatggaaccttgtgtctatatgcttgcttctgtcatggtgaactggattcttgctcagagctatggctgatttattgtccactagaagtttgactgttggagcctggatgttcagtagttctcccagaagccggctaagccagatcccttgacatgctgcattcgcacttgcaatatactcagcctcacatgatgatagtgccaccacccgttgtttctgtgatgcccatgtcactaagcttgatcccaacagaaatacacacccactggtgctcttcctgtcgtcaacatcgccggccagatcactgtcactgtaacctacaagttcagttgagccctgtctcttgtacacacacccaaactgtatggtgcctgcaagatatctcaatatttgtttgacagcagcccaatgacttgctctaggctcttccatatacctgctaacaatgcccact

SEQ ID NO: 100894 - DNA, 444 bp, Zea Mays
tccgccccaggatccttctggaagtgctcctcccccggatcagtctggggaagaacacttcacatctcacctggcgcaccatttcttcgcttcgcatcagcctcctcctaactggtgatctttgtgttggtggctctctccttttttggttcttgttgccaaaaagggggagaatgtttcttatcttggcagtaccttctatttatgtaatgaacatcggtttgtaataattattagtctatcttgtgatgcatgcatggctctgaagccataaagttttttaatgatgtgatgagatgtgatatcattattgtaatagcagtagtaacttttcatatcatatgctatgcaataatgagcttgtatgtgtaattttactctttctaccatcacactctataattgtgtttcatccctcattgtttttgtgtatggtgttgattg

SEQ ID NO: 100895 - DNA, 968 bp, Zea Mays
agagacaaaaatattgtagaaatagtagaaaccggtacagattaaagccaaaggaataagctgacaaatgttttttgtgtagcacttctaccgtcgctgtcccatgaagatcatggggaataatgtacaaggtctggtactaacacacatggtggatggggtgaaccgagaatgacaacctatctgtcgacggacatggtggatggccgcactgacctggaattgatgcgccaaacaattcgtttttttagaaagttcatatggtaaactattggagggggtaaattaaggttggtgcttattttgttaacttgtctctggtttagcaagtaaattatacatcagagtcctggagattctctaattactaaaaactactggagaggaagataaaaatagaaccctctatttattttgttcatcgatcacttggcataatcatgcattgacttcccaaatgatttttaaggagggtcttggagacgttctgagtgtatgcacatatagagatagattcagtggaatttagctttaaactgctacgtggtgcttgcaaaaaaacaaaagaaaacaaaaatggcatgtcctggagctcgggtacatgaacttttacattcttctttgaaaaaacaaacacaacgtgaataagtgtctgatgtgaaactagacgtactctaatacatgcaggattgtacgtaggacgtggtagaagtttggtcaataatatgctactaccaacgagcagcagcaacccagattaaaggaaatacatatacgtgggtggtgcttgttcatcactttagtaaaaagggtattttcgacagttaaagccatcagacataagttattttcgacagacggtcgtaggcttatgatcgacggtacccatccctctgtcgtaaagggtcaaaaatactcttatttccgaccgtggccgttggacataagctatgtctgacggcaccttt

SEQ ID NO: 100896 - DNA, 291 bp, Zea Mays
cagctcccaagatttttaaaaaatctaaatgcataggcacaccactaccgtatctagaggtagtatgtgtaagctactgaaaacaatcgccatattatctcagttctcaatagataagaccaagtattaaacgcacatataaacaactgcatctggcagagtgctccacctacgaattttgttgcaagattactggagacgcatgaagatcaaaccttgcttccaattatcaaatcatcatgagtcgtcgaacattaacagatcagagcataccgtgtctaaataaggaag

SEQ ID NO: 100897 - DNA, 433 bp, Zea Mays
ccaatctttgccataatgtatcacacattctctcaacatgtcctcgagaatctgatttactctttctatctgaccatcagtttgaggatggtatgctgagcttctaatcactgttgttttgagtgacttttgtagctgctcctagaaacgtgctacgaacggtgcccctctgtctgacacgatagtccttgggattccatgcaagcgcactatttagtcaatatagatctctgcgtatttttcggtcctatgggtggtatgcacgagcaagaaatgagttgtcttggttatcctatccataatgacccgaatggaatcgtggtgctgggaggtgttgggcaaccccacaataaagtccatgcaaatgtcctcccatttccaagatggtatggggagaggttgtagggtacccactacctttaaatgactggcc

SEQ ID NO: 100898 - DNA, 295 bp, Zea Mays
tgcccgttcatgatgctagcgtcacacgagacttccggcagtttatgtaagctaagcttcgcagcaaatttatgaagaaatccgaccaagagaataaataaaatacaaatgaaccatgaagaaagagttgaagattggattgcacaattgttgtttgttgactaaggagggattatttaatcatttccaacctttcgatgcaactaaacaagtcctaaagattatctccaccagttaaaaacagactccgaccctacctgattcacattctgctcgttcaatgtgtacctaccct

SEQ ID NO: 100899 - DNA, 644 bp, Zea Mays
gtccaaaattttctctcacccgcttctcttcatgcttctttctgggtctacagttcaacataaagagaaacacccttaagtgagagtacttgttatagttcggtctctttttccgacgctccttttagtgctttcctttgagtttcattcctgctcgttcatccacacaagatgagtaaactgtggaacatctcatgttcatgaaaatgatctctaccaataccttccgcttcaacgtcaccatccagaattgtaatctttgaatcattgcttcatttgcttgtcacatccacccatgatcttgaacacatactcctttacctcccacaacaaattaacatggcaaatctatattttacataagaaatcagcaacctgctcattaataagaaaatcttgtaatttcattatgatgtaggaaaacctatttgtttgctgctaaattctgagacctttaaattgataaagggactttgtttgctgctaagttctgtgatttatttatttacctatttctcattatattcagtcatattaataaaatacaacgatatatttcaaattcctcttgacctaaaatgtttcgacttatactcagtttttatgcttattaattaattactaggtgagtgcccgtgcgttgc

SEQ ID NO: 100900 - DNA, 735 bp, Zea Mays
ctcgaaccgaacaagctctaatgaaagtgcaaagattgttagagttagtggaaatcgagctgggtgtaactttatttgtttgttagctagtagtagcaggtagattaattaatcagggaaccttccgattcgaacacgactaactgacgaactgcctgcctgcctagggtctcagctagattcttgttgctggaattatatatttatttacgcctagatgtttgcccattattctaccgaccgtacacagctcactaaaaaccaaacttgtcattgtacgacgaccatcacattgatatgatgatgcatgcaattaaacgacaccatcatgtttagcaaaacctcttatgtatcttcatacaaatcaagcccaaattaaaccaatgtgatgataagtaagaacacgaagatcattccagaagagatattttagaagctaaggtaccacatgagaacacgatgattgtgaagataagggctggtcacagccgtcgttgagccttcttagaattccaccagggttgcgtggagttgtcctcgcggacgatcccttcgtagaattcgctcaaagctgcttgatgcccgcatcgtcggaaagaagtttcttgcaagtggagaaaccatgatattgacgatatatatatgatcaagcacacgcaggtaatttctctgaactagctatctttcaggcccagttttaaaactttcaaaaaaaatcaatggaaacagttgctc

SEQ ID NO: 100901 - DNA, 563 bp, Zea Mays
gcaatgttctccactgcatgtaggttctttcgggtgggttgttggggctctggtgcgtgatttgcacgagcaccggcgaggttccgccgcgggagctcgcgccaccgttcccggtcggccggattgtgaggagaaccctcggtgctgtccgatcctctttggatggctaggattagaagatgtgtagccgttcgattaattagatcgagtccgttgatcgggtaacggatggacgagagcagatcaacgcatggaggattcacggccgcggatctgtgatccaatggaacacattgcataccggttcagtagagaatggagtctaatcatggtcatccactttagatcgtgcggccaggattaaaggataccccttcggccgctcgttttgtaaaagagtccccgtgaaacagagaaacaaacccgcagtccatgactgctgttctctgtgtctagaaatattcaccccaaggcccctgtagttctctggttattgaggcccagtccagaacattataaaaccagagaaaataatttataaatggatttttaatagataaata

SEQ ID NO: 100902 - DNA, 430 bp, Zea Mays
ccagccttcacttgagctcgtacctcattgcagactatgcgatgatggctctccagtgcgggcgtaacaccatggggtcgctgggtacctacgcttgggaccttcgcttcacgattggaggtaatcctggatcatgtacttctccgctacgagtagggcaatctagatcgatggttgggggcgggggtcgcagagtcaggggaacgacgatggcgccgccgtgttgacagccaggggaggaagaagatggtcctgtagccgttagatgggggtggacggctgagattagaagctggatacctcttcgtcgtattaaatccatgccgcagaactttgatcgggcggataggattaagacaaacacgtggacttattacgtccgtggatctctgatcctgcggccatcattgaataccgattcacttaattg

SEQ ID NO: 100903 - DNA, 559 bp, Zea Mays
gagttcctcgccgttggtggcggtggcggtcgtcattgttctgttcctggtgatggcaagggtgcagggtattcggctggatgcagagagccatgaggcattcagcaaccagatggttcgtgtaagtaatcgtcattcgcgtgcgcattttgtactacacacagtgcattgactctttccgcagttcattaactgtagtgcgttcttgattatttcagaaacccggggagatgggagcgacgtacgctgacagtgagtcgcctggtgaaaaaatggagggaagcatctctgaagagaaagatagagctggccacggtttgccggagattcatgtggattactacggtccaaggggtcataaatctagacaccactgagcagataaaataagatcatctgttctttttccccctatcttcagatgcacccccttaaactagtgagcgcatcacttgaggctgcctactctagcagatagtaatacttaggatgtaattcatttattgtttcccctttgaagagggggaagaaacaccactgatgtactaattcttgaagg

SEQ ID NO: 100904 - DNA, 462 bp, Zea Mays
gctgaacgcgcccgcgtgtctgttttgcgaataggtccttgttgatttgaataacttgaaacagagtcgcggtactattcctacgtttcactgacagttacaaaaacacccctctaattctaattcttaacaacgtcaggtccacgacgtggagcggtggagcagtagctccgacgagctcgctctggccagaatacgccacgaccagtgctctaaattggtttactcctaattcaacaccgaagaagtgcttcccctcgatcaattgcactagcggagccctaaatcgctctgtccacggaggtagtgcaaaccatgggtgagcacgggtgttcccgacaatctagcacgttctagtttaattgaatgggtcaaggaacatcagtggtatgtaagagtgctgaaacaagagagtagagggcaagaccggacctgaattgcactgaccacggtgagagcttg

SEQ ID NO: 100905 - DNA, 586 bp, Zea Mays
cttgccaccatcgtcgcgacagagagcaccatcgcccgggtccgcgcagccccgttgcctcgatcgtgggggagtgtgggagtactcgccaacacctgcaccaacgtgtcgtggttcaatcctttaggaaggagtagtgacacactcggtttcttcatcagagaaggccgccactgcggaacctcatctacggtaccgaccaaacactaggagtaggccagggaggttcaccttcctaggtggaacgtgtgtcggccaacgtgcacgagtggtcgtggttcgcgggtaattcgtcactggatttcagaactcgtcgtgaacccgctgctttcgtgaacaggaaccctcgtgcttcgattctcggtaaaattcactcccataagttctctttctgcttgctacgtgtagcacctatcggattggaattcgagcgcgagattgtggattttggttgggtatcgatggcgctcaactgcggaatggtgaccgggtgtcgtcgctatccgtcggcgggggtgttggagaagggggtgtcgtggaccatcggaccgtcattgggggtggattgaatcaatagatacccctt

SEQ ID NO: 100906 - DNA, 1036 bp, Zea Mays
tctatagctaggatgttcacagatcaaagtaacaggagtagtaatgtgagaaacaagggaccttagcattagcatgatgacttcgtggtcggtccacttggtgctcccgtagttccagatttgattcaccaaggacttgaaccggttgtacattctttgtggcccttctcctttattgacggtaaacctttcttgtgattcgggtgatcttgtcactgtcttgcgtagtcttaaggatgtcccaaatctctttggcgctttgcaacccgtgaaccttgttgtattattccctacacaaacaggcaagtaatattgtggtttcttgcgatctgaagtgggtgatttggacggtctcatccaaatcgtagtcctcatcctcgatcttcgaaagctatattccaaactcaacaatgtcccaaattctaaggtagagtgaagataagtgacttctcatttcaacactccaccatgaataataatcaccatcaaattatggtggtttgactaatggatttgaaaataattaagtgcatttataaatgcaaggataatggaaggggatttggttaaccagtttgcgctcttggtgttttgaggaagtcgattcggcgtcggatgttgaaggcgatgaagagtcgatatcatagtacaccaccttcttcatcttcttattcttgacgctttcttcttgtgcgtcttggaggagccttgagtttctgatttcttctccttgtgcttctcccccgaaggcgctttgatttctttcgacgataacttgtctttgggcttggttgatgaagatttgatctttcctctaaagttattttctcttcgggcttctctcccgagggtgccttcccgttcttggtgacttttcccccatgtcactttgagttggtagactctaatgaagtgtcgggttccgataccaattgaaagttgccttgtgggggtgaataggtgaaacccaaaaattataacttcaagcacagcttctaaccctggattatcatcagaacaagaataagaataatta

SEQ ID NO: 100907 - DNA, 493 bp, Zea Mays
agcaattcacaatgctccgatgatccctgcgcccgctcgctagcacaaacacggtccaagagtgtctgcaacctcgatcgaaccctggtcaagcctttggcgatggcgcatccgaaggttgatggtggcgacgcttcctccctctctggacacaccctcacgacggcggttggtttacaggggcgatagggagagggattcctaggtctacggttttatagccctaggaagtcgatcacatatcggtcaacaacaaccaagccgacagccaacatcgatgtccgtgccacgagcgcggtggttacgagcggaggagagctcgtgcagtcctaggtctacatgcagtggaaggaggagcagagttagggcgcgatctcagttgtcagtgacggcatgcgcgcatggaggtgaagcagaggtagaggaaatgacggctgggccccgctggtcggcgaaagtgcaggagcatggtgaggggctgacgacatttggc

SEQ ID NO: 100908 - DNA, 639 bp, Zea Mays
gccttttcttcaattttggccggctctatctcagcgggctctaaaagcccagctttggtttcagtttgaattattgtagcttcgacttctgcctgtttcgtttcatcttcgggttgcgccttagaagcttcgacattttttctggcaggagcaggattcaaggtttttgctgtttctaatacaacatctagcacatttgccatactcctcttaggagttgtgccagaactcttttgtgtcttcggcattgttgcttctgttgaagggcttacaatctctaacatctttgttacttcttcagtttttgacctttcagccttatctttgtcaaccttcatttcaactagctcaaccgaaggtgccttcggcattatagccggctcttcagtcctctgcacgggagaaatagtttatcttgtttcagcagctgaagaggcctccccgccaaactcaggcaccacagccggttcaatgtaacgtggccggtgggtaagaaccttcatctttttgcccccagccttcagcacaggctcagctggggcgaccaaagcagcagcttttctcttcttcccctgtccccgcagcggatagctgtagtcggggtagacgaagccgatggcgtcaaaaactctattcatt

SEQ ID NO: 100909 - DNA, 418 bp, Zea Mays
gtagcttttgacatatggggttatttgtctgcaacctgactgtaccagcggattgccggattctaaggaactgttcagagagaaaattgcgggaactggtactggtgctcaatttgtactagtacataagatactgatagccatagtgttgctacttttattgttggaacggtatgtcatgccgacattgggaaactactaacaaagtgtaaatatgaaaatgccgttctaggagtactgtagtaattgttctttcgaagagggcagcaagattgtttaggtgatcttggacaaactgtaggagtactgaacgagcccaagaacatgcacaacccgttctggtccttcccaacaataagtttcctttggtaagttgatgtttctagaaaaggataaatgcctcattgtccagaatagc

SEQ ID NO: 100910 - DNA, 863 bp, Zea Mays
ggacgttgcagttagattgaaaggcgagaaaccatctgttgctaaaccgaagcagacattctgcacttcatcagcaaagctggaatcaaaagcatctagtgccttccatgcatctgtatcagctgggtgtgccatgacatttggattctcacgtaccccttctttgtgccatctcatgtgtctggctgtatttttggagatgaacaaacgtttcaaccgaggtataagaggcatgtaatgaagctgcttacgtgcaatcttcgtcgtcacggtcaaaccatcgtcgttttcaacctcaacgaatctacgctccccacatacagtacacttcttctcactcgcggtttccttccagaaaagcatgcagttattatcacagacatcaattttttcatagtccataccgagcctagagagcaactttttggactgatacatgtcctttggcatcttgtgattctctggaagtacatcactgattaagttcaaaagctccttgtagcagttgtttgagaatgcaaacttagacttaatagccataagtcgagtcacaaatacaaggacggtcactttcgtgtgctcatgcaacggctctttgacagctttaaggagctcgaaaaacttctgaacctcaggtgtagctggatcctcataatcggtgggttgaccagggttctccgaattgacggttagaatctcatggcgtacatcgtcaagcatctcttccatcctatcgtagtccccctcttcatgtgactgaaattcctatacaatacgaggaggtgggccctcaccgtggtgcacctagacctcatagcctggcacataaccgttcttgcaaatatgtatcgacatagtccttc

SEQ ID NO: 100911 - DNA, 385 bp, Zea Mays
gcggggagcccttgaaaacggaggtgaaatcgatgtacgacaaggagcaccccagcatagaatccgtttccaactgtaatatatgagacacgatatttccaatttccttccagcaggctaaaatctggtcatatataagagcatcaatcatcatgtatgcccatcagctttcccgttcttgccaaccatgtctcatgttagattacgacacagaaaaccccatgcttcagagctgttagcttggataaaggtgtcgtcaccattaatcttcaggtcactattaatcttcattcttcagcaaatctgacggaggaggtgcccacatacgcctacctatcatcaaatttctagctgatgcaggattttttgctttctgtgtacttca

SEQ ID NO: 100912 - DNA, 489 bp, Zea Mays
gttggatgctggaatacctaacagagctgagggggtgctcaagttataggattcttgataggtggctcgtgaatttgaaggagacgtgcggcgactggagagggggaagagtactggcgcaagcgattggtggcatttaccgtggcgggctcaccggcgatgaccggacgtgctagagcaagtcactacaacgaagtatagcgtctaggcacatgtcatccgagcggcaaacggctaactccggtgaacttgtccacaacggctgtgacccaggcgggtacaacgaccggagtagaatagtggccggagttcatccacggcgcgatatttccttactcctctgcattatctaactgcgccgagcacgaatcaccgcggcgggcgcgaattcaggcacatggtcgcttgcggtgagttctctgcgctggcgttctgatccggtcactgtaccattgaaactcgattcagagcgcctgaccgaccgacttg

SEQ ID NO: 100913 - DNA, 325 bp, Zea Mays
aaaatggtaagcataagcaattaaagatactacgctctaggaagaataattgaatgtgttgaatatgtgtaccttttattcctaggcttctacacttatccaagatagcaatgcatgagagtttgctgatcttggttgaatggagagtattcaacggaggtatttgatctcagtttgaagcttgctcttttatgcattagccacaagaagcaacggctatcaatggaagcaagttgtgtcaagacttgataagctgccgggatagtgagtgaactcaatccaagtgggtgggatagtgaatgaactcaatcctctaacgtccatg

SEQ ID NO: 100914 - DNA, 636 bp, Zea Mays
cacctttctatgcctacagatcataggccatctcctatgctttcaagagcatgttgttactggctcgtttggcccccaaggtcctgtcacttaaaacctgatcgaaccagggcgtgttgggtcttgtagagggttgtttggagccttcttgtgaggaggcatctctaaggaagccatatgggtgattggccataaagttccttccctatcctcatgtcttattcgagggtgcctgaccgccttacgcatgtgataaggcccatcatggcctttcttcaatgtggttggtctttgttatcctctgaacagttaggtgattggacatagatgtcttcagcatcctgcatattgtacctatctcattcgatgcacacttaatcgagcatgtgcgccaaacggtcagtgagcataaatgtgttagcgctgcatagaatccatgggacctctagatcacggtgctagagtcttattgagttagtatgatctagactagtttagctcagagcgactcgagttagggttggtctggtctatgtgaccaggttgattcttgctttggcctaagattggaggctggcctagtttgaataactaggtaggggtcgactagggtgattgaggtccaacccgacatgg

SEQ ID NO: 100915 - DNA, 478 bp, Zea Mays
attgaatgcatacggcgcacccagtctgcaatgtatggtatacactgttacacacatgttaccaagacgagcattgactcaatgcgtcgtttgggcgcccttcattatgacctctactgttcctcatgcgttatggaggcatgaagagacatgcgaaggagataggacgacaccatccatacatccctacgcacgacattgtaccagactacaccacaacctacactaaggcatgcgtggttgcgcctgtgttctgattagacagggcaagaggatagcattctaagagcccgcatagcaaccaagaggagatacgagaccagaagatctagcatcgctagctctacccaacacctcacactttgtattatagtaactcctaggcccacttgtcggggcccaactcccttgtagtgtgcccccttgcacaataaaaaggagggcacttgcgatacagagggggtagattcacactcag

SEQ ID NO: 100916 - DNA, 399 bp, Zea Mays
acaaggtctagatgatcgaaagatatgattggtggtgttgagacttcatgactcacaacaattgcctttggttggtggatgacttgtgtggtgaatccaacatcatgatcagaagatacttggtgaagaggagcttacctctatgtatctccaacattaatagggattactatttggcaataaccatactgcaggatatatcatcactatgagtttgtcgtctatatctttagctctatacttatcatgtttattgcttccacttgagctttagttgtgtcgcttctaccttcctagattaggtgtagggaagttgataggattgtcttaaagttgcaaaactcttaggttaagggtaagttagggcatattaaaaacacctcaagtgcacatcttgct

SEQ ID NO: 100917 - DNA, 329 bp, Zea Mays
caactaccgcatccaggggagctctccatcgccgcgaagccttcgaccaccatggactgacctattcgtcttgtcaattgccggtgagaacatctcctccagttccaccatggtctagtagtgtgatagcacgggttcaattagtgaatgggagcgagaattgcagaaccgggcaacgctggcgatggcaccgccgcttggcaaccctgtgcgccgccgtggtccgatcggagttggggaaaggtttatggctgttggataatcaccaggtgtgctgggactcaatgggccacttcacagaaggactcaatgggccactacagtacgca

SEQ ID NO: 100918 - DNA, 477 bp, Zea Mays
caccctcgggggctgggccgcggcttacgtttcccacccgagccgaatcatccccggcaacaccctcgggggctgggtaagtgtcaacaccatccttgaggcccaagttctctgcgatagccgcctctaaggctgaaggtccctcagttacttccatgggagcaagacgatccaagtcagtttcctgaccctcaagaccgcgctccaaggtcgatgaggcgcgggacgctgcccgggatgaccccaacccggcgtcgaacacatcagcacaaacatccatcgcgtcaccatccgctggctctgataacagatcctctggaaccatatcttcaagagtctgatcaaagttcgctagagacaattcttgtagaccaatgagagcagacagagcaggagaaggaactccactactttccccactggctacatattgccgactattcttccgagtcaaagggacctcatcttcttcctccc

SEQ ID NO: 100919 - DNA, 583 bp, Zea Mays
ttttcctacaagcttttcattcttgtcaaatactttctttctgagtgcttccagtatcattccgttggctctttctacttggccattggctcttaggtgtgccactgatgcgtacttaatctggatgctccgttgctcacagaaattgaagaattcagaactagtgaagttggatcccaggtcagtgatgatgttgtttggtatcccaaacctgaatattatgtcttgtataaactccaccgctttagatgaggtcaaggaagcgattggcttgtactctatccattttgtgaatttgtcaatggcaactactacatgagtatagcctccctgagctttcttgaaatgtccaatcatgtctagcccccagcatgcaaatggccatgttatgggaatggtctgcagctgctgcgcgggtaagtgttgttgctttgataggaattggcatgcctcacacttttggactagatcggcagcatcgctcttcgaagtgggccaatagaaaccggatttgtaagcttttccgaccagagtccttgatgctacgtgtactccacactgcccggcatggaaatcatctaac

SEQ ID NO: 100920 - DNA, 502 bp, Zea Mays
gtagcttacaagtcgaacatcacatatgattccaagagagcattttaacttacaagttgaagataaatttaatttacaacatattgcccaaccagataaataaggtttagagttcaagtcgagtaatatcgtaccacccataattctaggtggcatacaagttcttgcaacaccatgaatacacacaatctaattgaggtacaactttgtgtattgcttagtagcataagtggtcctaatcgggagaaagtgagccaacttggtcaagcaatcaatgatcacccaaattgaatcatacccatgagacgtctttggcaagctgatgatgaagtacattctaatatcttcctagttcttccatgatggaaccggcagaggttgaagggtactacatattgtataatctctcacatcataagggtcaactaaaatctttgcttgatatcatggtatatcgttgtgcttcttggatgagtggataattaagagttatgagcttcat

SEQ ID NO: 100921 - DNA, 306 bp, Zea Mays
gtgagtataaacgaactatgttctggatactcagttttttctgacctctttgacagagctttattattggaaaaaatttagatctagtatttattatagagtaccactactgtggatctacctaccatggaattatttcgttaactcaacagtttcggggacgttcgctttagattaaagctgtatgctgtatgtttggattgctgtagttgcaatctgtagagacaaaaacagtgtagaaacagtagaagtcgatatgaattaaagccaagtgaaatgaaaatgatccttactaatacatgcgca

SEQ ID NO: 100922 - DNA, 366 bp, Zea Mays
aagcaatgggtttgtactctatccatttagtgaatttgtcgatggcaaccaatacgtgagtataacctccctgagctttcttgaagggtctaatcatgtccaatccccagcatgcaaatggccatgtcactggtatggtttgcagctgctgtgctggtaaatgctgctgctttgataggaattggcaggcttcacatttctgaactaactcggctgcatcaccctttgctatcggccaatagaaaccggacctgaagaccttcccaaccagtgttctagacgctgcatatcccgcactgtccggcatggatttcatctaacagttgtttcccagtgactgaaggtatgcacttcataaggattcct

SEQ ID NO: 100923 - DNA, 790 bp, Zea Mays
aatccggatgcgtccaaacaaataggagatagagatggccagggcgggatagctttgagccgattcaccgtcttgcggattaggccgggggagggacaagaatatctcacttgcgtgcaccgtggcttgtgtgctcctctcgcggtgtcacctgcgcccaaattctaccacactatgcttccttgttatgtggtctccatgcactagcatcgtaccttagtgattgcgggtagccagccttgtcaccatccctttaaattgagccatgaaccaccatggggcattcactgtcttccggtgtggtcagtagaagccaaaattcacggtgtcctcacttccttgccccaaattggtagtgcacggtgaacttgttgtcccttatggttgtatagctccagcgtgactgcctatttacgacggagttcaccacgacgtccatcgctcccgtcggaccctgcaatgcgtgctcacctccgcgtccccgtggccaggcaaaatcaatatggttcagcgcctttgatttaatgtttgagtgtccctaggtgttggtgaagctcaccgaagtggtcgtttggtcattactggcatagcttggttggaacgcgagctcgatgtcgcgtgctaacccataatcggcgcatgtgacgaccagccagaattctgttggtccgacactggttctcgtgagcgccatgtcttgcgtaacccactggtgctctcagttcccttaatttggactttctagggcaaatgtcgtgtgaacgagtgtcgcggatccaacaccccgtcg

SEQ ID NO: 100924 - DNA, 482 bp, Zea Mays
taggattagaccacgacattgatgttgcgcgtgccgttgatcttgttgattacggctacgatgagattacgcagtaccgattcgatggggccatttgaaccgtagatcacgaattgggtggctcagatcggatctcgtgctccaacccgtggatctcggatcggacggcctggattaactcgcgagattggtgggcgccagatttaatctgtgccgttcggatcggatccatcggcccagaaaccgcgataccgcttcaccgtgcacaatttgctaaagagaccttatgttttactagaattgaacccgcggtccacctgcgagtagtactgtgtctgcgtgcattttatgctttagcccctgagtttttcagatttcatgcgcgcagacctgaggtagtaaaagtcatttcagaatttatttttaaggtaaaaacaattattaaaacttgtataatccctagaaaattcatatgaagtcca

SEQ ID NO: 100925 - DNA, 421 bp, Zea Mays
actttacacgacgtcccttagaccctaggtgctcatcaatctcagaagtgttgccaagtcagtgaacccctctggtgcactacctcgtcacatatgggtgctggcaactgtctgtgaaccaaacaccttgctgttcctctctttccacatggtccaggacaccagtaggatgagtgagtcgaagtccttgcacaggtcacttggcagcagagcacaagcctgtatccaccactccgccactgatggtgcacttaattcaagcaaaccctgaaggccgataggacagcaatctaaaccagacctccgtggtgaccacacactcctgaagaagatcaagagtcccattggttgatgatgttttaaacagctctctcctagtcactatactttcctgtttgatttatgaccatatatatctgtc

SEQ ID NO: 100926 - DNA, 1138 bp, Zea Mays
acaatacaaagcatctatggatctcctatcaaataagaaaatagagagtaaaacctacttgttagagatatgactggttggtgcagcacttcctccttatttatagaggggcttttcacattcctaaactacccctagatacatagatcttatccaatcaacctgggacaaaatgagccaactcataatatgatgatctgatggccacactccctttacaaagttggtttgccttgacacactctccatgatggctctacatgtcgtcttcgattccctctagaatctcaatatcaggttttgaggccaaatccgtgaacttttgctagacgattttgaggctcaaccaccaaacttttgtaggtagcacactccatacgcgtcccccacgtcctggacatgtatcccgctagtcctcagacacattggcaacatgattcgcacgacatgtcctcgcacatgctgatgtacctaggtgttatccattgctgccagtcacccaacttcttcagtctctcagtaaagacctagtgctcatccttcaccgatcttgatccataaacacaaacccatatgacctttcaccttcaccattgacactagctctaggcttcacacctatgcatcagaagctaagagacatgttgcacacacactcatgtcctagttagttcacacgactcaaccaagaagttactctgttgacaatcactcatcacaaactcaagcatctcaaccttggggttgcaatctatcacttaatgtgtgcattgtcaacaccactgcacaaacacaaagatcaacaaaaaaggaagaaggaagagctcactcaaatgaccaaaggccggacaaaagaaccaaagacattaaaaatgagcaaagcttgtttccttaagacattagcaacgactcaacacaaccaaacaaaaatggctagccctcaagaagaggtagaaaaaggcttaacaccactatacaatgataagagcaaaagatgaaaagcaccaaaaactctaaaagcaaaaacaatccctctagaacgaggcaaaggctcaacatgaatagcaaaagcatccatctcctcctaacaaaaacatctcctcctgaactccccctgaagaagtgcacaaaacttcac

SEQ ID NO: 100927 - DNA, 719 bp, Zea Mays
gaaagtattttgatgtacatcataatgctgaatcttattttgattagtctaaagtaaaatattgctaattcacaacttatgcaggcaacattttatattacacacaaaaagggtaaaaagtatcagttccttgcacattttagcacataagactatacaccaaagaggcaaagttgatcaatctggataccaaaatgcttccaagttctgacagaaacttattagaggaggcaactctcaggacaaaacatagtagatgaagtaaattcatcaaaaaggattgcatctccaatttagcccatcaatttttttccataccacagaaactgcactgacacaaacctagcaaaatacagttcgcattacattacttcaacattacaccaaactgcatagcatttaactgttatgcgtcaattgaagtaacctcataggtgcattcattggggggcaagcttcggcatcatactgtcgtcgcaaatgaggcatgagactcatctatccccaaagacgcgacgaagaggacgtacacgccagtcgagatttgcctgcagggctaatcgaacaggagctaagggagcagggccagcggtaactcgaacgatgaagaggaggtggatcaagaggtgacaggaatgcctcacggggccttgccaggaggtgaaggagctcgacgtgtcccgcaccacctcgcacaggagctccagcgcctcctccgt

SEQ ID NO: 100928 - DNA, 403 bp, Zea Mays
cccttgtttctgagccagaaagctgtagtcaggatatacaaaaccaataacatcaaatactctattcagccttttccttctacgggcaccaaaggcaatattcatggcttcatcttcagctttcgtataagcccccagcaaatcgtcactagtcgcctcaatggcctcaagccattcatcatctggctcaccgaactgacttatgtagcagtatgtatacttcaagtaaactagaccaccttcgcttgaactattagtggtttccttcggcatttcccaatcattaacaaggggccacactttgaaggctatctgctcctggatcaagtctctggtaccaatctagctgcacacagtgttgaaggccactaggcatgcttgagccttatcactgttcacgatc

SEQ ID NO: 100929 - DNA, 302 bp, Zea Mays
tagatgtgcaacaagacatgatagtaaccctagagtgcgtagtacgtatattgtccagacacaatgcaaagcagggataaagcttaggaaaatttatgacgacgagaaaaagacaataatagctgtgcggattgagcgaataaatctggaacataatcatgagttcattacacaagagacagagaaacaacaccttcattgcaacaagagctgtgatcctgaattcatggactttgtgggtgcaatgcatgacagtagagtaccatagcactgcatagttgacatgatttcagatatgcatg

SEQ ID NO: 100930 - DNA, 418 bp, Zea Mays
gttctgtctaaggcctcaaagcaatgtcgatgcgtcattggcacttcgtcccatacaatcaatgaggatacctgtatgagttcagcaagcatggtccctcgcctaatagtacacatggctgtttcgttcatgtcgaaaggtatcttgaaacgtgaatgtgcggttcgtcctttaggcattagcaaagaagcaacacctgaggaatcaatgacaagtactatctttccttttgatccgatgttcacaggttttccctgtgccgccatggccagagacaaagaaaaatctgggtaaggaagatagaactctaacgataatggtatcatagacatgtctctgatcggtatttagttgggacagaagagactgggcttgcatggacaacaccaacggttcaacgtcaagttcatcgttaagc

SEQ ID NO: 100931 - DNA, 558 bp, Zea Mays
gtttagtgtttgttattcttgctgatcagcattacctagatggctagatggtgactgggagtgcggtgatcactcgaagagtttgtgggtgtcccgactaggccttgtacacgattgtgaacggttcatcgtaccgaagcggtgaagaactagctcgtagagaatacttggtctttgcttttataaagtggagtaatacccttgcgcgggtgctccaacgagaattagtgagaaatgctgactctccaacagtttgccaaaaatatcgaggattctaactcttactttattactatacataagcaatttacttttaagtgtttactttcttagaaattgctacgctagcatatggttggaccctgggatgcacatatattaggcattcggacgaagttggagttgcagttagaatttgattcatagaaaaattagagaaattcttcaagtaatatcaaccaatgtgagtcaacctgataaagtcccaaattaatctgggcagatgaataactgaagcttgaagcctccaatgacaatgagactggcatggtagataat

SEQ ID NO: 100932 - DNA, 376 bp, Zea Mays
tcatctttttgctcttcagcgcaggatcaatttggatgtccgaaacagcaaccttcctctttttctcctgtccccgcggtgggtagcggtagtcggggtacataaagccaatagcgtcaaagactctgttcagtcttttcttcccccgacctccgaaggctgcggacagggcattatattccaagtagctcgtcgctgatagcctcgatactttttagccaatcatcatttggctcatcaaaccggtctctgaacctgaaagtatattttaattgaactagcccaccttcagttgtttcagcagtagtttccttcggcatatcccagttttccacaagcggccataccctgaaggctatatgttcttgcattaaat

SEQ ID NO: 100933 - DNA, 488 bp, Zea Mays
gcctgatccaaaagtttttgagtccaaactattttcttaaaaaaaatcttgctctcatcccttcatttcaaaaatgctttcccctttccttctctcagaagtcagatggaggctcgctgccaaaccagcttgtgccagaatgaagatggtttccccaagttactgagagcatgcacagttcgcctcggaatcaggagtcagccagagtatgatggtcgtgaattcgtcgagcatggcacagagaagtgtgtcgtgactgtatacattggatccagtccgcaccatgtggaatggagtgtcactgctgctgggcacagattcaaagacacctgccaagtcgtcgcccgcaaggcattgagtgccctgtgtcagatttatgaagaagaagtggccgacacactgctcagattctttccgccctttcagagagaccgtccagtttggatggccaggatgcgtgcattggaagggaagcagctgtttgagga

SEQ ID NO: 100934 - DNA, 320 bp, Zea Mays
agaaaaaggagctcgtgagtcgtgaataccgtataaaaatatcctgaataatgaaaatggatgtcatgcggtccaggcctgtagccccgactggacggagacgagctggcaaatgttaagcgccgtccatctgcacctactaggctttgtcagtgagtcatggagacgagatgagtacgtctggccacatgcatgcgaattgcgaggacattagtatttggcttttgtcagagtgagtgctcttggaccgcatggtcacacgactcgtgtctcctagccgtttagtggccctgctgccctagatggacagccaaataata

SEQ ID NO: 100935 - DNA, 728 bp, Zea Mays
cgaaagaattcccccaagacgacgacgcaggcgacaggggaggcagcggatggatctatttgatctcgcatcgagcgcaatcttcttcaagtccactccttcgtcatgtagtccttataagctaggtgtagacttaagttggaatggtagtccgattgtcgttgaataaagtgtgtcttgttttagttactattatggattcatggatgtcatttgtatggagccatatttgtatggacactactttgcctagcttttcaacatgttggttacagtacgcttctatgaataaatgcaatactttaactatatttgctattgtacacaatatcatgaaattgctaaaccttttgtcttgcaacaattttgggtgttgttgactagttatgtttacttctctcctatagaatgggtgatggcaacattgactcccaacatggtaccaacctttgagaaatactggaggtccctcatccttgcctaactatctttggccccctatctactagaatgcaagtccatcaaactcaaataggatgcttactccacaaatgttatggaatacatattctgtgttgcttacacccaattttcccccacctccatccatggtgcccccaccaaacatccctgcatacataggttccataggattgacccccacacatactgcaccattagagcagcttgtttgtgagtctaaaaccccaaatagagtccaagaaatc

SEQ ID NO: 100936 - DNA, 735 bp, Zea Mays
cttcggaggaagatttaatccaagaaacattagaacaatccacagcccaagccaaagtgaagaaaagaacagccatacccaagggcagcagagtcactcctaatcaatagggacacaacagagctccttcagaccaccacccccaagaagaggaaggggaggaggaaggggaggaagaagcttcagatggagatacaacactcagccaaaaggctatttttcctattttgtggagaagataaggggcatacaacaagaacctgctaggttacaatccaaaaacagaaagaaattactgaagctgaggcaaggcagaatcattcgaagcaggtccttcatacttcttcatactactctccgtacattccagagtatgtacgcaatcaacagccaatccaacatccttcagctttagttgcttcagcaaaccattctctggctagatgggccctgcctcaaccacccgcatcagctccaacttcgtcatataatcagtagcatcaagggcaattttaggaccagccacgacgtgatgaaagggaacagtctaaagctcgaacagtcaacagcattgtcccataatccaagcatatctactgaagcggctgaggagctggatcaagaacacaaagttacctacaaaaacctacatttgcccaaagatactttacgaaggtatatccttcgacatcttgtaataaatctgaggttacaccatcgagtgtaacaaaagtg

SEQ ID NO: 100937 - DNA, 585 bp, Zea Mays
aacccggacctgaaagctttccctaccagagtctgtgacgctgcatgcacgccacattgcccagcatggatctcgtccaacagccgctttccagtagtcgagtgaatacacttcatgaggactcctcctgcacctcttatatatagtaagcccccaataatggtgtagtgggccgactgtctcgcgatgcgctccgccgcagccttgtcatctggttcttccttgtttcttatgtatctgatgattggctccctccactcattgggatctgcttctgcctgactcagaacgcgacatttgtccacctgatctgtggtgacactcggttgatgtatttctcggacaaaaaccccaggtggaacttgggcccgactagaccccaatttctgtgcatctgccgctgcgttgtgatctcgttccatgtggtggaattctaatcccttgaatttgtcctctagcttccataccgctgcgcaatatctgttcattgagtcggttgagaaatcccagtctttgttcacatggcttattaccaccaatgagtcgtcgtacaccattaatcccttgatgccgagtgaaacggcg

SEQ ID NO: 100938 - DNA, 358 bp, Zea Mays
caagattgcacaaattccatcacttgttgtttcatgccaggccatgcaaatgtcgttttaagtcttcggtatgtaacagggacaccagagtggccccctaaggcactgttgtgcattgctgtcataacattctgttgcaaaatgggattagcgcccaaccaaatacggcccttatgtctgttgactccatttgtgagagtgtacggaccagtactagttctagttgcaagcttctgtagaatctgttgagcattaggatcttgctcgtagccttgcactacctgtagtaaccaattcggaactacggtggaaactgccactacattcagctgaagatgtgcctcatcttgttccaatc

SEQ ID NO: 100939 - DNA, 432 bp, Zea Mays
ggaggcccagatattcagagctgtatgggatggatagagatccagtacctaggaaaatcaaggcgagatcaacgtcgagaggtttaatccccccaacgccatcagatgtgatgtgatgcgatccgtcccgcgccagcgccagagccatcatgtgatgtgttcccatgtgcatgtactcccggccggcccacgcgagtgtgtcgtaacggcgtcagaatcagagaccgggactattcgcccgacaagagattgcttcggctgtgagaatcgtttctacgagaatcacagacaaatcgtttctacgaaaaaatcgcagcaaaatcaacgtggacgtagaatccgtcaagtcgtctgtcgttttctaaaccttaaaccctaaaccgtgtgcagactgatcattcatcttcctccacacacgtaaatatcatggtg

SEQ ID NO: 100940 - DNA, 549 bp, Zea Mays
cttgacctgggtggtctgcgcgtagattcgcgcggagtttgacggtctggcgaaacatgttggacggtccatgacgtatctagacggttcggtgttagggaccggacagtccacgaccgggacgaatgatccggaggtacacctagatggtccgattgtgtatggcgctacctgagtgatctacgtgtgggcttttatagggtgggactgtccgagatgactcacagacggtccgattgtgtcgaaaactggtcgtgtgcctggcggcggcggctgtgatggtgacacgaatgtgtgcatcagcgtaccatacgatggctgggccaaaggagacccatttatagccgagtgtttggtacgaatggttccgtattggattcacgcgagggaaactaagggcggtaggtttcttatatgaaagcgcccatcttttaatagattcgtctacgtattctttcatagttcccctcgttgttccatgaaatcctcaaaagatggatctggggtacatacaatgggaaccaaaaggcggaggtaggagagacgtcg

SEQ ID NO: 100941 - DNA, 2911 bp, Zea Mays
cgcgggtgccccgaggcggccaggggcgtggcaaggggaaggctgccaagaggaaggcggagaaagacaagggaaagctagtgctcgctgccagtgttaagaccaacaagaagaaaaaggtcccgactgggatcgatgccagaccaaaggtatagcgcattgcatcgaccatcgacttgctttccatttctgatatcacgattttgtcggcgcagtagaatgtttgtattctcaggcaggtacaggtctgccggagcttgtatgctacaaacaagtggatcttattgttcagctgaccaatgaccatacgcacagattgctaactccttgagagttcctaaatttgtgctcatccattattcgtattcctgcttttgggtaattgctaaccagccaaaaagctttaggtgtgctttgccttcatcattagatacaaggtgtatcagatggcataaatattgccagcgtataattcggatgcatagcaatcagttgtaactaaaacttacttattgactgcttccatattatttgttgtgaatgactaaggtgtgagaaaaaattcccaccaccttctagctgttgttaatgttttggttacttgtcacgttttcccttgagttttcatctgtggtgtctactggcctcatgtgtctaatgccccttattgttcttgatcttcatgttgtttgagttagatacttagattgttttattcaatgtcactttcttagtagtttctattactatgtgatattcatgcctgctcaattgttatagggacacttgcttttgcaaagtgctgaactgctggctaaaatatcatttttgttgtttgttttgttatggaggtatgccatagtttggttgactgagtgtgaatacttaccatgtacaaaatacttgcaacgttcccaagtaatgcggtatatagtatatactgtatagaatggtgaaagtaatagaagtctctcacctcccactttgttgataggttcaaataataccttcaaatacaacttgtagcagaaatacctcaagagatgtgatacatttgtgttttttttctcatttcaggagaaaaacagtggggtaaaggtgaactcagttagcatttctaagtcatttcagcatcctataaaaaatagggaacccaagagttcttgcaagaaaaagggaaaacaagaggtctcagtcttactggataagaaaagtaagaagggaaacagaaagtcagttttggaaatacacaaaaaggatatggcaaacagtgttcaaactcaaagcatttgtaaggatcagtcaaaagcaggttctagcacagcaccgaatacaacagatatgaggtgtaaattaaattcttgttgcaaatcaaagcatgttaccttttctgatggcgctgacatatttggaaggaccgcacatctacctgcagataatacaaagcaaccacaatctgtacagacattccagcaagccactcaggaaggtcgtgaccaccgtgatagagatgatcaacagttggtttatcaacaagctgaagctatatcccggactgttgagattaccaattctttgtctgaaaatgtagtactagctggtgtttgccgtacaatcccacttaccaaaccaaaagatatcactatactgggaaactcagtggatctgaatcactgcatagaaacttgtcatggcagtaactgtttgaactccacgagtttggcaagcttatctagtaagatgccatgtcaaaaattccaaggtgtgaactctcatctgaatggcaacaatgtttcaagtcttgatgttcagtatcttggagaacaaaaccatatgatatcacaagcatcatttaatcctgttagtttggcacccaagggagtatcaggtgatatgagcccattgtcagagccttccagttgttgtttatatgataggagcagtatcacgttccacgagaaggctgatgctaattaccacttgggaaaagttagttctgagattcttagatctggtaacgtggtgagaagcataagctcttcaacaggatcaaataaaccagcacaagccatcgattgtgtatctgctgcattcaggaacatgcacagccgccgtgacgattatgtcggccttcctatcaattcacgaggtgaattcgtcaaggttcatcctggtggcacccctaattctgttgacatttttacgaggcagtgtttgggggagaattcctcatgcccctcagattatccaaccatcttcagttctattacccgcatggatcatgtacccaactatcatgctcgacaattctatacaatagaccagtctgcttttcatgcagatcctcgttttcctccagcgggcccaatggcatatgggatggatgtgaggcagtggccaagttctgaaagagcaaaagttcattactacacaattccaaacaaaaagtatccatgcgccaaacagcaagagctttcaatggatcacaattcacagcagaagctacttgggctgcgaagccgctgtcccagccagaactctgggcagggtatgcagcacaacgccgaaacgacactgcgcctcatgggaaaaacggtcacacttgggaccagcagcagcatgcactgtagaggcctgaacaacggaaccccagcttgttccagtaaacaaagccaagctgaagaccggggaacgcgtacgaaagttttcccacagctgtttcacggaggactggctctggctgatcccgctgctgcgtgtaggatatcagatggagagaggcaaccgtctggacacccgtcacgtttctctttggctccagcagctgttcgggcttttctgcctggtaccagcagtttcagaacaggtggccacaaccagcaacctgaactagcaacagccagtaagaatc

SEQ ID NO: 100942 - DNA, 590 bp, Zea Mays
tttcattcatcccacgctcgatgtcaccatggttgccttcccaagaactctcgatcctccacaaggatgaagactactttcaatgggcgggttatggttttttggcctgcctaaagcattatttccgcttctgacagtaatgcacactgttgaatatagaatgttataaatgttaaagatataaggttatgtagagtaggaaatggacatactccttgtttgatttaaggctatgacccctaatattgtcagtactgttacatgccatgtaaaggcttatgtctacgtcatatctctttatatatacgagtacaaccctaagaggattttgcattgcactactttaacatggtaccgagcataagaaatttttctaattccccaccacagatccttcttcttcctcctcccatgtcggatgctactgcttctccaccatggtgtcgatccccatacataagttgtcatcatttgactgactaaattaaattttctcataaggcattctcaattcctttcacatctacagagctcagagttttaaggataccttgatggatccaatgtcatccctgagaagaagatcatgc

SEQ ID NO: 100943 - DNA, 364 bp, Zea Mays
atttttcttagttgagttgttggatgaagtatagtgacattggttaagcaagtattgtgttgttgttgtgctgtcagtgctctctgtggagtttttggcatttcttcgatgaactgtgccgcgcagaatgttattggcttcttgtcggctttattgctccattagttctgtaggctttctccctttttgtggggtgcaaagaatgtgagattacatgattatattttcatgatggcaagaacaaagtttaggaagattaggagttttgtttcaatagaactacttattttgtggtgctttgaggtgaggtgtttgatcttcttatacattcatctggtgtggatgtttccccattgaattaaaa

SEQ ID NO: 100944 - DNA, 291 bp, Zea Mays
gtaatgtcctggctatcttccatattccagcccttattgatagtaaagttcatgtttccttcgtcgtcgaattctattaaatcaatgccttcagtgtatgtgcagggcatgtatgcttcaggatcatgagaaggttggtcatagttgtaattctccatttttcggctcgcaggtgaacatatagacgaattcaaaaacaagaacagaacacaaaatcgtagaatagcattgttatgatatattataacacagagtctgaagaacatatagcctcaagttttacaataacac

SEQ ID NO: 100945 - DNA, 494 bp, Zea Mays
gccaaataattgccatctgccgcgatactaaatacatgcttatcttccacttcaggctacaacactatttctgatagaagctcccaaaggttcaaatcttccactataactcccacagacatagcaccctttatatcagatatccattttctattggaaagagcctcaagaacagttcttttattcgcaatccttttaggaatgatggcgaataacttaggcgccagactacacacattctggcccaagaaccatttatctgtccaaaacaaagtgtgtgctccatttcccacttttgagaccaaaccagtggagaagaaagatcctgcctttttggaacttgaatagcgaggtttgcccaaggttttcttggatcagttttatgaagccacaaccatctcatacgaagggcccagcataattccttcaaactagaaatacccaaacctcccaaatggaggggtctgcacacccttccccaagcaaccagacaa

SEQ ID NO: 100946 - DNA, 346 bp, Zea Mays
gttcaccagctctcgcctctgatcgtccatcagagcctccaaatttcgcatttcccccaaatcgggtttccgcgccaccgtgaacgcctcgtcgtggccagctctctctaggttagttcaagcttctctgcttgatgttctagcctccctcaaacctcctgttgctcgtagacccatttgattgagctagacctcactgaatcaccaagaacacctcggtttatcttcggttctcaccgccgtcatgagcagacgaattctgggccagatttgtgcaattaacggagggcttagggtcgccaggggtaggaacatgtgtcaaccaagttagggcgtcagtcgttgc

SEQ ID NO: 100947 - DNA, 452 bp, Zea Mays
gttcgatgcgcaagccaattcagacctatttctgcccctctgcacacttgatccggtgcaccaccggaccagtccgatgtgcctccatacaacccaacttgggcaaagttgggcatttcttcttcaatcgagtttggctgcacatgagggtgtttctatgacttagacagtcatatctagagacttgccaactagtctaagtcataacacatggttgttttatttctttgaactcatattcttttcaagctcaaactagcttcgaatgagtgatattttgaaactgtgttttcaaacctttctagatgtaccaaataaattttgaggggtgtttagaacttatccaagctgttgagttatttctagtttctcttttctaagttttacccctaataggctggatttgagttgttttctaacttagaagcatattggttggtcttacgaacctg

SEQ ID NO: 100948 - DNA, 340 bp, Zea Mays
tcaacagtttgaatgcctttgagaatgaaatcttttattgatgacatattcttccaattacagagtacaccgctgctccgatagcttttgaggccttgctaagggtaaaactttctaagatgctctatgttccatgagttccccacttccgtaccatccatttgagtaagccgatatgatcctggccgagtgacttccgacacaatgaatggcccttcccatagtggtgacaacttgtgccgtccttcccccgttagaatttggcgaaggaccaagtctcccactacaaaggatcgatgtcgtatagctttatcatgatagtgcctcaaggtctgctggt

SEQ ID NO: 100949 - DNA, 746 bp, Zea Mays
ataaaataaggggggttaggaggttagggtttcaaaccttgggttgggatttttgggatgttacaaacctaccccacttaaaggaatctcacccgcgagatttagactggatttgagaaaagataagggtattccctcctcaaggagtcctcactctcctaggtagcttcctcttctccttctctgctccactgaactttacagagcttcacctctgaggtgcgggtccttcggacagccgaatcaagaatctttactggtttctcccggtactgaagatctttctgaatctgcactgcctcttcttcgatgtgactttctggtgcttggaggcatttgcggagctgggatacgtgaaatacattatggatgtcagacatggactctggtagttcaagacggtatgctgcgggccccactctgccaatgatgggatagggaccgacgaatcgcggtgcgagttttcctttcgcttggaacctcctgacaccacgcatcggggagaccttgaggtagacgaagtctccttcttcaaatctgagctctctccgcctattgtccgcataactcttctgccgactctgagcttcaagtaatctcctgcgaatcagggcaactttctcttctgcctctttgacaaaggcaggtccttctagtgctttttcccctacgttggaccacatgagaggtgtctagcattttcgtccatacaatgcttcgaatggcgacatcttgatgctggcctg

SEQ ID NO: 100950 - DNA, 309 bp, Zea Mays
cagtctcaagggtagcaaggccagcaccaagagttagggacacaacaacaatcatcacaaagcaactttcggcaaccagctccaagaggagggagagggggtgaagctttggcagaagactcaataataatactcagccgaggaagctatattacatgttttgtggacaaaacaagggtcatactacaaagacatgccaaataaccatacaaaaacagaaagagctcactgatgtgcagacaaaccaattgaatgaagtcttccacacttcctcatattactctctctgtattccacatcatgtacaac

SEQ ID NO: 100951 - DNA, 429 bp, Zea Mays
cagcaaaggcagtgtaatttatccaggagataatgttcaggttcggaataacaaatagcataatcactgacctgggatccaacttcaccagctcggagttcttcgatttctgcgagcaaaggagcatctagatcaagtacacatcagtggtacacccaagagcaaatgggcaggtggaaagagtcaacggaatgatactggatgcactcagaaaaaaggtattcgacaagagcgagaagctcacaggaaagtggaccagggaactgccatacgtggtctggagcctgcgaacccagcctagccaagctctgcatggaaacaccccatttttcatggtgtatgggtcggaagcgctgctacctgccgatttgatctttggggcgcctaggctgacctttgaaagaatagctgaggcagaagcaaccaggc

SEQ ID NO: 100952 - DNA, 436 bp, Zea Mays
aagttgcttggtctcagcattcgtgatcgtccagtaatcggtcaggcagtaccttgtggttggaggaagagggtcgatgccttccttgggggagtgcttcctgaagacctacgaggtagccattacacaggaggacttcagacaacacgatgttgtccttaccctcaatgagtataaacttttagtagcgaattcattcatttgtatgttctaaactttgtgcctcactaacctttcaattatagagggtgtcacgtcaccttcattgtggtgcggctcattgtggatgcaggtccctcgtaggacttgacgtgcagcttcctatgcagtctcctttgcagcctcccgtggtgcctactccgcaccgccatgattctcccgcgcccgtagttggaccttctacaactgcatagagctcctcgcgttcaacgcggga

SEQ ID NO: 100953 - DNA, 648 bp, Zea Mays
gagggcggctgcaaatggggaggagaggaagagggagtgggcggctgcaacaattggggagagggagagggggtcgactagggttgtggaggagaggggggctcccatccatcggatcgagatcaatggcccgaactcgctctcccatctgagctcccgaccccagcagaaaaaatgccaaaagatctattgtttccctgaggaatgcctcttgaaactccaaaccccaatgccttagaacatgaaagaaaagagaaaaatcccccttaaaaagaatttgtcctcgaattcgatcacttccaagcaaagcatccaaggtaccccatatagcaccaccattcaaaacatgtgttcattattggtcttaattaacacaagaacctctaccttggactaattgtctaaggaaactacacaacctgatatcaagcatgaaacaacatgcaatgaagctcaaagcaagtcatagatgcaatcaacactacgatttcacaccatcgaatttggatgcagctatacatcaacatcaatgtcttaaaacaacactcttttatgaaggggtaataggcatcaatgtcttaaaacaacactcttttatgaagggataataggcactaagcacaacccttaccagcttcaacaattcat

SEQ ID NO: 100954 - DNA, 493 bp, Zea Mays
gggagctttgtcgtactctgtggcaccgtaagtgtcggctggggtagatgacgccatgtccaccgttagctgttagatggacggttaagattaattcatgccatagtgaatcgatcaatggcacgatggtcgttggattttaatcatgcggcaactgtgagaccgtggcgatcgtaacccgagggccgtggatttcagatctggcgaccaggagcgaacgcggatacataatcaacttaaatctaatctaaaccatcgggcgctgatccaacggcctgaattgcctcataccccttcgcagacccacttttgtatgagagccctcatctttcacataattaacccgccgtccaccgcgagttaaatctgagcctgggatatttttatacgttagcccctgaacttctcaaatatatgttagcccctgaacttctcaaaacgaatatagaaaatgaattcctaatgtaaaaataattctagaacttgtttaatt

SEQ ID NO: 100955 - DNA, 711 bp, Zea Mays
cggaactaaagaatgatgtgactatcaatagcaaatggatgtaatagtttcattaatattttgatacatgttaggctaatattttggaggtgcttatattggtaggttgacatagtaagtgtaacttcgtcaatctcttggaatttatcgatctaatctttcaaaggtgctcatatggtatgttgtatgcacatatgttcataggagtgagtgatgatatctatggtgactttgtcaatctattcactgctaccccaaaaggctacatgcctaacgcaataccttctccactttggtccactagtgtaaaccaaaacgaagggtttccaaagttagtatcaacatacacaaaaccttttccaaaacacatccaacactaagtgatgacctcccacaagacgataatttaactcaccgtcagctaccttttagcaaaaatcacaaaggccttagcttttccgccactcaccaccaagcgtaacgcaatgttagaactcacaagtggcactagataagcgtgatgcaattcatggttgcccctcttattactacaaccatatattctaaattggactatctagccgataaaatgaaacaccttatgttcatagctttgtcataagcacacatccaaattctcataagttgatgtggatcactcaaaccataaaatagactttattgatcttagcgtcacttgctcgtcaccct

SEQ ID NO: 100956 - DNA, 456 bp, Zea Mays
ggaaaattatcaatctaccttgtttggtttatttggaatggctaaaaactcaccactatattaggtctgttcttttcaactgccagtaaggttttaggcattgtgtcatcaaaggtatttagtatgagctgcagacgccgtacttgagcaccaactgggcaatacaaatccgtcatacgctatcatgcatgccatccacctctgcatgagctgcatactcgtgaactacaagccttaatcatagtcacacctacagtccaaaataagtgctcaaccaaccaacccacactgctcctatgtcgtgctatatcaatgcattggactattttacaatttagtttaaaatattttcaactggtaataggttttgatggagccagctgtattgaaccgtgaaagagttgcattggacaagaaaaacaggatgcctgagtaagttatattataaacaatatt

SEQ ID NO: 100957 - DNA, 442 bp, Zea Mays
ccaaaagggagccctctaataaaaaaggaaaacaaacacccaattcccctcgcaaatgaacaaaagttttttgatcaaggggtttggtcaaaatgtcagcaagctggtgagtggtatcaatatagcgcaatttgatgtcgcctttctcataatgatcacgaagaaagtgaaagcgaacatcaatgtgcttggtcctcgaatgtagcacaggattcttggcaacacttatggcactcgtgctataacaaagcagaggcacatgatgaaaatccaagccaaaatcacgtaaggtagccatcatccaaagtaactacgaacaacagctagcggcagcaacatactcgccctctatggtagacagggcaacactagactattttcgagaagaccatgaaaccaacgaagtacccaaaaactgacaagtcccagaagtagacatgcg

SEQ ID NO: 100958 - DNA, 2394 bp, Zea Mays
gaagagtctagtcaaaggcttagcaatgctggaaaattcggtacgaagcaccgataatatccagcgagccccaagaaactttggatttcggacacactagagggtctcttccactccacctcagccgcaacattcttgggatcaaccgcaatgccctactgattaatcacatgccccaggaaagccactttggacaaccaaaaggcacacttcttcaacttgccataaaactgattcttcccaagagcacccagaacgagacggagatgctgctcatgctcagtctcggtctttgaataaatcagaatatcatttaggaacacgaccacaaagtcgtccaagaactcatgcaacatcctattcatcgcttccataaaaagcggcaggggcattagttaagccaaaagacatgactatgaactcataatgcccatacctggtgcaaaaggttgtcttctcaatatcctcctcacgaatcctcaattgatgataaccagagttcaaatcaatcttggagaacacctgggaacccctcaactattcaaagagaacctcaatacggggtagcggatatttattcttgattgtcacttgattcaaagcccgataatccacacataacctcttgcttttatccttcttctccacaaacaacactggggaagcccaaggcaacctgctaggcctaatgaaacccttagctagcagatcatccaattcccgcttcaattcaacctgctcctttggagccatccgatacgaggccttatgaataggctgcgtacccgaaatcagcttgatttcaaaagctgcatcgcgctccggaggaatgcctggaagctctgctggaaatatgtcggcatagtcacacaccacccggatgtcttgcacccgcaaggtagcctcacccaccaccaccatggagaaaaagattcccgacttccttgaccagtgatccggaagcaattgcgccaacaaggataacgtgaactttggggaacttcccaagaataccacctccctacccgatggcgcttgcaataacactgtcttccaaaaataggatataaccgcgcgatactgagataaccaatccatacccaagataacatcgaatgcccccaaggaaattacaacaagattggccaaaaagacctcatcagcaagaataacggaacacccctgacaaactgaacagctactaatggagccattagcagaactaaccacaattgggtgacccaacctctgcaccgaaagaccagcccgcgacacaaaattctccgaaacaaaggaatagctagcgctagagtcaaaaagagcatgggccacaaacgaatccactgagatcgtacctgtcaccatgtctccctgctctctgccatccgcagagggtagaacataagctccggaaatacccgcagaaggagccctcggagtgaagttaacagaagaaccccactgagccaccaggtgaggcagacgcggagctccaaactgagacgacatgggagtagtcggtgcaggagtaggcgcagccagatactgaggaaaaccctgcatcgctacgaactgagaagtccccggcacatagaactgctatggagggagtggaactgcaacttgctgctcagcgcttgacatcatgttgacagtgccctgagaagaggaggaagtcactggctcccatctgagcttcccattgggattcctcctacacaccacatccttgtgatcctgactgcagatagaacacctgccactccactaacactcagcacggtgatgtgcatcaccacaatgaaaacacaccagccccagcccgggcttaggaacagcccgatacctctaagtacttcctcccgaagcacccgatttagaggatttgccacgataggggcggtggcgctggtgatgagacttgcccctcttgtgggctggacctccagagttgcccctcctcgcgtcctggccacgaggctgatcaacccccaaggtcttctgtgactccatggtatactggtgttgcatctccacacccagtgcctcctccactgtagtacggaaatccaccaacgaaaaggctcccagggcatgcctgatagaaggtttcaggccctaacggaactggctcgccttctccatcaaattataagccacatgagggacaaagcggaccatcttgttgaagcccacttcatactctgtgacagacttcttctcttgcttgtaggattgcaaatcaatcttcattttctccaggaacgtgaccgggtagaacctcctctcaaactgcctgatgaaaacaccccaagacaggactcctggtgagcaggcgtgcgctgcctgcacgcctctccaccaaatttgagcctctcccttcaacagctgtgt

SEQ ID NO: 100959 - DNA, 363 bp, Zea Mays
actgttttcaacaaagtgaaatttatttcctttttggtcaacgtgtagttcatgaattcatatgggccaacagaatctggaacctatcccaacacagtcgatccaaaagaattgaaatcaagaaaaggaataaaagggacaccgacactctaatccacaaatctggaacctatcccaacacagccacatgcggggaaaaggcgacaactacggggagtctacaacaggtaagtgacggtactggaagagcggcgggatacagtatgaaccctaatcatatataccagactgtttaaagtataaagaagacattattacaaacactcaagaaaatcatcatgatacaggtatcatcatatagag

SEQ ID NO: 100960 - DNA, 1701 bp, Zea Mays
cgaagcgaccacaccgaaggaaagaagccagcggcttttttctattcacagtgtcatcatcttctgcccggagtcgacgccgctcgcaacttcactgtttcccccatcccatccactactcctggcgctacaccggttatatccgccacagcgtcatagcagcttcacagtagaatcgctgccgtcgccgacgactgtcaagatctccacagtttctccgattgcttcgtcattttatcaacgtttggcataggtacaaatgtattttccccaatcagagcatcatacatccgagtgtcctcgctattagggttcacaaatacatatacatgtcttttccccatcagatcttcgtctatctgcttgcacttgagtgtcctcactattaaggtttgcaaatacatatgtcttttacccatcggaggtctgtttatctgctcgcacttggtaacttcccaatgcaagtattggtcgtctgttcagttatatttcccaaatacatatgtctatctgctctcactattagggttttgtgcttccacattttcaatggcggtcggtcacgactaatttagctatactatcctcaccctctttaatgtagtgatactgattttgtcgctgtcggccattgtaagtatctgtcatccatttatttcgtatccgagctctctgtgtgtacacatttttttaatagcggtgggtcacaactaacttatctacgtcatcctcgccctcttggacttgagttgcattttccttcaaaagcgtcctttggtgtaaaaagcatcctttggtataagtggtactgattctttggcgtcgtgctgcatagcatcctttggcgtgtagtggtactgatttttttttgtcgtcgtgccattttcattcaaaagcatcctttggtgtaagtgatactgattttgtcgcttcgtgccgcatagcatcctctggtgtgtagtggtactgattttttgcgtcgtgtcgtgtatagtccatatgctcgctagatttcgtctacacataacgcattcttgctacatttcctatacacatgatgtttattttgtatttatagtacatcaccatataatcgatcgtgcatttactgcttactgctttgtcattattaaattaatttgacagtaaattatagcttgggagtgtagtggtactgattttttcccgtcctgccgcatatagtccatatgctcgctagatttcctctacacattacgcattcttgctacatttactataaacatgacgtttattttgtatttataatacttcaccatataatcgaccatgcatttactgcttactgctttgtcattattaatttgacagtaaattataatattcggtttggaagcacgggcttcatcaaattttacatatttgctcgaggaaaaaatctgcttcatcaagatacatttgattacacattccttttcctaatagtgtcctccaatataactttttcccaatagtggtactattacatatttcttctttgcataactatctattgctttgtacatttactctaaacattatgtgtgcttgctgcattacctctaaacaagacgttcattttttgaatctatagtaccatagcacatatttgtccacacattcactacttactgttttgttaatttcaatttatagtaaatccttatctttggtttggaaaag

SEQ ID NO: 100961 - DNA, 550 bp, Zea Mays
agcagatctacgctccaagtctcggtgaggcctcgctggcgcttccccatggttaccgcgatgattagcacttggattcgctaggaattgagcaccgaagcactgggggatctgggtgctggtttatcgtggtgccgctgatcagcgcatcgccgtctctcggtgggtgtcggcttagtcttttggcgtgggaaggaagatgactcactgatgtgctgtttattttgaacggctgggattagtttgggcatacccattcgatgcattaaatcgctgacgtcaaccagtaatcaaacggttttggggtcgcgtgaagctctgaccgtggatcctagatccgagggctaatagcgcataccggttcaatgaaagtaacatctaatatgggcggttggtgatcgattggacggtcgagatcctctggtaccccttccccgtgcgtttttcacataagaacactcacatgatacacaaaacaactcagcatccttgtctgcctaaaaaccattactaccaggccctggaatttatggattaaaccctgagctct

SEQ ID NO: 100962 - DNA, 414 bp, Zea Mays
gtagccaaaagatcgtaattatgaccgtgcaaaatgctgtttggagtttgaaaaggcagatgagatgaatacgactgctgaagatagcctactgaggttaggaactggattctacatgttgtttgcctaggtgacatgaaggtccatacgaaatgaatttacagtttgttcattcatagtgcgtgattggtatgcagtactagctgtgctgattcaattaattgggtgcgtccacaattgcagaaaaacagttcacttaatgctctgaaccaacaaagaaagccatcaaggacacaatccaagaacagcattaataagagcaaggatttacatgccaagtgcagtatgaatcaaatttccgtcatacacttgttggccactgataaaaagaaaagaaacactagtcgcatgatt

SEQ ID NO: 100963 - DNA, 810 bp, Zea Mays
agccaagacttcctcagcttctcgcacctttccaacaaagccatgcaagtggaaagggcaagggaagaagaaaaaggccacctcaagaggaaattccaagtcctccgagctcagcagcaagaccggcaccagagaactcgatcctttgggtttccacccaagggaccaagcttcattagaccagctggacccactccgtcatggttcagtcagcagagtcagagctcctttcatgccccctcggttgcaagcaaccaaccaccagtgaatgcgtgttggcactgcggagaccccagtcacttcaagaacaactgccccagttgaaggcatcaggacctgcttactccaactcggtgaatggccccaagaatacctcagcacccgcccccaaggcgccctcctccatcagccagcagaacaagacctagtatcaaggaagggctcgagtaaatcacgtcgatgctcaggaggctcagcaagctccgggagtagtgcttggtgagttccttgttgaatttactcccactactgtacttttcgattcaggagcatcccattcttttatagccactagttttgtggaaaagcatggcatcccctctacccctctagagattcccttggtcacccaaaccccagggtcagaccttctatgccagctcaaatgctcccaagtcagaattcttttaagtggggtagtgttcttggcagacataaccgtcatgccatcccaagggattgatgtgatcttaggaatggattggttgaccaagcacaaaggtatcataagttgcgcaaacaagatagtcc

SEQ ID NO: 100964 - DNA, 399 bp, Zea Mays
tcgggtgggatcatggccggttcaggcgactgaaatagatgagccatggtaaagtgttttggatggatcagaacgccagctcagctcgccgtcgttgatcaccgtccggaatcgtgcagggtgttgggtggataacaccgggaaaaaggtagctcgtacgtggcaccctctccgtgctcggccggagttactcaccggcgggcgccgtgactcagtggattccgccgtagtggcactcatgccgtagttctccctcactgtatcactttccgacgtggtaagcatgcgcgtgtgttactatccgtggccgggggccatccgttgggccgccgtgcctataaattgagcagggggtcacggcgaggtgctcgctgatcttcaagtgagctcagatacaac

SEQ ID NO: 100965 - DNA, 313 bp, Zea Mays
tgcctccgaaccataaaccataaagaaaggagtgttcccattcaaagctcggctaggttgagttctgaggctccagaccacgtatggcaactctctgatccactttcctgcgaacttttcattcttatcgaagatcctctttctgagtgcttctaatatcattctgttggctctttctacttgcccgtttgctctcagatgcgccactgaagcgtattttatctgaatgcttttttgctcacagaaatcaaagaattctgaactagtgaaattggatcccaggtcggttataatgttgttcggtattccgaat

SEQ ID NO: 100966 - DNA, 556 bp, Zea Mays
ccgtttggagaattttgtttgtttattccccattgcactaagataccttggagcaatctgacagtcttaatgggccacagaaagtttgggcaggaaacaaacacttagtggcagatgaaatagcttttgatctggactcgcatccaatagccgagacacccttcttccatgcctgcatggggtcatttagacgccggggaactgcagctgcctaccaaactcttgatcgagctcagcaccagccaccaggtacattactatttaccatttgataacacggaaaagctttttttttaacccttcatccgaccagtccaacaaatcaaacccataatgtggaggaatggaatgggagttactgacacactggaaggtccagattgaaattgttggcaggacatggacgttggatgagcatggggattttcagaaggaatggttcgtgcagaacatgccaattgtcatagagccatggaggtcctctagcggatcaatcaaggccacaaacatgcaaacacaagagtcaaaacaagcacaggtacctttcacaaaagag

SEQ ID NO: 100967 - DNA, 273 bp, Zea Mays
cattttggtgttaaaaagactgaggatgtgctgtccactcacttctattggcctcaaatgcaccgtgatgttgagcgctacgtcttgtgatgcaccacgtgcaacaaagctatgtctcgacttaacccacatggtctttatatgcctcttcttgttcctagtgcaccttgggaggatatttctatggactttgttttagggttgcctagaacaaatagggggagtgatagcgtttttgtggttgtcgatcgtttctccaagatggaacatttt

SEQ ID NO: 100968 - DNA, 724 bp, Zea Mays
tggtagctgttgttataagagaattctgacaacgaaaggcacttgtcccaatccttcccatagtgcaacacacatgccctcaacatgtcttccaaaatctgattcaccctttctgtctaaccatctgtttgaggatggtatgctgagcttcttattacatgggtcccaagtgattcttgcagttgctcccagaaacatgctacgaatggtgctcctctatctgacacaatagtcctgggtattccatgcaaacgaactatttggtcaatatagatttctgcatatttttctgtcctgtgggtggtatgcactggcaagaaatgagctatcttggtcaacctatccacaatgacccaaatagaatcgtggtgtcaggaggtattgggcaatcccacaataaaatccatgcaaatctcctcccatttccaagatggtacgggaagaggctgtaaggtaccggctaccttcaaatgactagctttgactctcttgcaagtgtcgcattccgatacatacttagcaatttccctcttcattctggtccaccagtataaggatctgagatcatgatacatcttgttactgccggggtgcatggaaaatttggaaaggtgagcttcatccaatattttcttcctgagttctgaatttttaggaaccaccaaccagtcttcaaaccatagaattcctttgctgtcctgacggaagcatttgtatttatcca

SEQ ID NO: 100969 - DNA, 284 bp, Zea Mays
gtaatattcgttttgggttggctacagatgggtttaatccatttgggatgttgagcagtactcatagttgttggccagtagttttaacagtatataatctacctccgtggttatgcatgaaagatcataatcttatgttgtccttaatgattcctagtcctaaaagtcctggagacaaaattcatgtgttcttggaaccactattggaggacctgaaagatatatttcagaatggcatgtccacatatgacgcatcgagagatgaactatttaatttgcgaggg

SEQ ID NO: 100970 - DNA, 397 bp, Zea Mays
cccactaggtgctggcggggcctcttaattgttgagcgacaaatatgggcttccatatctcagtgcatcggatgagcctaaacttttgttccatcactcgcacccattcatcagtttccaagggttcctccgccttgacaaagagtggtggacgggtctcggagagctccagatatgtggtgtctcatggtccctgaggttgacctcttcctccgtgttgttgaaattgatttcccaccatttcacgcaggaagcacgtgttgttggtggtagcgttgaccaaggcagcgatagcctcggccagggtaggaggtacaggtggtggattgggagtgtcctccccgctgcaggatgtacccaccccatcatgagcacgagttcgcgatgacatctgagg

SEQ ID NO: 100971 - DNA, 972 bp, Zea Mays
tcagaggtatgaagcctagcccgggcgcctcggaaggacatgaaccagtagccagacaagcactggcaaaagaggccccgggaggaagtgcacaccgccgggccactagcaactcgagctcacgacacaccccgtggtggagtaaggacactggatgagatcctcgactctcagtgcccacaccacaaggacatgcgacacaccctacggaactgtgggtcacgcgagtacaaaaatacgtccgtggccacacagcaggcacgctcccaaggcgtcccgctatgggctagataaaagaagccagtagagacaagtcggtccatatgtgaaagagacccacgtccgggttagctgcagcatgagcgcggatatgtcgggccagggttgttttgcccacccgacatactgaaccaccgacgataactcgggcgcgggagcaccggatttccctaggataaaaggaggctgtccgctacaaattaggggataagcaaggaggttgtaatcaacacctgtgcgggggagctctctctggttgtgtatataaggccaggaggcacccctaccattgtcatctcatccacagcccaccattcttgtagtcacagcttgtaaatccaccccaatacagaaaaccaccataggaagtagggtattacgcttctcaaagcagctcgaacttgctcaagcctgtgtgtttccctcaacgtgctgcaacacgaaccatcgagtcacaatctacgatgtcgtcctacccaaaagcaccaagagtgtaacccgggtgtgcggacgaacaataaacgtcgacagtcgtcttcccgagatgccctcgagcggccgtcatcttgaggtacttgttccccatcttgagttagggattgcaccatcattgaggaagaaggttgatcttgtactcggtgttcctgtggtcgcacatcgcctatcgcctatcgccatagtcatcattgcggt

SEQ ID NO: 100972 - DNA, 1037 bp, Zea Mays
cgctcgattgcaccagtcgccgacgcatgggccacccctgtcaggtttatcccctaccctagattcgcgtggaccgttccaagaatacccgatcagccatggccatagatacggtgtcggctaaccccctcggactatggcctcagagtataaaaagaagcccattgcgacccctcaaccatttggatgcaccaagcagaaagagagagaagctagagaggttcgccgacgggtaagaaaagaagtcgtcgtggtattccgtttcctcaccgccacccgcgcttgggccagtgcccgtgtatgtttgctggagtaccacaaacacatccgtgtcctcctcaggcacgaatggtgagcaatggagcgccgatttctcgctggaatcctggcaccgcctcgaacgggtcttgcgcggtgggcaggcttcgtccgtgcctcaaattccggtaagtcacactgatgctgttcactagggtgtccatgtcgtgtagctattatttgtgggtgatttgggtgctagggtgccgtttggccatgtcactggcgataccccgccgtagtgcatgtacgcagtggtggtcggagtagcttggggcgagagagtgaggtgatgggcggctggtgaccgttgatctggtatcggatgtgtgagattagagctacaataacccttcgccctttttaaacgatggtcatggatccatacatcaatggttggtgtggatatcaaatcgggtcattgatcttagatctgacgggccacatggcatgcctattatactgcgtcatcatataatccgagccactatgttgtgatcggacggctcaaaacccacggtaccccttcgaccgagaaattagcatcatagccctcctagaatttcaaaaagaaaccgccatccctggttagtgtaagacctttacacttaggtctcgagaatttacagattagccctagaatcttttaaatgcaaaataaatgttaaaaaatactttaaaacttacttagcccataactttcatgttttaactctgat

SEQ ID NO: 100973 - DNA, 1580 bp, Zea Mays
ctcacggccgcagcatcgtccggaagagggacgaccgagaatttgcaaatgtacgtttgtctttgatgagggtggtgtgtgtgttcattttctgaagcgttgttgtgatgtcttcgtaggcgatgagggatgaagaggtggaggacctcgccagcctagagagctcggtgatccgaaaggacgccaaggtggagacgggagcggaagagcaatcctcactaaagaaaggtggcgctgagggccctgcgatggcggggacttctgcgctggtttaaagaatatagtaggagtggtttgatggtgtttgctttgtatgatacttaagatcggctgcaacgcaggttccatcgtctggacccgcgcaagcaaactttgatgataacgagaatgatgaatcattaatgtgttgaagtgtgataattcttagtagtgacgcatctaatgatgaatctgatgttgagtcatggtcttcggagggtgagaggttggtgagcccgttcgctgggatggacgacgagtctttgaaagatgatctagattattttgtggcgctatatttgtctgtcgtggagtcttcgtcaaggctcgcccccactgcggcggccgccgaatgggaatggagaggtctcgtctccgtagtggaacacggtcagaggaggggacctgtcggatcatacgggcaccgatggccaagtcatgtttcggggagggggatctacgggctctttttgatggcgaagagttgagactgatgctgttcaatttctgtgaagctagccttatcccgaaagaagagccaatgtaagatgtgtgttgccatcgctgttctttggtgcatttaagtgaaaacgctgccctcacccccctgcgccaaaggacggctatggggacacttgtatttgaatggttttcctatgtgtattatgcatcttggacttgaaatatgatgtgcctctcgttgtggtatcattaaaatgtatttgcgctatctcagctgcatccttggattacttcacactgttaggtgtcgttaacatgtttgtattgattcgactgcaaccttaagcgacttgtggtagggtatagccgtatctcttggcgaggactccacacctttgtgatgtgcctgctgtgttaatccaactgcatccttagacgacttttgcttggatagaaatatgtgtttcttggacgacttctcacccttggatgctgttacacacttgttgtgctgacccagctgcacccttaagcgacttttgcttggataaaaaaatatgcgtctctaggacgactttgcacccttgggtgctattacacacttgttgtgctgatccagctgcacccttaggagacttctgcttggataatgcctgtcgcacgcaatgactgtttaaactggtcgttgcggtgactgttttagtgtcgaatgccgaagaccgactccgcggtctttttcgacatcctgctgtcatggtgtctcctttttgtgtgggggatttttgtggtgatatattacatggctccgcctcattaaaaacctcaccccctgctaggaaaagagtgcgggcttgactgaa

SEQ ID NO: 100974 - DNA, 449 bp, Zea Mays
gtccggtgccacctaacatggccgttttctgttgattgcgtaggccgataggagcttcggtggcgcacctgacatgtacgatagaggtctagtgcacccgaggcaggtgtagatttttggaatctcgcctaacaactaattgagggattttaggctatgaataccccctcaaccagccaagactcatcataagagttgtgctttcattcccaaacacgagtacaacacatccaagtcatcccaagagatccaagcaccacatttgagaagaattagtcattttaaagagagaaggctagtgtgcttgtgtgatctgcatttttggagttgtgttgtgctcttgagttgtgctagtgtgcttcacgcggagggtggaggggttcgagatgtcgttgtgctaatgtgctcaggtccttctcgactcaggttttgttttatgttggatctag

SEQ ID NO: 100975 - DNA, 939 bp, Zea Mays
cgagtgcgtccatgtggggcgcgctatgaaggtcgacatctcttgcgttgaaggttaatggtacatgagaccactttgtctaaatgacggatctagtgactgtgacatgattgaccctttgatagtgatccccttttgccatttgttcttgaagtcagagctggaccctccgatgatcatgtgaatactcccctgaagggtgggtccgcgaagtcttctttctttggtggtggtgggtggtaggtgttgatttggatgctgtggcggtggaggtggaagagctaacctttcttggtgttgaaggcgttgttgctatggaaagaaattggggttttgttgctgggggtagtatgggtgttcgttttgatattgatgttggttgtactgttggggttgatatgtatgagcgatgactctttggttgtctgtcgaggcggccctagccaattggtcttttgttgctttggtctcgaggcgatctctggttgggtgtgctgaatcttcgccatggaaaagacaatagaatcttctcggttgctgagggcctctgcctctgcctctgcccatggtcgcgttgccatcgtggccttgttgcaggggatagtcttgacgacgaggggattctctcctggttgctgctggtttgtgatgttgtgcaactagagctgggcacgctcttgtcggttgggtcctgatgtggaggcctgatccatgtcctgctggattgtagagtctccttagtctttcgttgagacttgactttcctttggtggagctcttctcatcgggcatacttttcaaaaagttgatacaactcctgcaggttagttggtggatcccttatgcagtggttgtatacgacacctgctcgaaggccgctgattgcatagttgctggctatatgctcatcaaccgagggcaacattgatttcaacaggg

SEQ ID NO: 100976 - DNA, 816 bp, Zea Mays
gtgacttcaatcagatctatagcttagaggacaagaacgacaacaatataaacagagcgcttctaggcagatttagaaggtttgtaaatgatatggatctaaatgaaattcccctcgtaggaaggaaatatacttggtcgaatgagagaaatgtcccaaccctggtgaagctggatcatgtgttctgctcagccaactgggaggatctttatcctgattgtatcttgcatagcaatgcaactgagctctatgatcattgccctttgtccctcaaccttaaagaggatgtcgagggaaagcatagattccactttgagagtttctggatcaagattccaggtttcttggatgtgacttctgcttcttgggaacaaccaatctaggcttcttgtcctctggaaagggtgttccttaatatgataaggctagcaaaagccctgcagtcgtggggacataagaaggttcgcaatgtcagatcttagttggccatggctagggagatcctgcacaggctagagatggctcaagacaacaagccattatcatcagaggagttgtggttgaaaagaaatctcaaacaacattgcctggctcttgcttccttagagaggacggttgcgcgctttaggtcccagatcaaatatttgaaggagggagatgccaatacgtccttcttccacatgcaggcccgctatagaaagaaaataaatcttattcacaagctggttaatggggagcaagtgatcacctctcatgagcaaaaacaagaggttttgcatgagtattattcaaaccttttgagaatggcacatcaaa

SEQ ID NO: 100977 - DNA, 827 bp, Zea Mays
gatcacccactgtagaagagagtatgaagatgctgtcaacacaatatcatccacatagagaagtaaatagattgtgtcatggccatgttgatatataaacagagatgtgtcagatttggcactcacaaagccaagggagagaatgtgagtggcaaaacgactgtaccaggcacgcgaagcttgtttcaacccataaagagacttgttcaaacgatagacatgatcaggccgagagctatcaacaaaaccagcaggctgcacacaatacacagtctcatcaagggtgccatgtaagaatgcattcttcacgtcgagctgatggactggccaactatggaagagagccactgtgagcactgtacggatggtagctggtttgacaactggactaaaagtctcatcaaaatcaattccagggcgttgagtgaatccgcgaaaaacccatcgaaccttgtatcgctctagagaaccatcagaacgaaacttgtgacgataaacccatttgccggtcacaatatttgcacccgaaggacgaggaaccaaatcccaagttttattcgtctgtagtgcaagaaactcctcagacatagcagccctccagtttggatcggccagtgcccctctgtaggattttggtacaggagacaaggcagcagcatgcagatcaagcggtacctttggttgacgaaaaccccgtttaccacgcgtcagcatggtgtgcgcatttgttggaggctgaacggtgactgcattgggaggtgttgaccgctcaatgagttgcggcgagccggttggagacgtgccctcagacacgttccctgaaggac

SEQ ID NO: 100978 - DNA, 432 bp, Zea Mays
ctgatttgtatttgaaaatcgaacttaaatttaaatttagaaaatggaaaaagataaaacagtaactcgagtcgacccaccaacattttggcctagaaccatgcctgcgcccaccctcgcgcatgtatctccctgacaggcgggccttgtctgtcggcgcgctccacacatgctcagctgaaccattgatgcctcgacccacatgtcagcctcaccggctctcctagatctaagtcgctaacacaagtactccacctaccatccctaatctagtgccccctctctactcccaggtgcacgatccccgctatcgatcctgtcgttcctcgcatgagcaccgacactaaccccatcacccgacaatagatgtgatggatattcaaggcagcaatttctcccctctttcctcccctaacactgtgcaattcaagg

SEQ ID NO: 100979 - DNA, 298 bp, Zea Mays
cacatttagtttagttgctcacccaacagaatgtccactgtctagtgcgccactagataagaaaatgtgcaagagaaagtgatacaacttttattttcaactaaataatttgtatgcttggataattgttcagctccacacaggttatttgtttgacttagcgggaggtttaccagtaatagtggtggtacgctgttctttgtagtaggcatgatatagagttatgcatcctcaggatatcattttgttctcttaaaattttaactagtgtagtacgagtaatgttctaattggtata

SEQ ID NO: 100980 - DNA, 456 bp, Zea Mays
acaccatccaggttctacctctacttttctcccttttgcagcggttccccctaattatccacctatacctcactacaaccctaaaatattgtttcccatacctattcatcatacattatcaatttttcttcaactaacaaatgttgatgtgcacacaaatcgagtagaggggcagcacaacgtaccctttgttctagtagttccctgtgcctcccctagcaatgttcatcttttagtgacatgcgctgcggcatgtagcggagccctatagccgctacaggtcgagaggggggaggctggcaggagacgatgtagacagtctaagtggtctcacctaaaagggggaggcggggaggaggagatagttaggtggcctcgttaaggaagttaggcgccaccatgacagggaggactagatgaggtgcatggcgggcgttgggccaaggtagagaatta

SEQ ID NO: 100981 - DNA, 326 bp, Zea Mays
cctcatgtgtctagcttcataatctgttaaagtctagcttcatacgttcttccagtttcacctgtacaaaaagttggttcggttaaaggatgacattaaattcaattattcaatgcatagaagggcacaaaaatcgggtaaacattcatataggttgcttgttcactgggggtgcgagcttaatcagccaccatggatggtaagggtaagccttctctctttgtgttcccactttgttacttatatacatccttgcttcattacacacttctactcgaccagtttgctccatttctgttattttctgtttccataagccaactcat

SEQ ID NO: 100982 - DNA, 736 bp, Zea Mays
ctctattgcggtcggtgctaggcggaattaatgcggccagccatttatggtgggtcagtctcgggccagacgagaaatccactcgagtggcttcccctcggttcgcccgccccctctctagctctgcctcacccgaccccaggcttagtgcttcgagctttatcgggggcacacgtttctagggtagacggttccactcctgctgattggtggtccccgatagtccagaggtccttatctcgctctctttttgagcggtgggcctcaggggctcgaggatcttttccccgataggtagggagaggggagtgatgaaagattatccaaataatagtgtccattgaatttgaggttattcgacgatctgaaccgttttgatagtgggttaagtctagatacaatttgtttggtggatttagtagatgtcatgagtatagggattattttgttgggtggattttgtaaagtttaaactggtggttcatatagtgatatagataaaataaaattgtacataagtgagattagttatttgcgttttattaaaacaaattctaccatgtgatatatagaccatagcaatatgcatataactagtgtcactttattatcgacccctcggtaagcaccgaaagtaaaagtagtaaatatgttagggtgaaagattgtggtggagagacatgaatgggttaaaggaaatagctgtctccgtaaaagaaatttagttaacaaaata

SEQ ID NO: 100983 - DNA, 381 bp, Zea Mays
catcaacacaactctcaatcattaggaacacaacaaagctccttcaggccaccagccccaagaggcagaggaggaagaagcttcgaaggaagattcagctcgcaactaagaaggttgttttgcttgttttgtggagaagataaggggcatacaacaaggacatgccaagtcacgatacaaaagcaaaaggaaatagctaaggccgaagcacgatagaatcagtcgaagtatgtcctacatactgcttcgtgctattccccatacattcccgagtatgtgggcaaccaacaacccacaatatcagttgcttcggcaatccactccccagctacatgggccctaccaccaccgccaccactcatggctccaacttcgtctcac

SEQ ID NO: 100984 - DNA, 638 bp, Zea Mays
gttcggggatgcttgctctttattgctcatgcttcattgttctcggctacagcgtggagggtgtcctcaacgagagcttccttgccttctttttggtgagggtcgccttcgtagcgtcatctagagaagtgctacctttggtagtcactttcttaggggccatcgcaggtttgggttgtcgtagcacggacggtgggtgccaaatattgggtccagatgacacgtggacatgtggacccaaacactcgggaatagaagagctcaggtgcacaactaaacattaggtagggaattgtagtgtcttgttatgtgtgtctcatcagtgtacagtgtggcggtatttataggtaatcagacgggtaggtgggtccccaagtatagttataccctcggttacctgctatattcctgaaatatcccttcaatgcgtgttgcacccttgactccacgaagtcgcgcccttgacttcgtcgggacttggacttcgctgtcagggaaagagtttgagctttcgagacgtgtttgtggggttgtagcgagccccccttgactagtgtgacccttcgcttcgtcccctccgaaggctgcggacgaagacctcgatgctggtacgagtcgaagtacccatcgcaacttgt

SEQ ID NO: 100985 - DNA, 556 bp, Zea Mays
ttgctttatgagtcttgcaaattttatctcttttgagaggagaaaaagacgttatatgacatgagcatcatttgcttcatgtcaacgggaatagtttggaggtctctagtagttggattctaatgtaataacaacatgttttatagtgcttgagagtggtatgtcaggtgtttcatacattgacgatatatggatgtttggccttaatggcattaacaaacgaggttgttgaatttgatgattgttgtgcttagtgttctaacatatttggtgaagtgttgtttaaagactggggagatgcatccaaatttgatgatgggaaatcctagtgttgattgcacctatgacgatgccttgggtttcattttatattgttttatgattgttgtcaatgtgtattgttttctttgataaattagtctgagttagaggttgtttcgggaaaaaaaaaattcaagatggcattgatgctactagtatattatatgagtctatttagggagtttgactgagttttatagttggtgaaatgtcttgatttgtagaaatggcagaa

SEQ ID NO: 100986 - DNA, 451 bp, Zea Mays
tgcggggttcgatggggataatgggcgtcgcgatgaattctggcggaaacaggcagtcacactggagctatacgatcgtaagggacaatactttcaccgtgcactaccaatttgggacgaggaagggaagacactgcgaattttggcgtctatcgatcacaccggaagactgtgaaggcctcactgtggttcatggcgcaatttaaagggatggagacctagctagctacccgcggtcacaaggcacaacgttagtgcatggcgaccatgtaacaaggaagtacagtgtggtagaatttatgcgcgagtgacaccacgatggaaacacccgagccgcggtggccgccggtgaaatatccatgcccctttccccggcctaatccgcaaactatgaacagggccgttcctggcttttcaggggcccagtgcgaaattcgatatagaggcccca

SEQ ID NO: 100987 - DNA, 520 bp, Zea Mays
ttcaaactggcctggtagctattattgtaagacaactttgcatagggcaaactcttatcccaactgccacaatgtttaagagcacaagctcttaacatatcctctagtacttggtttgttctttcagtctacccatcagtttgcgggtggtaggccgagctgaaattcagtcttgtatccaagcattcatgcaacttttgccaaaaccgagaagtaaactaagatcctcggtctgacacgatcttcttgggcaccccgtgtaaacaaactatccgtgccatgtacaactctgctagcctggctcctgaatatgtggtcttcattgggataaagtgggctactttagtcagcatgtccacaattacccatatagagtcatacccagtagatgtgcggggtagacctacaatgaagtccttgccaatctcttcccacttccactcaggtatcttaagcgggtgcagcaaaccggcaggcctttgacgttccgcttttaccctttggcaaacatcacacaatg

SEQ ID NO: 100988 - DNA, 298 bp, Zea Mays
gattattcaagaggcaaaagaacaagtgcagaagatctaggagaacttgaggatagcacagactcggcagaagagctatgctgataaccggagaagaccattagaatttgaggagggtgaccatgtgtacctcaaggtgtcaccaattcgtggaatgagaagattcaaagttaaagacaagctatcccctcactttattagacccttcagaatctttaggcgagttggagagatggcctaccagcttgagctaccagataatttgtctgatgtgcatgatgtattccacgtatctcaa

SEQ ID NO: 100989 - DNA, 954 bp, Zea Mays
caaagcctttgataaaatacgtcggtatggtataaaaatgaacccatgtaaatgcgcttttggagtatcggctggtaagttcttaggattcatcattcatgaacatagtatagagatagaccctgatcgaattaaatctatttggaatgtgggaccttagacctgtaagcttgaagtgcagaagttcctcggtaagataaattatttacggagatttatttctaacttagccgggaggattgatgccttcactcctatccttcagcttaaaaatgatgccaaatgatgccaaattcacctgggcgatagaatagcaagaagtgtttgatctcatcagaaagtatttgtattcagctcccgtgttaaaagcaccacaattaggagtaccgtttagattgtacattgcagctgaagataaggttattggagttgttttgacgcaagagactgaaggaaaggagcatgtggtaacctatctaagtcagaggctggtggatgctgaaacaaggtacacttttatcgagaagttatgcttatgcctattttatgcatgcaccaagtgtagatgttatttactgtctagtcattgcaccgttgccggtcaaaccgatgtgatcaaatacatgttgcaaaacccaattatgagtggtagaattggtaaatgggcttatgcacttatagaatatgacttggcctatgaaccattgaaatctatgaaaggccaggttgtagcatattttattgtagaacatcagatcgatgatgctcataacctagatatatcatacctcactgttactccctggactttatattttgatggatcagtttacaatgaaggacaaagaattggcatcgtgcttgttttactaagtaatgtttcctttgacttctctagccgattgaaaacttattgcactaacaatcaagccgaatatgaggcccttttgttct

SEQ ID NO: 100990 - DNA, 680 bp, Zea Mays
gctaaggagaggcaagcataggaggaagtccaactcaagttacatgggcctagaatggggcatgtgaatggcccatgaaagcaaggacaacactggaatacaattaacgcaatacagttaccttcctccttcccttcttcctcaacttcccttctttcttcaagtttgtatggccgccgcgagtctcgatgcagtgacactgcatcaccaaggagcactcatcgtagttggtccttgtcagttgcaagagctccatgacgcggggattggccatgatgctcaagccttctacgatcttgggcaacatgatgtcttcaactttcatcaacctaagctctaataccaaatgttggctttgcctaggaactctcactctcaagaactcgactcacatgacgaacaaaaggaagaagatgaatagtgtttttcgtgacgacatacaccacaaccgcgaactagctctttttcacttcactagacttggctactacaaaatggagtagtacatgggctacaaataggtcagggtgcaccaagtttcatatcaagcctaaccttcatgccatgatctacacacgactcgagtcatttgctcatcctgcatattgtggctcccttcacatatatcaacaccactcaaaccatgtagtcctaaccacctatgacttgcttgatcagcc

SEQ ID NO: 100991 - DNA, 694 bp, Zea Mays
ttaggatgctagaacacgaagcagagaagtgcgaatcaacctgtggatggctggccacatcgagatgccaacaacgtcgaatttgaccgatttgggggaagtaccgaattcacgggctacggtggctaatcgggggccagagttggtgttcaggcttcgtaacaagctaacggagcaggccgcaaactcaatttatagcgtccgcaagcgatggcttcgaattcggggaagataagctggcggccggagaggaggtgagtcaccggagcaaaactactgtggcgctcaccggggcaatgtctcaggcgacagatgggctatctactatgatctactgcgacgtggtaatgcctccaaatacatggcatccttgcggcaagcggcaaactccagcgatggtcatcttgatcggtcgcggggcaagtgggtacggtggccagctcacggtctcatccgtggtcaagatcttttcacccgccacggttatccacttcacacatgcacgaatcgcggcggccggcatgaatctacgcgcggggatcaccggcggcgaggtgtgctgcatctgaagatcttttactactataccatcacgatcgttcatcagtgcgcctgacagagcaagttagagggctttgttctccaatttttatgtaacaacacactaatccgtctgtagaaaagttgctcttct

SEQ ID NO: 100992 - DNA, 426 bp, Zea Mays
actcgtgcactctgctgcttatgttcgtttgagattaccgagctttcgtgctgaggcatgccgtttgtccggtcattagttgcaccctcgttttcttcccgtggtcagggtgtcatcgttttgccgcaacccctgagctcacgacgaaagcgtgcagtaaacaaacaagtgatgccgatgcgtactcggtccctgccgacgaaccaaccgtccacagggagactgcatggcacaaaaccatggccgtccatcgcttaggccttctttggctgcattgaatcttgtatgtaattaatattttcgatgtgactcattacaaccgaggatccgtggcgcaatggtagcgcgtctgactccagatcagaaggttgcgtgttcgattcacgtcgggttcaatttcccgatccaaacggatctctttttgct

SEQ ID NO: 100993 - DNA, 558 bp, Zea Mays
tgatagacggaggcgaatactaccttcatgtcgatagagttgcagaattccttaaggtcttagttatcgaactgcttgccgttatcggctgttagcttggatgggactccgaaccgacatacgatattctgccagaaaattttttgcgctgtcttggaggttattatggatacagctctggcctcgatccacttggtgaagtattcaacgacgacgaaggtgaatttgagattgccttgggctgtaggcagtggtccgatgatatctagtccccaccattgaagtggccaggtatgcacaatgagctttgtgagttacgaaggggcacctgttcgaggcgagaatttctggcatgctttgcacgatcgggttactcggttggccgtgcatacgattgctggccaatagaaaccctgacgtatgactttaactgcaaggggcctcggtcctgaatgtgatccgcatgtacccctgtggacttcgtggagaagctctatgccttggcttcagttatgcatttcaacatgggttggcttattcctttcttgtaacgttggc

SEQ ID NO: 100994 - DNA, 595 bp, Zea Mays
tggccataaatatcgaaccaacgtgagagacgttaacaactctgatacattgtatttatgatcgtaaaaatcctaaagtttaaacataaaatagtgttagatacagcgtaaacgttgattcaatcccaaccaacaaccaccacgtccatgcagtcaccataaatcaagggatttgattagtggagttgattatgggatttgattagaggagttgattatagaatttgattttttatggcaattacatataccataaattaaggggttttctttgtcactttgcacgcggaaaatatgcatacagggtattggtggcaccccagatttgcgtaaaatcctttaacttttagcgtaaatatcctctattctgaccataaaaaacgatccaaagtcaaagatgttgataactcagatgtgttgtatttatgatcatagaaaccatcaagtttgcgcataaaatattggagatgtagtgtaaatgttactcccgtagaaataccaaagccacgtgagagacgacatattcatcatcataaaatactcaaatggaatgcattaaaattgcaccggtcgacataaaaatattatagaatgc

SEQ ID NO: 100995 - DNA, 436 bp, Zea Mays
gaatgtttctgacagtggtcttggggttaagcgcgttttaggggcgtaatctatgtacccctacttacgatacccgacatctagcttctcaaaatcaatggtgaaccaaacaccactgtacttttgtataactggccaaaccgattttagaaatcgaccttactatttttttagttcagcctgagaaagctctagggcagaagcaaggatatcacacctacttaatgaggaacaacaaagtttacaagcaaaccatcaaaggtaactgaaagtcgattcgaagggggtgaataggtgaaacataaaattttacaactaaaagcacaacttgatcccaattaatgattagaacaatataaggcttagtgggagaatggattagttcaacttgcttgagttgctctagtgaaggtatacagaatatggatttagagca

SEQ ID NO: 100996 - DNA, 592 bp, Zea Mays
cgaacagaaggtggataagtacaaatgcttctgtcaggacagcaagggaattctatggtttggagaccgattggttgttcctaagaattccgaactcacaaagaaaatattggatgaagctcaactttccaaatttttcattcaccccggcagtaacaagatgtatcatgatctcagatctttgtattggtggactaggatgaagagggaaattgctaagtatatatctgaatgcgacacttgccaaagagtcaaagccagtcatttgaaggtagaaggtaccttacagccccttcccataccatcttggtaatgggaggatatttgcatggactttattgtgggattgcccaacacctcctggcaccacgattctatttgggtcattgtggatagattaaccaagacgactcatttcttgccagtgcataccacccacaagacagagaaatatgcagagatctatattagtcaaatagtgcatttgcatggaattccgaagactattgtatctgatagaggagcactgtttgtggcaagtttttgggagcagctccaaaagtcacttggaaccactgtgattagaagttca

SEQ ID NO: 100997 - DNA, 417 bp, Zea Mays
gcgacgaagggcagtggcgaagcgtagagtgagtgaagtggatggcggtcggcttcgtgtgggcagggctggcaagcaggaattgttgtcctcgccggctggggcgagtgtaggtgagggggagttgcgaagtctttttgagggtgaggagcttatgctaatgctatttaactatagggagatgggaatcattccgaaggttgaaccaatgtaaggtgtgatgccctcgctgtacgtgtgttactatagtttgtatgatgaggctgtgcgccttcgcgtatccgactatgtccataggggcgttgcgcgcttggtctggcgcatttattatgttggtccggctgcgcctgtagttggtctgtgcgcggatagcttcttggtgtagatttttgcattgatgtaatgcgcttgcgtttt

SEQ ID NO: 100998 - DNA, 463 bp, Zea Mays
ctggtacatgctcctcattatcacattgtgacacatgttcaccttcatcgtttccaacagcctcctcttcgccctggaacgtttaattattacaattggcaacaattaagttgtgaataaaatgtagaataattgtataaaaaacaacacccacatggttgccctccccagtacttgcaccaccaacatcatcacatcctatatctagctccaaacgcccaagcatctccaatagttcatccattgcgtccaaagccttatcactccctgcctttgacatactagcatggtttaccaccttcattgcctttttaagcaacattttctacctatatgattttgtctctccatcctttccactcattttcctgtcatctcttgaaaatatcacatcttgcctagctgagtacgtgtaacactgtagaatgtattccttaggtatcctttctagctgaatgtgcat

SEQ ID NO: 100999 - DNA, 757 bp, Zea Mays
catcacagaagctaaacttatttcatgtctcactggttgttttggtattatcgttctgttatcgttccaaaatgtcatggtccacgtttcactagtcaaaaaaatatgacaaggtttaccccctttgtaccatggttccaaaaaataatgttccttgatttgtgttcctgttcctcgatcccgtcgtttcagaaacatgacttcttagcccaggtctaactacatctgatgggcccaacacatcattctgccttgagataggtcaaacttagccaacccgagtcctcaacttctccgtggaacccttgggtcctagaggacatgggtcccaatcggcgtcgaagtataaggtcgaaaacccaagggccctgagtagctgagcatagatggggggtggtatgcacttaggaccaatcttactactgtgggacacgaggggccctagggccgtataattttaggtgccctatggcttaagaggccttggggtcataccccagagcatgtggggccccgagggcttatatcatctggtgccccagggcacaagggggcctgagagtgtataccattagatgcctcggggcaccaagggccttaggagcttatatagtcaaatgcatcttggcaccacagccccgaaggcttatattgtcaggtgtcctagggctagaggagccttgagggattataacattagatgccctaggctttaggagcttatatttgcttgtcatggaatgtgctgccctatgga

SEQ ID NO: 101000 - DNA, 958 bp, Zea Mays
ccggggtttaccatcgccaaccctctttcgagctttctgcaataaacgatcctgctgctgagccgcacgcactctctccatgagggaagattgaataagcatatgagtctcctcactagcggtgtcgacatagcacaaggcgatccccaaacggtccagatcagcaatcaactgcaaggccacttttggaaccccggacctgctaagggcatcagccaccacatttgccttcctcgggtgataatgaatagacaaatcataatctttaatcaattcgagccaccgacgctgcctcaaattcagctccttctgagtaaaaatatacttgagacttttatgatcggtgtaaatgtcacacgtctcgccataaagataatgcctccacgactttagagcaaaaaccacctcgaccaattcaagatcatgagttgggtaattcccctcatgcttcctcaactgccttgagccataagcaatcactctgccttcctgcatcaacacacagccaagaccaatatgcgaagcatccgtataaattgtgaaacgcttactgctctcaggcaaagctaggataggggcgtctaccaacttgctctttaatgtatgataactgacctcgcaatcgctggaccagaagagaagacccttctccaagagtctagtcaagggcttagcaatgctggaaaaatttggtacgaaacgccgataatatctagcgagccccaagaaactttgaatttcaaagacactagagggtctcttccacttcaccacagccgcaacattcttgggatcaaacgcaatgccctgctaattaatcacatgccccaggaaagccacttcggtcagccaaaatgcacacttcttcaacttgccatagaactgattctcccttagggcacccagaacgagacggagatgctgctcatgctcagcctcggtcttagaataaatcaga

SEQ ID NO: 101001 - DNA, 409 bp, Zea Mays
aatcgctcctgaaaccccaaagcgaggggcgattatgagatgggcaccatagaagccagtaccctagcacacgagcgctaaggatatttgtaaatcgtgttcgagtcctagggaacgtctaactcaagatttatcacggagagaggcagcaagccgtcggacccggtcgaacggggcctgcaactatatgagtcgaaacctaggagtatgaggacggtcaccaacaaaccccacgcttggatcctgctaaaggaaacatggcttcattcggattacctgtttgtagctcaccgagcgccataatcttgaacatcaagagaagcattgtacgactcaacctaggaagagtattaaaaagacgggacacgcccctagatggatcctccgtaatgaactcaggatcgctcgg

SEQ ID NO: 101002 - DNA, 800 bp, Zea Mays
tgtggatcgggacgccatgggtaatcccaataatccctcctactcatggacaaatctatagctagggggcttgcctgaccctggcggttgtgtccgtaacgcggtgtggcggggaggttgatcggagtgccctgaattgctcaatggagctctcttcctccgctgtgaaaccatgcggggccacatgcatgggtcctagtgtcgtcatctcgggtaagaacctttggcgtccattagttttcacgtccgtgtggggtatcttcatctagatggggattttaggcttgggcgcgtcgataggccgctccggcgaggtctaggcctcaggtctgtgccgccgccgtgtgtggggagcgggaggaggatgatagcgcgtcggtcgtgcgatctgtggctgacggatggaattagatcgtgtccagtggtgatccagtgcgtgcgattgggatcgtgcgactgtgatgagtatgtgtaatgcccccttcgaccagattgaatctgaatcgttggatgcaaatcaggcggccagggctgtgtaccggttcaagatttagtctggtgcgtcagatcctaatcgagcggctcggggtgcgtgcgcgttttgctgccgaccataattgctaaagggcccctgaagatcatgcgaattaaccctcggtccactactgcaaacaagtaattgcacttaagtcctggtttttacagatttgaccctgggaaatttcagaataataccgcagcccatatagtgaataaaatgagacagaacatagtttctagtataaaaataatgccaagaa

SEQ ID NO: 101003 - DNA, 748 bp, Zea Mays
cagctatcgaagaccccgcggcggcggccgagccttcgtaggtgtaggaataggggttagggattgcatgtgaacttttgtgtgtgtgatactgaacctcggttgctgcgaaggttccgacgtttgggcctgtgcaagcaaccactactgacaatactgattttgcggcggagacttcagttgtagtgcccgccgatgatagtgtgtctggctctatgtctaaatgttttgagtctaacggtgagtccgggagttcatttccttggatggaggagtacttggatgaaggcttagattattttgttgcgttggatgtggctgcggcggaggctttgccacatgtggagggtgccgaggatcttcctggtacgagtactgggtgtaggcggtgaagggtggtgggaaaatagtgtgagggtgaattttcacgtagtggcaggcgctgtcgcatggggatggagcgtggccgacttcgagtagacgtggttggtaggcgagaattgttgtcttcgccgaatggggcgagcataagcgaaggggatcttcgggagctttttgagggtgaggaattgaggataatggtgtttaattacaaggagatgagtatcattccgaaggttgagccgatgtgataggcgatgccctcgccgtgtgtgtgtaataggcgatgccctcgccgtgtgtatgtaattgtaatggtgatgtggcctgttggccgtattcgtacacttgtattgttctggctgtt

SEQ ID NO: 101004 - DNA, 795 bp, Zea Mays
ctgctaatgacgggatagggaccgacgaaatgcggtgctaactttcctttcatttggaaccttttgaccccacgcgtcaaggagaccttgaggtatacgaagtctccttcctcaaatctgagttctctccgtcggttgtctgcataacttttctggcgactctgggcttcaagtaacctcttgcggatcagggcaaccttctcttcgacctctctaacaaagtcgggtccttccagtgtcctttcccttacattggaccacattaggggggtctagcactttcgtccatacaatgcttcgaacggtgacatcttgatactggcctaatggttgttgttatatgagaattcggcatacggcaaactagactcccaattcatgtcgaacgtcaacacacaggctcttagtaaatcttcgaggaccttgttgaccctctccgtttgaccatctgactgagggtgataagcggtgctgaaatctaacttggtgcccatagcttgctgaaggctcttccaaaaattttaggtgaactacgtcactctatctgacactatcttccaaggaataccatagagcctgactatctctttaagatatattcgggcaagggtggctcctccgaaagtggtttttactggaatgaagtgggccaccttggtgagacagtctattattacccagatagagtcatttcctttttgcgtccggggcagtccggttacaaaatccatgcctatttcctcccacttccattcaggcactgggaggggttgcagtaggcctgcaggtttctgg

SEQ ID NO: 101005 - DNA, 541 bp, Zea Mays
cttaggcattccccagccactagatgtcggaaatattctatttgccaagtactcttgcactagatctctagtgctgatttcggctgctaccactctgaattctacttcggctacctagcatggggagccaagctgtaggtggcacaagggccttgtcatcctgaagctcaatttcaatggactcatgaccatagtcattagcttatcccttctcttctcatctacctttatgtaaaaccagtcgctttttccaaccggtcagccacttggtacgatagccgagaaccggggccttcgtatccttctgatacgcaaagttatagcagcctaagttctcatgaagaccatctgctctggccttcgtttgatagtgcagctcgtgcacccggcagaaagcttcggcattgggactcatacactggcttcggagggcccatatgtagacactaagtctaacgattgcattgggtgtcagctgatgaaagtatatctcaaaaattttcaaaacttctccaatcatctcatgcagggggaaacgaag

SEQ ID NO: 101006 - DNA, 434 bp, Zea Mays
tcacaatagagatggtgtcatagtaaatgattacactatttacgctcagaagagcatcaacatcaaaccatcagagatgaagtctgacagacacaagaaatatcccttagaggagaaaagggtgttggactagtttgacgttagccatcagattggtctgatgataggcataagactacacaccacaggcgcacccccaacgatcgacaatgactagtgctaatataatagccaatgaggtgttgaaccttgacacgtgaggcaatggataatcatcgaacggtccaaccatacgtagagattgttgttgaagttgcagcgactatatctctcattgggactataaatggacctcaaccgaccattgaggggtgtgggagctaaggagcataccaagagagtcaagaattatctttaatagttttagacaccaa

SEQ ID NO: 101007 - DNA, 732 bp, Zea Mays
ctccgacccataacggatacccccaatgtaagtaacaccaacgagccccaatctcttaaagcttacatagatgaacaacgagaacaaatgcaacatatcatagggggtatacaaaaagattataaaaggctagtatgtgcgtttgataaatccactgttgcaaattttccttcgtacgaggttgaattgggggaaaatacacataattcatcggctacaggttgtcacgaccagtcacaacccatttatgggatgccgatggacagatacccttatcaaccacaacctcctacgcacatcggcaataaattagccgatctgcacatgaccggaccgtctgcacgtgagcgcggaccgttcgagccggcaatggccgggcccattttcaatgagttaccaaaatatgcatccgagccgccacatattacacaagccctaaaccacccagacagaccgtccgcatatgatcacggacggtccgcacagccgaccggatggtccgcgtatccgaccggacggtccgacatagggatgctggaggaagattgttacctaaatcctcatccgtctcagcaacacttcccatcacactatacaatgcaccagcccattaataaagaatcccaagcccatgggagcgagtactttccggctccgcctagaaggccggaaaggaacggtcaatcctatgaaccatatagggcaaatactaatgcatcacataactcaaac

SEQ ID NO: 101008 - DNA, 390 bp, Zea Mays
gtgcaaggttcttactaatccttgtttgtgccctacggtaagagaagcccacgcaaggtccaagcacctaagacaggtaacttcgtagatagttgcatgccttctacacgcaaaagtggtgctccacttctggcctctctcggatgctccctgtcgtctttactatcgaggttctagccaaaaggttgtgggcctcgtccccttcagtacaaggcgcgggccacaccacaaacacggttgatgtggtctcacaagactcttgccccacttgttacaattataacgcctaaggtgttgagggttgtctaacctcactcaatcagataggaacaaacctagtgcaagcactataaagctgtctaactaaactaagcacttcgcaaagcacct

SEQ ID NO: 101009 - DNA, 343 bp, Zea Mays
caacggtgtcatatatttgtgaacgaaggtagtataagtagataatggtttgccaacttacgagaccgaaggcaaactggatttatgtaatgtggtaccgagttacgcggctgagatgggcagtcagatccactacctcttgttcctgtttctctctaggggcatgtgtctgaacaaaggaaacaaaggtgattggagggctaaatttcttttgctattcaaattaaattgaaaggggattttaatccttccaatccactccattccccttgcctgtcttgggagtgtcgccgtctcggggcctcggggacgatgccgcttgcccgcacaaggcccctcatcg

SEQ ID NO: 101010 - DNA, 1235 bp, Zea Mays
gttctcttcagccaattgctaattagagagcagcatgcaatacctgtagctaggatatactgtgtgtgtgtgtggaggggggcctggatgaaatatagtggaaaacaatgcttgcatgcagattttattatctgtgacaccgccattagagagactcgaggttgcatgaaatactcgtacctttcacacactctctctctctctgtttgccattcaattggaggtgtacttgcatgctgtggtgtttaagcttaaactgtacttggctctagatgcatcccatgctgccatgcatggagcgagtgtcattgtccagacctgattgattccattaatggagggctggagctccaagtcacgtactcacatggctgctgtagtgctgtcgccgcctctaccttccagaacctaaggatttacaaggatttcgattcatgatgatagggccatcacccatgctgctgcaagagatgaggcggtgagaggcagataaggatgcaatgaatgcgctccaagaaaattgcaaggcatggggataaacggataactgggaaatttggcatatccagatgtgatactggatattttgatcaacaatatattcaactacggtatcgagtaacaagttttagcatagaaaggttcccgccgtgaaaaaaaagtagaacgcaattaactagctgtgtgagctgcagacttgtaagcaatgttactcacaggcagtagcgccgcggtgttgagaagcaagccaactcgtgcgcttccttggcccttaggagttgagatatgccatcgtgctgaaaaataggatgattaacagcaataacgcagcaagctaacaatgttgagtgagctggattttgtaggggcataggccttggattgggtacgaattcttaacatatttccattagattcagagattccagaatgtaaccagttccgatgggattatatataggatcgaacgaaactcaagacggatgtcattaagggtgactaaccttctttctcgcttgcaggcattgaggcatgtgcttgctgaagttgatttggaccggtttgaccacgttgagcgcatgccagaccctatgccaaagccagcttgctaattgtgttgctctctctcaccacagtctagaccatgactttgtagtttgcaagcatctgttcatcacatgtttgactagtaaccgaaaatgtcaacaacggctgctgaggccaagatattgctc

SEQ ID NO: 101011 - DNA, 703 bp, Zea Mays
aatcacatttggtcaagtgggattttgtcaaggaatacatggtctagaggtttcatggcaaaggagattcgagtggagatccatcctgaggaaactcgtcatcatcactaataaaaatgcaggccatggtgaggaccctcatcatcatcaggcggcgaggcatgtctatgatgcatactatggaggtatcaccataggtaattgtccaaggcatagctaacgttgggggtgacagtgatgatgaggatcatgctgagccaaccttattggaccccaaggatagaagatttttgagaaaataattagccacctcaacaacattgaccttctatttggtaggctaaggtgtctatataatttcaaataggtgaatcaaacaataaaggatccactccatgagtaatacccgaaggaataaacgatgttatgttctgatatttagatgatgatgctaaaggcttgttttagctgaactaacactaactttaatgtgttattacgtatccttggttccatgcttccaaaggataacaaagtgcccaccaatacctattaggctaagaagctgatttggacagtgactctaatccttcaaaagatatttaattgcactaaccgctatatcatatctggggcacccaatatatgaaattagagagctaataacatcttggtgcaagtcaatataagaagaatgtcttgt

SEQ ID NO: 101012 - DNA, 333 bp, Zea Mays
gtggtagtagtagccaatgtcaccttatgaagtaagacattgtaatcaagaatctagaggaggcaccgagggtgtaaaatgagcacaatagtactttgcttactacaccgcacaacaataaaattgaattagtacaagtatcattttagaacaaatagtattttgaccatttagtgctgctaactaattgcatttatagtcaatattgcagaagctaaatactcagacaaatgtcttatcacagtggcagtcaccgccaccatcaccaccatcgttgatgttgccgcaattctatcatccaggagccgaggtttgacgaactttctcaaattt

SEQ ID NO: 101013 - DNA, 502 bp, Zea Mays
ggagtatccaccgacccaatgaaaatcgaggctattgccacttggccagagccctcctgtctcaaagagctacgtagttttttgggcctagcaggttattatcgcaaatttatcaggcattttggagtaatctgccagccgctcacagcactcctgaaaaaagaggctctatttgtttggaccagtgaccatgttgtcgcattctgtacgttgcaaactgcactttctcagtcaccagtgttagcgctgccagattttgctgccacctttttcattgaaactgatgctagtgttgttggtgtgggcgccgtactcatgcagaaaggccatcccctcgcatttcttagtaaggccttgggccctaaatcgcgcggattgtccacctatgaaaaagaatacctcgctgttatcttggctgtccagcaatggagatcctatttacagcaccatgaatttgttatcctgactgaccataaaagcctcacgcagttgaataaacaac

SEQ ID NO: 101014 - DNA, 301 bp, Zea Mays
atcactccctactctgtttaaaaatagtaaacctctcagtgcaccaaagtaaggtagggtttgccaactaaatcatttttagcctaaagttaaagaaaatagaaaaggtagtttaaaataagaaccagggggcaaccacatttttgctagctcacttatttagtatagttcactggaaaattttattagaccctctgttagtgcaaaagaaatgcatttccttttattttatgaaaacaatgaaaacttaggaaaattttagaaaaataatcctgaggaaaaaccacccccaaccttggga

SEQ ID NO: 101015 - DNA, 662 bp, Zea Mays
ctaagatcggagtcatggttaaggagttatgatctatggatgatctacgtggttaggatattaaattatagattgattattgtacatcatatgagaaaatatactctaaataatcaattcaactttaatctagattatactttactagagatcatgttttaaccccagtatacctatggtcggatttgatttaacagagctaatctagtaggtataggataaataaatatctaactataaaattatgccatatggtataattaataatgttaatgcgtagtagatatttatacgaagttatcgcaactggaacggactaaaactgagttaaaatgtacaagatatgcatttcctaagattcatgaattattcttatagttaaaatcaatttccacatttattttattatttctgcactggctggactacgactataaattccagagagcacagggtctactacataaatagttccaggactcagaacaacatcagcacggactgcgggttgaatactggaaaccagggggtttcatatgtaaaattgcgaggccgaaggggtatggacatcacacaaccgcttgatcagatccggacggtccagattagattcatatcttaagcatcccgcgctgaatcccgatcgcaggattcgagaccaa

SEQ ID NO: 101016 - DNA, 634 bp, Zea Mays
tttcacttctctatattttttgataaataattgcaaaatagagtattgttggagctattttttaagatagagcaatgatttaatgtattattggagacgctttcagtattctttaataattttagcataatgatgggaaaaagatcaacatttgtaggcgtataatagcagattgcccatcagaccattactcatgagtaccttggcaacaacctacacacatttacaatttgtgcatccatgatggctccgttcattgtcatatctctaatctatgatttagccactcccttcatctgtttcttgatgcaccactgtgcccatgtgctccgtcgctccatctagacccaagctcctgaatccgccaatcaccacctacagcactcccccaccttctgcctcttgcctcccccttagcttctcttggagcacctgaagctccgcagccgcgccatgctacggcagatcgccaacacgagaaggccaacaacagatcgctaataacagattgtcgtgatacaacagatcgccctaacgccacaggagagggacgcctactacgcagcgatcgagtgttgtgtggtgagcgtcgtgcacgctaggctcaaccggatcgccgtgcatgggggtgcgc

SEQ ID NO: 101017 - DNA, 274 bp, Zea Mays
cattttttccagccaaagccatctaatccttggggaccagcccataacttggaggttaggtatgaggccaccaaactgcaagggtcttgtaattttatcccatgccaataaacacttgggcaaatagactcttcttttgtcgatgctttgatgacccatgtaggcaactccaaagcaagcatttggtgaattggtattgcagaaaatatatcttttactacagctaatcttcctgccttatccataagtgttgctttccaatgtggaaggttac

SEQ ID NO: 101018 - DNA, 288 bp, Zea Mays
gcttctttagcttcttatcgtaatccatcttcagggttcgataggcttcacgagtgttggcctcctcgccttctgctatatcgagacactcttggagggacgccttctcctttttaagttccttgacctgctgctctaagctttccacctgggagtttaggtgggtgcagtgggaggaaaggtcgtcgtagtggttatcgagagtgtggagatatctggccatgtagacgatggtagggtcatcctcggtaggatctctccctgatagggcctgaagtattttcctct

SEQ ID NO: 101019 - DNA, 406 bp, Zea Mays
gtcgattacgatgaggttggtatttatttattttttgcaccagctgtaatgttatagcggtacttactatttttttgtaggagacgaggaaatgcagttgggagagttacgacgacaaaggagaggtgatgcgcacaatagagtccaagagactaatgggacagaagatgcgttgtggatctcagctcgttgattcgtacattaacgatcgcatacgcgacatgcatagggaagcaaaatctgccttttatgatagctcgaagcgtgcagagtataaggaggttgaaggcggcagatgagaagagagcacatgatgcaagggaatgggaagcggctcaagccgagaaacagatgttggataatcttgctgatcgcctcaagggaagtgagtgagaaaaatgatact

SEQ ID NO: 101020 - DNA, 728 bp, Zea Mays
gttgatcttgtgatgcacactgaaaagaatgtcatcgagacactttgggcaacaatcatggaccaaaccaagagtggatctagttgcgttatgtgatagaccaaaccaagagatgaagccgcatggtagtggaaagacatggagaaggtctaaggctgattttgtcctgagcaaggcccataggagggtagtactagagtggaccaagatgttaatgttccctaatgggtatgcaactaacctgtgtagggggtgaacttatctactatgagagtcctagggatgaagagtcatgactaccacatatggattgaacgaattcttccggcgatggtttgaggctatgtccatgagcatgtatggctagtgcttgcagagttgagctatttcttccaccagctttgtgcaaaggagttatctcggactttgattgcagacttggaaagaatggcacctgcggtattgtgtaagttggagaagatctttccacccagcttcttcaatccgatgcaacatttgattctgcatctctcgtatgaggcacaaatggggggcatgtagggacgttggtgcaatccaattgagaaaatgtctaaagactatccaaaagaagtgtagaactaaatgcaacatcgagacttccattgtagaggcatacatagtggaggaggtgtcaaacttcacaacaactcactatggagacaaactcccgagcgtgcataatccac

SEQ ID NO: 101021 - DNA, 513 bp, Zea Mays
gtcgagcggaatataaacaccaagggtgttacagtgatcctacgtgttctagctcaattggtcgggcagctaagcatctacaacacatagggatgtggaaacaagaacgaggaggtcgtgaacggacctgtagcgagctagtcatggtgagcactcacacggcagtgttcttgactaatttgggggaaatcccaaattagagctctctggtggacaatccgagacacgagtgggtgcgctggatgcttgactacctagcggagctaatggcacactcaatttatagggcccgagggcggtggctattgaatttgtcatggcgcgctagcggccggagagggggaagagcactggcgtaaaggattcgtggcgttcaccgtggcaaggtcacctgcgacaaacggacatgcttaagacgagttactgcgacgtggtaaagcacctaggcatgtggcacacggtcgataggcggccaactccggtgaggaccactttgcccgaccgcagcccaag

SEQ ID NO: 101022 - DNA, 453 bp, Zea Mays
gtactcttcgaacagcatcaaagtgtacatgtaaaattcttgaactccatttcacaatcagttcatacagtaggtctatgtgtaacatctaatccatttggttatttgtttgctatgacagggatgtttggacgatcttccagcgaatcaatttcaaacgtcttcaaaacgtaaagtaggcatctgtatggaatttacacatccgcactttcttacattttagtacctactacttcatcttgtagttatttttcatcagcgtgtatatgttgagccacaaaatcaagaattcaggatggacaatgaaaaaacttactctcaggtatgattgcattacattgccttgtttgcttcagattgttgtggctgcgctatggctgtttctacaacacaacatagttattttacaatgtacagcagcagccacagcaacagccccagcaaacagtagcg

SEQ ID NO: 101023 - DNA, 632 bp, Zea Mays
gtaatacccactttgtaataagagtatagaaggaggaattatattcttttgcatatatgtgtgtcatccctatttgtcatcataagtgaacactatattcaaaaacaaataagtaataaaagaatgtactattaatttgtgcatcatgccgaggtttgtttgtttgtgcattcactcatgaagacaatgataataggaaaaaaaactaaagtggaattgggcattaaacctaatttggaaattaggattttgagaaaagaagaaaggagactataaaaaaataacaataatactaaaggaaataatcatattaaacctcctttcatactactaagtttattttcaatatttaatttgagtgtaagttcacaacactgtttaaattcaaatttaaattttaaatagtagggagaataataaacaataaagttgtaacaatagaaatttatactcacattaggatggtattagctatttgggaaatctgaaattccaaaacctagactcaaattgaattggaaagtagaaagttaaaatagaaaatggaaacaataaaaaaaaaatgggacacgcctgggctaacttcatcccatcggcccatctccaatctccacgcagccagcccaccatcc

SEQ ID NO: 101024 - DNA, 547 bp, Zea Mays
cggaggtgaaggacaagcagatgggttgtggaccaaggtaccatggctaaggtggagaagagagtacttgcaagatgttgatggactaatcaatttgtgaagattcatacaacgatgaagattacaacattagaagatgtgatttgaggtcatcggtttaactcatatatgatgagcttattcaaatcatatgacacaagggtttctagctcaagacaagtggagaaacatggtcacaatccaaggaataggtatcaaagaaagaacgtgaaaatggctcatagttatgcaagactttgatataaatgaccaaaaagtgaaaatctagaaagaatcagagtttgggttattccagtgtttggacatgttcttggtgaccattgcagcatattagaactcaatgaggtaagaggattacttagatttaaagtttggagttccaagtgtctattgcagaataagtttgatttttatttgagttcttgagtttaggaatcgccatactatcaagagggatccacaaatgagtattggtacttgcactaaa

SEQ ID NO: 101025 - DNA, 271 bp, Zea Mays
cctcaataactttggttgctatggcttcgtaacccgttctgaagtaagcaattcagtgccaacattttgcaagagatggctatgggcctagatgcaagaatggttttatgtgaagaatgatttggttgaaagggaagacatcacgaggattatccagcgtcccatatggtctcacttcgacattaggagaccatctattgcccttggaaacgatgtacaagcatgccaagctgcttttaacacggtatgcacctacatatgcactagggac

SEQ ID NO: 101026 - DNA, 719 bp, Zea Mays
gccccttaaaaagaacggggcgtacacttacttcatcatcgtgagaaatgtgagaaattcgctgttcatataaaatggcaccaccactaacaaactatatctaataacaagatggacaaatgacgatgatgtcgctttacagcaaagtaggaagtagctggcgaatgttcggagatcccgcttgcctatagcagagacaattctgtgcagggtaggcggcggagaatctgatgggcgtcccgtccccttgctcagcggaatgcgatcagcgaaggatcgccggagatgcgtggcggcacgtgagttttttttaatcattattattattagcttgtgcgtttggcctcttcaggccgggcctgtcttcgcgttccatttcctggagctacccacccgctcagcaaaattgactagagcgggtgctcattgcggaccactgaccggctgcatgatctgtttcatttatttatcctaatcctctggtagtcaaatggctagaagcagaagaaggttctttgagtgtttgacaaggaaatctgtgcaagacttgagacatcatgcatgaccagaccagggagcagtgttgattgggataaaggaagtttcttcgttgctttcttgttttctggggggggaaataattaaaaaaaaaacggagcacgcagcagtttctgatgtggatcatgtgctatatatatatactcgttttgcttaatgga

SEQ ID NO: 101027 - DNA, 335 bp, Zea Mays
ccaccagaagttggaaatgttctgcttgccaaatattcttgcaccaagtaccgagtgctaatatgctctgccatgactctaaattctacttcgaccaactggtagggggacccgagctgcatgttgcacaagggctgtgtcatgccgaagcttaagggactcatcaccatactcataagtttctccctcttattctcgtcagctttcacgtaaaaccattcatttgtccagccagtcggccacttagtgtgataaacaatcacaggagtcttggtaccctttcggtatacgaagttgtatcatccaaagttcttgtgcagcccatcagctctagc

SEQ ID NO: 101028 - DNA, 441 bp, Zea Mays
gaccgcccaagcgatgtagtgggatagaaattacagaagggcataggaaacttgtcctagacgagagtgggaaaaggtatcaaggttttggtgaggagcataactggactcacatatgtggcttgttggagcttccttatgctaagccattgattttgatgcacaacatcgacgtcataaatcaatagcgtaacttttgccaagccctcataaatacatgcatggatttccctgataaaacgaaagacaatgacaacgcacgcatggacttagccgtgatatgtgatcgtccaacccaagtgcttagagaaaacggaggcaaacccaaagctgactattgtttgaaacctaagcaacggaaagaagtgatgaagtggatgaaggatctgaaattccctgatggttatgctgctggttttagaatatctgtgaatttgaata

SEQ ID NO: 101029 - DNA, 564 bp, Zea Mays
ttattcaattttaaatatggttattcatgtgtactaatgagtagagggcagaacatataaggagatcaactcttttataagctttataacttgggtattacaaatcccacccccttacaaagaatctcgtcctcgagatttaggaaggactagggaaaaggtggggaaaatctacgcgtagctcttcttctctttcccaagtagcctcatcttctctatgatggctccattgtactttgcacatttttatcactttacttcttgtgacacgagtcaaagtatcaagaatcttgataggatattcagtataagtcagatcatcttgaacactaagatcctccattggtagctgctctttaggtaccctgagacacttcttcaattgcgatacatggaagacatcatgtacatccgcaagatgatcaggtagttccagttgatatgcaacctctcccactcgctttaggattaagaagggtccaataaagcgagggaacaactttcctttgactttagatctcctcatgccttggattggtgacaccttcaaatatacatgatcac

SEQ ID NO: 101030 - DNA, 422 bp, Zea Mays
tatgaattgtttttatattaaaaactcattttccaattcattttcctgattttataattctctggacggggcctcaatttccagaaagcacaggggctacggtgcaagactccacagactcagtgaatagcgcccccgggacggcgggttggtttcctgaaaactgaggggcctaaatgcaaaacgcgcgcagcgaagaggtatcaggtgttataagccgttggattagggatcaagcgcccagattagatcacgaatcgatacgcgatggaacgatcccaaccgttggatcaacggcgagcggccaggatttaaatacccgagagtccatcctatccgctgatgaatagatctacggtcaccgcacccgagctgaatcgttcttttgacttctaatctccgccgttgaacaagaatctaac

SEQ ID NO: 101031 - DNA, 341 bp, Zea Mays
atacagatcagtgttgtttgctacctggcgcgttggagtccagtgcgtctgccgcctccgataaactcaagtccatcggtcagtccgtcgatggccacgatactgtcgctggtctcctctcgaacctacaagatcgtggattatgtcgaagtagatacagctcgtctatctgcacctggtcttggggtggaatttgggtcaacacatgaccatgttatgtatgcgctgtttcaaggcctgtttcttgctccctctttacaatatttcatactgcacttcttagcgatagaactgctgaattttttaaggccagcaaacagataaagtgaacttcaaaaaat

SEQ ID NO: 101032 - DNA, 521 bp, Zea Mays
agagtggattgtttgttttcaaatatattgaatgggaaatatatgcttggtaaaaaaacattgtggcattgttcatctctgacggcttaggattctttttgaaagtggcggctcaggaattaggatactacaacaatgttttaggcttttctcttatttatataattgaggttgcatatactacggctataaccttctaaggggttagaggtggtcaatttgcctaactgaaactaggacatcgaatttggatacatcattgaaggttgcctttccccctcacgattgttgactgggttcaattgcttgccctgtatcactccttttgcttgggacaaagctttgcctagcatcaactacacaaatgtcttatcatcaatcccccttcgctacttgtatcaagatgccgcatgaagatgtaaccaagccggtggaaacaacgacatccaagaggagttggtgctctccttcctctcacgaagaatcactataacacaagaattccagagtttaccctccga

SEQ ID NO: 101033 - DNA, 636 bp, Zea Mays
gccttaaacaactcaccacaatccacgcgagtacaagctctagcgtatctggggtcaacgcgtgcgcggccatcaggaccacgacaacacaacaagccttcgtaataaatgtaacatgcacaattatggctcggtaatcggggtacacgataattccacacaacgtgcgcatcagacgcaattgtggctcaatgatcacggcagacatacagtgcctacagggcatgcgaaaaatacgtgactcagtgatgtcggttcgactcaacgggagctgtccgaataaacgagagtgctagcaatcacatgacgcagccaagttcgtacgacacaaataatgcgtcgtgttgccaggacgcagccaatgcatagttgatgccataacttagccgattaataacgcagcctggtcgacgtgtccgagtacccactatacaatttaatcactcatcgtgagtttaaaagctcaacacaatataaatatttagagcgatttaagaatgcacaatatatccttcatatctttctgctaattatttactacggaaataaaagcagaaaaataataccagatttaatccataaacataacacatctgatgtaaaaaaaatgttctcatgtttaagcacacatttttc

SEQ ID NO: 101034 - DNA, 943 bp, Zea Mays
caaaaccattagtctataggttatgttgatcatcaaacaccaaaatcacttagtcaaatgggtcagcgtccattttccttacacttatatcttctagatctttccgcctagcggtggagccagagctcgattgccctcgacatgtgtctgggctcactattggttagcacgaagagcatgaggtgcatccaccatcatcattgtcctcgtcgtcgagctcgagcccccattatcatcctcgtcctcgtcgtcgagctagggcatgagatcctcagggtggacctattgttagtggtcacgatggcgctgatgacccataaggcgtcatcgagacagaggcgcacgaggtaccaactcagcgactggaagacgaatggcacaacaacaacggctaaggcgagcgatggagtgaggggagccatgacgtagagtagacgccaggagcgcgggaagagcgccacaacacccaagagctccatgataccgtcggtgaagaagtagaaggtggacatcttgtgcttgagctctctaaacttcttgggtctgccattgatctatacccagcaccaccgactccacggccgtcatcgagcctgaacctagtctctctcgtcttctttgtctctaaacaacgtttgtgtactctaacactgtcatggtctatttcaacccatggaccacggacactaaccatacatgtggagttgagtttggtgccaaaaaccttgtagtgtcgtattgtccccccaatccacgaatcatgtatgacagtggtttcagtcagctagttatttcacaggagacatggtatgccttttgtcagcatcctttgatgtctcccttttgtcggcatcctttgatgttttgtcctctgatcgtgggcgtacggagtgtggctcgtgtcgtgtgtgtgttttgttggatgaacaggctgttgagtttc

SEQ ID NO: 101035 - DNA, 336 bp, Zea Mays
aaggaagttgcttcagccgctcccagtgagccagcgccggagaggaaaaagataaaggttcttacgcaccggccacgctatattgaaccggccacagtgcctgaatatgtcggtgaaacctcttcggccgccgaagccaagaagccgactcccctaccgaatgttgaagagccagtcataatgccggaaatggagaaaatagaaaaaccgaaggctacagaaacaaggacatatgaaatttgaagtcctttagcaaaaattgaagcaccaaaaagccagaagggtccagcaatgacccccaaaagaaaaaaggatggttaatgtactggatgtttt

SEQ ID NO: 101036 - DNA, 458 bp, Zea Mays
gtttatgaatttatttttgcactaaaattcaattcctataattatttatacgattttccctgccctctggactgggcgcgctaaaacagataagtgtagggactaatttgaataattcaccagactcataactcccccgcgatggaccgcgggttaattccctaaaaaccgaggggctcattaattaaaccgaccgggcgaagggggtaaggagtatccagatccgtccgatcctaaacctacgactctgattagatcgaccccaaaacgaattggtatgtgatctgagcccacagatctgtatccgatggccagccttccatcacatccggcccgccccaaatccctatgatcgccatcgaacatcccggataactctggccgaaacgatttgcatcatctaatcgccaccctccaattgtttatcgacgaccagaggccttcttcccttactcttc

SEQ ID NO: 101037 - DNA, 565 bp, Zea Mays
tcatcaaacccttgccggcatcagtacaaatagctcgtttctccatattccctatggcccttcgaagctgtgtcatgaaccagacccaattatccttgctctcagaatccatgaacccgaacgcaaccgggtacatccaattgtgtccatctaacgctgttgcaactgctaggtgaccattccatctaccattgagtgcagttgaatccacactaaggtaaggcctacacgcagcacgaaacccttctatacaaggctcaagtgcacagaaaaatctatgaaagtagaccttttcatctacaacttgggtgtctatctccaccacactatgaggggcttttatcaaaacttcttccttccacctgtacaacatactgaaactatcatcccaattgccatacatctcttttagagcttcttgcattcctttccatgtcacatcataactgaccctacagttgtatgtgtcttgtaacctcttttgcaaagccttagcaccaagtgaaggctcatttcttagtaaaggcaaggccttctgtgctacccatgcttgattgacattccc

SEQ ID NO: 101038 - DNA, 337 bp, Zea Mays
ggcgaggttggcgtgccttgtctggcccgatcaaaatattgccatgtctgacccttcccatgtaggcacggggcacctattcgccacctaactgaacaaagatgccacaatacgatagatgtttagctttcgggattatataggatgagccgatgatgttgttgctttgtgatcgtgacctcatttacaagacagttgttgtttccaaggctgacatgaccaagttcaactacttgggaatattctaaattgcttttcctatgggaaattggtctgtttgtacttgcgagggagtgggatattgtgttgctctgtcttttttagttttatatgttca

SEQ ID NO: 101039 - DNA, 505 bp, Zea Mays
ctttaatctactacatattcctttagtttctttctttggtgctttgacgagaaaagcattcgagtctctctgcgaaagtgagatcaacgcctgctgctcaaccaatttctggtagcagcagacgcctgctgctcaaccaatttctggtagcaacagatttggcgactccgctggggaacgatttgtaatcgtttcacggcggcaaactgctggtgattggcgtcctcatcgccaatcatagtcggggctatggaggacaagacagcgaagaaagcggcgccggacaaatctgaagttcatcccttgaacgtgatcaaggtcacgatggaggaccttacagaggcggaccggaaggagattgaagaagaaatcgcacgagagatggaggagaaacggaacgagagattagcttgctttcgaaaaaccaagaatggtgtgatcaaacagattggtggggcaagcacgtccagcaagaaggtaagttcatctgtcacttgtgaagaac

SEQ ID NO: 101040 - DNA, 353 bp, Zea Mays
cacacacctcaggggggaaacatctaaaaccctaacaccttccaaatgggccatttaagcacatagagagaatttgagaaaaaaacttgggaaacatgcaaaattttgatatgaaccaattcacaaagttttagtgcactaaataacctacaagacgtagtaaggaagattggtcttttgaattttccaaaattcccaaatcagcccatgaactaatgccctatggaaaaattcagaaattcggaaatctgaatttcagccctttccaaagatcttctgcgttctctgtttttcaaaacttgaatcaaataagtccaaatataaaagtagcgccaaactaccttgaacacacc

SEQ ID NO: 101041 - DNA, 283 bp, Zea Mays
gctggacatgagttccctaccaatatgatagttataaagggcaagacgtagatgtgattctgggtatcaattggttagcccagaataaggctattatgaatgctgatcaaaggactattcagttaagtcatggacaagaagaagtcaagttgtccatcctgtatctgtcctagttaaagtatctggacaagtttttgaagccgtagtgcaagagatacaagacatcccggttgtgtgtgagttttcggatgtattccctaaagatttgcccggattacctctg

SEQ ID NO: 101042 - DNA, 564 bp, Zea Mays
caaaggaggtggggatggcagaggtagacggcgatgactccatcgccatgagagactcggtggagacctctcactaaaaaacactggctcttataccatgaaggaattaggaagcgttctctactgcccttgggcagccgcggatgtgtatttatattggctgacaaagcagcgaaggttacatcgtaccaaaccctaaccggacgctaacagaggccgccgtatctcatgcgatatcagcgccaacaatcaaggagatcttgtgctatctatgtccggttggttggaaagaaatcaagattacaatctggaatatatctgtctaataccctcttctcctgagcatggctttcgtgttaagtctgtcctgaagaagaagccagaagaacaattttttgcttggtttgacattttgagttctagatattgaaaaaagtttgggcactcgacgagacacatggatgatcttgtacactttctaggaagagtagtgtgaggtcccccaactccacgctactgagcttgatatcgaggagctggagttgcgaaaatgcctccgctgac

SEQ ID NO: 101043 - DNA, 622 bp, Zea Mays
aaacaccgacactcggggtgcgactttttgtctttcctggatgcctactccggttttcatcaaatccggatgtctagggaggataggaagcacaccgcttttgtaacggtagatgggctgtactgttatgttgtgatgccttatggtctaaaaaacgccctgccaacatttgttcgggcgatgagtaagaccttcggggatctgatccaggacaaggtggaggtttacgtcgatgacattgtggtcaagactagaagggggtcgaccgtagtggaggatctgaccctggtctttgacaagctgcgggcaacccgcaccaaacgaaacccggagaaatgcatcttcggcgtctccgcaggaaagctgctgggtttcctggtttcataccggggcattgaagctaacccagaaaagatcaaggctatcgagataatgaggcctcccgcccgtgtcaaggacatccagaagcttgcgggatctctggctgcccttagccgcttcatttcaaggttggctgagagggcagtgcctttcttcaagcttctacggaaatctggcccttttacctggaccgaagaggcggagcaagccttccaagaattgaagcaacacctaacttccc

SEQ ID NO: 101044 - DNA, 336 bp, Zea Mays
acacgtggaacacatcgtgcacatcagacagatggtcaagtagttcaagctggtaggccatctccccaactcgcctaaagattctgaagggtccaataaagcgaggggataacttgtctttaacttcgaatctcctcattccatgaattggtgacaccttgaggtacacatgatcaccctcctcaaattcgagtggcctccttcgattatcagcatagctcttctgccgggtctatgctaccctcaagttctcctgtatgaccgtatcatacggacttgttcttctgcctcttgaataatttcaggtccaaagaactgtctttctcgagtctgatc

SEQ ID NO: 101045 - DNA, 563 bp, Zea Mays
gccactttcgtcaatcggttcacaatgacccagattgaatcatgatgtcgagaggtgttgggcagacccacaatgaaatccatgttgatgtcatcccatttccatgaaggtatcgataggggttgcaaggcaccagttgattttaagtggcttgcctttatcctctgacaggtatcacattccaataaatattgggctatctcccttttcatcctggtccaccaatataggggcttcagatcatggtacatcatggtgcttcccgggtgcatggagaatttggagaggtgagcctcatccaagagtctcttcttgaggtctctatttttaggaaccaccaatctgtcttcaaaccacaatatccccttgctgtcttggcgaaaacacttgtacttctccactttctgatttagattctctttgatgattgtactcccttgtcaccgagttgggccataataatctggtctaacaaggttggctcgacgaaaatgtgagatatggtaccagaaggaatcacttcgatcctcatcttactcaactcgtcacacaaggtattgatg

SEQ ID NO: 101046 - DNA, 612 bp, Zea Mays
gtgagtatgagtcacggcggcgtggttaaagtgccgaggcacgtggcacaagaccacgaggtgtctaactccggcgtgggttgattcaaagcgatcagggcagagcggacacggcggccggacggaacagtgtcttaagctcatccgtggtggagatcttttcacagcgagacgttatctgggcaccggtgagcacgaatcaccttgccggcatgaatccaggcgcaggggtcgccgacggcaaggtgcactgcacctacgatctcgttcagtctactgtaccatcagagctcttatcaaggtgcctgacagagcatgtttgggatcaattttgctccatattttatgtggtgacccaaccaatactctgcatcaaagtcgaagcctgataaaccagctctaacttttttacattgtgcacccacaaaagtcacagaatcttactcaaaatcgagctctaagttcatccaacttcactgttactgaaagttcagacttaaagtgttttgacagcccgaatttggatcaaattttctcaaaatttttcatggcaccgaggcttaagccctatagcaaagttgttctcctatagtagctctacaactttgctat

SEQ ID NO: 101047 - DNA, 346 bp, Zea Mays
ctaacattagttatttacacgttatcggtgttcaacataacaccattaaaaagacgacaaccttttacttatttacgcaacacaactacgacatcacaagtacacacatttactacactcaccttaatcatccactagttacttaatcattaagttagtgaagtacctaagttcactactactgatatgtagacagacttagttgaaagggaactagacacttaattgggctttacaattattcacaaccttctactgcaagcatacacccgagagaacacacatgaggagatagtttatttacaattacaaattgtactactttaatgacgttggttacttagta

SEQ ID NO: 101048 - DNA, 558 bp, Zea Mays
cgaagggttcgtaggtcatgagtgggaggcagaccgacgcttttaccgtggctcgacgctaggcatagttaatacgatcggtcatttatgacagattagtctcaggccaggcacgagatccactcgagtggttccctttgacacacccggcccctcgatcaggttctgccacgcccgacccggcgaccctaggctcagtgtcgcggggtttgttcgggggacgagttattctagggtagacattacctatctcctccaactgaccagcgtgctctaattaccagaggcctttccctagcgctctcactgactgatgggccctagtggccagggatcttatccccgacaacacccagtcatccagtatgtgatcatggtctcccagttatcctataacaacatggaagatgaacattcccaccgaccacatttccaagtacatgtacagattgtacgagttgtacctgcagactccatgatctccaacctgggacgtgggactataggagtttgaagtgacgtcaaatagtgtaaaaactaattgtgagataggagaag

SEQ ID NO: 101049 - DNA, 808 bp, Zea Mays
gtttaagtagaagacataaatatcgcaagggtcaaaggcgataacggacaagggtatgagagaaaagatgaaggcattaaataaccagtggtatgagtacaacaaagaatggggtcacgtctaggctttcacgcgataaagaagaggatatttccaagtgtaggataagtaaaacaccgctctcaaattggataggagattggagattttagagaacggacatagtgtaatcaccaaggtaggattgagagatgagaaaggtaaaggtagtacccaactagagcacaacaaaggatggggttaaaaactcgcaagcgacaagaaagaggatatgaccaagggaaaataggtaaaatacaactataaaattgagatggaagagagaaggttttaaagaacaggtataacataagcatcaaggtaagatatagaggtgacaagggtaaagatgataatcgtgaaaagcataaacaaggatagagttaagccaagactcgcgaagtggagaaaataatcaagggtaagataggtatggttccaacagaagggttgaagtaaaacttcattacccaaggaagttacaaggaaacaacgagatcaccaaggatgtgcaaaataaaatgaccgctcatggatcattaagaaacaagggtggtcaaggacatgtaaactgaaatgttttaaatagacattggatataaaggtaagcatataaaaagacgatagtatgtaagatttcaaggagatgaacataccaataccaagagacaagaaattgccgaaagatagcgacttaacaacagaaaag

SEQ ID NO: 101050 - DNA, 453 bp, Zea Mays
tgatgtcatcccatttccatgaaggtattgataggggttgcaaagcaccagctgatttcaagtggcttgcctttaccctctgacatgtgtcacattctgatacatattgggctatctccctcttcattctggtccaccaatacaagggcttcagatcatggtatattttggtgcttcttggatgcatggagaatttggagagatgagcttcatccaagatcttcttcttgagatccttatttttaggaaccaccaatctgcttccaaaccacaatatacccttcccatcttggtggaaacacctatacttctctgtcttctgatggaggttctccttaatgatttgcactcccttgtcactgagttgggccatgattatttggtcttgcaaagttggctcaatggaaatgtgagacaaagcaccagaaggaatcacttcgatcttcattttgt

SEQ ID NO: 101051 - DNA, 500 bp, Zea Mays
tgaagtaaaatgtggcctgatctcaaccagttttaaagatatagatggaaactaatctttatcctactatatatcaactccatgccatatactctatagtattccccctccccggcgctgccataatgtgagcaacacgtacggacgctcagaatggagtgaaaaccaacaagtagacgatagcccttctgttactgaggtagccaaaatcgttgctttgtggaaatcgatgcaccaacactacaccatcatcatcgaactacaggaatccaacacatgtcgataagaattcatcagcgctcatgcatgtcgtatcatggttggtgatgtcgcgaccaagctaaccactactttgcatgctatccaccacagtccgctagctaccaatagcgtctagcgtctttcaccaaaccgaaccctgctagtagggtccgtcctactgtatgtgcgtgagcagtatttggtcagagctgaactgttgttcgtaccctcaatctttg

SEQ ID NO: 101052 - DNA, 401 bp, Zea Mays
cccggagtgtgtacaatgacccatatgccgagaaggatgggacgacgcgccataccaagtgtatgcatacacacactggaaggtatcacagggcacatgatgacacgagaagctaggccacgcacgattgtgccatgagactaatccatggggcctgccacacactaattcgtagcaacggactcgctatagggacctgtatgatgaacgtgtggtgcagtacaccatactaggagtacggctgcacagtaccctacagacgaccacagggataccacatcaacctatggtagtagttctctctctcgtagaaaactagtctcctctataaggtcccacccttgagatataaaagagcatgtcctcctcctcctacacagacacaacaagttgtagcacca

SEQ ID NO: 101053 - DNA, 398 bp, Zea Mays
ttgcacatccttgatgatctcgttgtttccttataacttccctcgataatgaatttttacttcaactcttctgtcggaacctcgcttatcttatccttgattgttttcttcatttcgacactttgcgagtcttgccttaactctatccatggattatgcttttcatcattatcacctttacccttatcacctctatatcttaccttgatgtttatcttatatcgaccctttaacatctccttttccatctcaatcgaagtgttgtactttacatactcttcccttggtcgtatcctcttcttcgtcgcatgcgatttttcaactccatccttggttgtgcctctgtttagtgttgccttgacctttcctatctctcgagcataccttggtgattacgt

SEQ ID NO: 101054 - DNA, 293 bp, Zea Mays
agcacaactttgagcccttgtaactttcaaattaatgaaaatatgccctaggtcaccacataaaacttatagaccaaacaaaggagaacaattttgcttaagagtgtaagcaaggctgctatgaagaatttggagataatcccacttaaagtcgggctgtcaggctgactgataactgaaacttggtctgacagtggggtgggtcaatctttgaacccagatttaaacatgatccagtgcaagtttgggcatggttcccataacaaaattgtagctggaacatggggctataa

SEQ ID NO: 101055 - DNA, 365 bp, Zea Mays
ctggttgatacccataggatatggcgtattctctcaactcttctttctcagccttcgacaattcttgcccaattaagttttgaaagttaaagttttcttcttccgaagcatcttcagctatttccttctccttctcaagtactgtagccatggtttcttcagcggccgcagtagcttcttctgtggccatgtccagaagtatcttatcaatgttagaaagtgtgctttctagatttgcatcttcaacaggttcagcttcggcagttgcagcttcggccggtgcagcttcgatagctgtagcactctcaacagctggtgcttttgaagccaaagctagtcgtggtgtctcttcgatagcttctgtc

SEQ ID NO: 101056 - DNA, 519 bp, Zea Mays
gctcaggactggattttaatttcttcaaagatttctcatcctctttcagcattctagcagcttgtctgtccaaaatactaacaactctcttcctttttgccccttcggcacctttgttgagtcgctcgtaatccgggtattcaaaattcagagcgtccattactcggttcaaccttcgtttcggttgggtatcgaaggctgcagttattaattgatcttcttttttagtgtagtttcccaaaatttcattgcacattgtctcaatcatctctagccactcttggcaaggctctttgaattgtttctcaaacttaaagcgataagccaatcgaacaagttcattcttcttctttgttccttttagcttcggcataccccattcactcaacgttggagatatcctattggccaggtattcttgcactagatccctggtgctgatttgttcagccaccactctgaattttgctatggccagctggcatggtgaccctggcttcatgttgcacaaaggtctgg

SEQ ID NO: 101057 - DNA, 494 bp, Zea Mays
tgaagctcacctttcaaaattctccatgcacccgggcagtaataagatgtatcatgatctcagatccttatactggtggaccaggatgaagagggaaattgctaagtatatatctaaatgcgacacctgccagagagtcaaggccagccatctgaaggtagcaggcactttgcaaccccttcccataccatcttggaaatgggaggacatttgcatggattttatcgtgggattgcccaatacctcccggcaccatgattctatttgggttattgtggatagattgaccaagaccgctcatttcctgccagtgcataccacccacaagacagagaaatatgcagaaatctatgttgatcagatagtgtgtttgcatggtattccaaagaccattgtatctgacagaggagcactgtttgtggcacgcttttgggagcagctacaagaatcacttgggacccatgcaataaggagctccgcatatcacccgcaga

SEQ ID NO: 101058 - DNA, 636 bp, Zea Mays
tttctgcaatagagtgtccagatgaacctcctcaataatacaagaatctcccaatatgaattcagctgttgagcggcaccaagcatgcaccgggattccgataatctcaacttccaccaagttcgacatgattgaggaagaggcatgagaaaatctggaccatcttttgaaaaccaagttgaaccaaggtcctcggagcactttaccaccattaagaaccctcattgcagtttcttcattaggaaagaatagaagaaaatcctcaggctttgcagattggattgtcatgtcttctaacttaatgctgaaacaatgtgccacttcttctaatacctctgatccaaggacctctggcctagtaccagtaacggtgacaagcaaggcccttctcaagtttaattctttccttgctatatcattcgagaaggccaaaactcgagatgttaaacgcggtggggaaacttcatgaatgacttcaggtgctgatagagaatgtgaaacaaccttgccactgctcagagttcctctgccacctttggaacgtcttctttttttcttgttgcagagagagcgctgggaatgaccactaggaacaggattctccagcagacctttctccatcagagcttcaccagc

SEQ ID NO: 101059 - DNA, 517 bp, Zea Mays
tgcggacatcggtgtaggaggctttcttgggaattgctcgcaggagctctcaccaccgtgcggtgcctgggtctgccgcgggccgagctactgcacgcgccatccttggtgagtacatgtgccgttatttctatttggttggaacggcgtgtagcgaccatgaattggagtagaggaccttagttttggaggatcacgatcaccgttaatggcaccgccgtttgtgcggtcgccgccgtgcccaggtatgggggggaggagacgaatcctgggggcatctggaccgtcgatccctggattgagggatcagattagaagcgtgataccccttcggttagttgaatcgtagccgtggatcagagaatgaacggttgagatcagatttgtgtatatcccttcgcgctattagataggagccgtggatcgatcattcgacggctataatttgataccagtttggttaaagagcgatataatccgagcccttaaattttgatccaacagcgctggatccccg

SEQ ID NO: 101060 - DNA, 566 bp, Zea Mays
aattcaaatagtcatgtgtgtgacctggtcgaccagtgtagagcacacgtgtgataggatctagattgctacagtggggtgaatagaattataaggaaaatggaacaatgcccattggtagttgagttttggtgtctgatgatcaacataactatttcaactaacattatttgctagtgactttagttataatttaaaggatgcagagtggacttggacaaagaaaaaggggtgatccaaatgatcaacacctcaaacaagacattagaagacatattgaagacctacaacatcatgcaagagcctaagacataagatggtagaaacctagatgaaggcacatgaagaaaataatttgcttagtagcatctgacatgtccaataaggctccagataaaccaccagatgcaagtggtactataccgaagaagggctactaaatagagtacactagacacatagatgtgcaccagatgctacaccagacaaggcacttgttacgacactcaataggtgcaacatgtttgaggacatccacaaggcaccaaatgcatcctgaaagtcgg

SEQ ID NO: 101061 - DNA, 754 bp, Zea Mays
ccgcaccctgtcaaaccctagctcgtgtttacagctccagaccaactaggatacggattaggacatggccctagggcccgatcggcgccgaataactgtctcgacctaatattgaggatagggtttcatggccctacctttgcgtttgattttgcaatgcccgtagagctatgcgattctataaatgctgaatatctgtgatcgagatggtttcttgctgagtaggctgtgcgatttacaatgcaatgattttgagttgaacagaggggagcccagaaataaccatgtgtgcattaatgaagtgcgatacagtaactagcaatggcatgacgatgcacattgcatggtttctgcacaaatttctgcttacatgttattatagccattgaaattgtgtgcactatttgcttattttcaagttcacacaagaggagcacactattaattattatgttcggttaggggtggattgaaggggattggaggtagggatggtagtgggtaaggtacccaatgggcacaccgcacacaaagccatacccgtacccactagagaaaaatgcctcatacccgctacccatcatgggtacaaaattacgccatacccatacccaccatgtgtagcgggtacccatacccactaacattatagtagacatgatcatttgaatcgtaaaagtaagtaccaaatacaaaacattgaaaccccatacctcatcaatatagaaagatgctaaaataacatactatcttt

SEQ ID NO: 101062 - DNA, 320 bp, Zea Mays
ggccactactgtccgaaaatagatcaaggtgatgaaatagagagtggaacaagaactcaggtgtaccattgggtgggaggtgggtttgggtgaaaacacgcccaaagctagactccgagcgattgtgtttgacgcggtgccccatagggtcgtcggccttaccgatgggagaaggtgggcaccccatggccgatggataagaatccagaatgcccgtcgcatggaggatggaaggcgacagggtgggaggtgtcggtggtatcatcttcaaaaactctccacgtagtcgctccatggagtacttgatgccatccacggaa

SEQ ID NO: 101063 - DNA, 526 bp, Zea Mays
cttttgctgattgcggaggctgcatatcctttattgcttagactttggtggggttggccacgatacctctgtgggatacaaggtagcccaagattatgccctagcggacaccaaaggcacacttttctagatttaggtgaagccttgcttcacacattcttgcaaacgttttgacgaggtcaccaatgtggtcttccttgtttttgcttgcgacgacaatgtcatcgacgtaagtgaagacgttgcggcccagttgctcttcgagcaatgacttagttaggagtgaaaaggcagagccgacattcttgaggccttcgggcatacacacaaagtattatgtatcgaagggtgctataaagcttgtcttcactttgtcctcctccttcatgtatatctggcgatatcatgagaaacattccatgagtaccatgacttggtagccagatgctgaattgacaatcttgtcaattctggggagggggaagttgtctttggggcatgctttattgaggctagtgaaatctct

SEQ ID NO: 101064 - DNA, 470 bp, Zea Mays
caaccttgatgagggcactccgacatggaacgcttgccgtgatccatggtctgctgagaggatcccaaaaggcttcagacaacattaccctctcgacagaatgctatttttgggaagcagagaagcggcggttgaagttagttacgggtaagtgcagaatgaccctttacttatagcgcctaattggatccaggaagccagtagcaggccacatgagcctcacattaggtgcaaacgagaaaaggacaagacaacgttcgacccgggagaagtccccgagaggaaatatcatcccccctaggggctctactatcgaggatatgatccccggtccctagggcctatctgtcagcgagcacactgacgaaaggcctctggcaaccgggacccgctagtcagtatgaggagatatgtaacgtctaccctagaataactcaaccttgggcgaaccccgcgacatcgagcctagg

SEQ ID NO: 101065 - DNA, 625 bp, Zea Mays
gataagtcaaactgcagtgtagaataaatttgagggctacattcaatggtagctgtctatctttcatgttccttggttacaaatgttgttcattgattaccgtgtcaattttaccatgtgcagattacatgatctaagatagctctgcccttgtggcattctgattactgagttatagttaatctccagatctagagctggttgtattcttgggctgaagaatgtcatattgctggcttgttatcctccctgaaacatcattattagtggcaccacattttttatttattttttccttgaacgacaggggcagagatgcatttcatgtcatttagaagaagaacaaaaggggtacaaggaaaaatcggagacctctccctgacccacactacattcacgccttgtatttcttaacaagcacgacaacagcataatcacctactcaagtcagggatactgggatgaacaacctaatggggagctcactaagagccaatactccaaccgaacaccaaaggccacactcatctgccaccgtttgctgtactacctgaacatttggtctgacctcttcaaacacacaagaatttctttgtttccaaatttcccaggccaccaaaatggt

SEQ ID NO: 101066 - DNA, 1027 bp, Zea Mays
caaccatctcaaccgaagagcccagccaagggtttggatattagaaattccaagaaatccaccaagctctttggggaggcacactttgctgcacgccactagacagtgccacagtggccactctttgctttttgtagtttgtgcttcttattgaaaaagctttctaaaattcttatctttttgttagatgccagctggtcattcaggtcctggaagtccatggtcaagttttgaggatcaggttactgtctttgcaatattgtgggtcttattttttattggttggcaatacactaatttcctttcacaccaggctcttgttgtccttgtccatgatatgggtgaaaactgggaattggttagcgatgcccttaacagcatcatccaattgaaggtaacattttattgaggataactgttttaatttgttatcagtcatttacttttctcctgaatcatcaaaatgtgccatgcaactattttgttgcaacctgttacgagttagtttatgttatttgtgttcctctttgtaaatgatttatgtatataatattccagggctttggatcttaattgttgtaaacttgcaatagtctgttgctaattgaaaaacattttatattttattacttgattcaagattttagcatcttcttcgcagtgcatatacagacggcctaatgagtgtaaggaacgccataaacttctcacggataaaagttgtggcgacggtgctgacagcgctgatgactcaggctcatctcaacactatccttctgcattgcctgggattccaaaggttaattccattattctttcatctatttcacttctcagcttgtatatggaaatgattttttttggaagattacgattctagattttcggtcaagtggcttctatctgctgcatctttcccaaaaatattatggcgattatagaaaggaaatgaatttttttcttcaacaatgcaacacactctgatctaaattataagatgttttggctctagatacattgcttttta

SEQ ID NO: 101067 - DNA, 541 bp, Zea Mays
gttcgggtagggtcattgaccccagtatacagataggctgggtaaactctatctttcagaggttgaatatttttgaagacaaaatcagcaacaacagcttcagcagtcaagcctctgtctttcaatgtacatatttcagcaagcagcactctaggcttagctagttctgagtctgtaggggcctctgtccacctgggcgttcgacgtcaggctgcctccccgatcggggagggagggacttgttgtggttttccatggtaaaccactcaaggcatcatcccttaatactgtccttcaaagggatatcaagatactcaaccttcctacctcgacgaagttctaggctagcaccgccaacaagctgatgctgtcctctagccatcccgggtcgacagtggtagaggtactttcaaagcccagaatgaggaagaattccaaggaaagctttgtagaggtgaacaaacacgacaatttgaagaacagaattggggtttaagtgggtaagattccttgaataaaagttgagaaggccgcagaacaa

SEQ ID NO: 101068 - DNA, 638 bp, Zea Mays
cagcagcatcatgggcagcagtataagaatcccaccagtcagcagcaggacctgtcagacgacctgaggcataaagaactttctcccggtctgagcattgggcaatgttgagcatcttctcaattgacttcaaccaatcatctgcatcaagtgggtctgcgaactggcgaaggtcggtggcttatgactcatgaactctcggtgcttatcacgaggtggagctggtggtggtggtggaggcagtggcacttgttgctgctgttgctgttgttgttgttgcatttgttgttgcagctgctgttgttgttgttgcatttgttgttgcagctgctgttgttgtgccctcctttcctggcgtatctcctctcgctcctggcgcaactcctgtcgtatatcttctctttcctgacgcatctcctggcgttcttgctgcatctgggcacgcatatcagccatagtgtccgccatttgctgcatcaccgccatctgagcagcaaccagtgggtcaactccgcctggtggaggattaggaggattcatctctgcaggttgtggctggggttgtctatgtatccaccgagtgtgtcgattaggagacaaatcaattccaccaccccgcctggtattgaccatctgag

SEQ ID NO: 101069 - DNA, 390 bp, Zea Mays
tggagcttagagagccaaaacattgtctccttgcgcgtctcgatttgttgatgtgtcactttgaggttgttgatctcctcatcaagttcctcttctcccggctctaggctactggtcttcctcttttggttccttgcctccctaatgagagctttgtctccttgattaggtattacttctccaaagtattagcttgagcacaaagaaactgatgagtgatgaaggtaaaatagagttaggtaatgtgaccatgaataacatagtacaggactcaactcgaatgccttaacatttttattctattttcctccgtgttaagtaaatgtacatacatatcttcagcttcttggcacaagatatcacgaaggagtttcagatgctaagcaaaac

SEQ ID NO: 101070 - DNA, 648 bp, Zea Mays
atagagacggccgcggcaagataactttgagccgattcacggtctcgcggattaggccgaggtccggccggagatatttcactggtgctcaccgtggcgcggtactttcatcgccgtgtcactcgcgcctcaactctacctcactgtgctctttcattacatggtggccatgtgctatcgatgcgttccgtggccaggcgaacctggtatggttccatgcatttgaattgttgttttagcagccctgtatgcccttaaagctcactatggcagtcgtttggccattatgggcacagttttgtgggaacgcgggatcgacgttgtgtaccctaccgtgtacaacgcttacgtcgaccaactaggattctattgaaccaacactggtttttgtgagcaccgtgacctacgtgacccccctgatgctctctgttcccttaatttgggatttccatgacaaatactgcaagaacatgcactgcggaaccgagaccccgccgtgcgcatggttaggacattctctggacgtgtgagccaaattaatacccatggcggctcagtttagggtagaattaggtcggacgagtattaatgagtgctcggttcctccgccgctggcgcggtaaggaggtttgtcctcgccgccgttcg

SEQ ID NO: 101071 - DNA, 510 bp, Zea Mays
gttgcgtgagtgaaggggagcgagcaacaatagaggaaggggcaaaagtggaagttgagctcgggtgtcaaatcgctccctcgtttaggtccggtgtacacacaatgacgatgtctcagtgccaaatgtgaaataagcaatgttgggaaacaaaagtaaaaaatgcaacgttgttagtctcatttttgaaataagctctctctagggcgaatcggtcagggaagcggtaattgggtcagttggcgaaattgtttgggctgaaagcctctagatataaaaaaattaggttacgccctaggtggcccacagcccaaatccgcccgtgccaaaaatggctctcgatcataaccatctatgtatgaacctagtgggttacaccctttaggggttggaataggtgcatagatgattgactcttgtgcaagtgggaaattgttgaatatatacccaagagacaatcatcatacatgagaatggtaatggacgtttagggtaaaagcacattaacaa

SEQ ID NO: 101072 - DNA, 390 bp, Zea Mays
aaaacatacacctagtggttttgaagcccaaaccactaaatcccttgtgagtagtgtattcgatatgctccctccatgatctcgtcgtgtgtcaccactagtccttaacaatacgatcaccaagttgtctagcatcttcgcttgacttcatcaatatgttctacccccatattttcttgcacttgtcgatgttcttagatgtcagtcaccatggacattgcttcgaattctctaatccctcagtccaagcttcgacgtccatccttcactacttctagtccattagcacgggccctgcttgacctccatcttcgcaccgatccttttgagctccacatcttcgcatcacaagtcaagatcatagacatattgtaccacacaatggttaat

SEQ ID NO: 101073 - DNA, 552 bp, Zea Mays
cctatatgattcgcgtaactgtatgctatgagtagacgatctagggatggtcgtggggccctatagcgaagaaccgacgggctcgccggtgctttctgcaaccgtgagctatgcgccaccgcctgggttttgtctgagggtagaagaacgtttgtggaccgtggatccatacgtggtcggccaagattagagtagagaaaatcgtttgtgcgccgtcgatcccgtgttggacggccatgatcgtgtgtagcgtaccccttcgtcaaataaatctgagccgtaggatggtagttcgatgaccgagattagatcccatcctcatgaaaccctagccgcaggattttaatcggatgccccacgttgggtaccggttcggagtgaatcgggtctattccgcatcgtccatttgcgattgtgcggcccagatttgatcataccccttcgtgggtatgttttactaaagagcccctgtagttttacggaattaacccgccgtccaactcggggatttctgagtctgcgtaaatctttcaagttagcccctagtctctt

SEQ ID NO: 101074 - DNA, 357 bp, Zea Mays
agaatttcttcttttctttcttccccttcttgtcttgttcctagtcattctcattatcgggacattgtgcaataaaatgactggacttaccacatttgaagcacacacactttctcattgatttgttattgttggggtactccttgcatcccttcaaagcattcttgaagcgctttatcacaagcgccatctcatcttccttgagattgactgcctcaatttacactaccttgtcggggagcgcctccttgttggccgtcgctgagggcgacagggtgcgcctcggtgtagtgaggaagaggcccgttggagatgtcgtcaacgcacctagcctccttggccatcatacgccggctc

SEQ ID NO: 101075 - DNA, 289 bp, Zea Mays
attggtttctactactcgacatacaataggatgttattactgcttaatctactagtgtacaatggctttgccattggttcctactacttgacatacaacattatgttgtccatgtactcatcaaagccatacaatggcatgcatcgttgatttctatctctaaggacatacaacaatgatgctctattacttcatgtccatactaaatacacatagtacggtgttgctgcttcctatatccacaatgggtatgagttaaaaccatacaaacacataactactgagttac

SEQ ID NO: 101076 - DNA, 482 bp, Zea Mays
taaatcttcgaggatcttgttgactctttccgtttgaccatctgactgggggtgataagcggtgctgaaatctaacttggtgcccatcgcttgctggaggcctttccaaaattttgaggtgaactgcatccctctttctgacactatcttctgtggaatgccatggagcctgactatctccttaagatatatccgggcaagggcggctcctccaaaagtggtttttactgggatgaagtgggccaccttggtgagacggtcgattattacccagatagaatcattccctttttgcgttcggggctgtcaggttacgaaatccatgcctatttcttcccacttccattcaggcactgggaggggttgcagtaggcctacaggcttctgatgttcggcctttgatcgctggcaggtgtcacaccgggccacatactgtgctatctccttcttcattcctctccaccagtatctggctttgaggt

SEQ ID NO: 101077 - DNA, 341 bp, Zea Mays
ccctcggatcgctgggtcttgaccacaatgttattgacataggcctctgctattcttccaatcaggccaccgaaacatttaatcatgcatcgctggtacatgacccccgcattctttagtctttacaccaaacaacatcgtcacatagcagtatgagtcaaaaggggtgatgaaggaagttgtgggttggtcggatttcttcatcgtgacctggtgatagcccgagtaggcatcaaggaagcttagaacctcacagctggaggtagaatcgaccacctgatcgatgcaagggagggggaatggatcctttgggcatgccttattcaggtcggtgtaatcga

SEQ ID NO: 101078 - DNA, 662 bp, Zea Mays
ctcaaggagactcaggcattcaaagacatcctctcggatcgacaagacttctgcgattggataggtgcccaaagcactacttcagttcttctaaagggtgagtgcaaacacgtgaaaacctgcacagaccccgatttcaatgtctctgctgacaatgtccgatggttgactatcgaggcttcgaaatggtcgaaaaaatttctatctgagatttggaaaaggtgtggaaaagagttaagcattgaggaatgcataaaaaacagagaaaaggtacatgcttcgtcagctctatgctttaccttcgtgtgttatgttcatgctaactacaaaaagttgttatagtcaaggcaagcagccaaaaaggctgtggatattagaaaaaaaacttcaaagaaataaatgcgaaggtatttaactttctgttttttaaaattccaatgaagttgtatcgaataactgctttactaatccttgttaaaaagtttccacttcacaggtcgtgattgaggtgaaacatactgaagctcaagccaatgatgctactgtcgaagtcgaatccatttccgctagggatatagagaaggctaaagatgatgacatcttgaagatctgcgaacaaatttatgacgaagccttgtgaagttgaaagtcgcctagagggg

SEQ ID NO: 101079 - DNA, 525 bp, Zea Mays
taccccttttactatggcctcacgcctttcctctctcgctttttgcaccaatgtcgtctctattctggcgtcggaaactgtcgatgcctgatcactgaactggtgaggagcaagacagcaaaacaccactaccccttgtatgccatggatcccattcttcctcctttcgtcaaccgggttggttctgctgcatcgcgatcgccaccgattgtgttgaccctaatagacgatttgacttccttggtctcgaataagaccacccatcatcagtcgatgacatcgctaagaaatggagtgcctgggatattttatggtggggccgagcgggccaccaggtcagagacctcaccacagccgtgagacgaagtcgtggtgttcgaggcttttttcattgttggtcttcatcttccatgccacgacttcatggttgaagtattgggtaagtttcgattttagctacatcagcttactctcaatgccatcattgcgctcaacaagtttgtgtgagagacaacaacatatgaa

SEQ ID NO: 101080 - DNA, 328 bp, Zea Mays
gttttctatactcttttatcacatttactagatgtctgtaccgtgcatataaattttgtaaagaccagggttcaacccataaattctaggacacagttgtaattattttctaatggttacggatggcgggttgattctagaaagctttaatggcctcagtgtaaaactactcggccgatggggtatcaatgactcctgcccgtccgatcaaaattggactgcccagattagatcagcccaccacgaaccagtacgtgcctgcgaccgtcagatcagtgatcaacgggtccggtttaaaatactccagattaaatcctacgcgctcgag

SEQ ID NO: 101081 - DNA, 367 bp, Zea Mays
cccacatcaaagttgttgacaatacctcccaaacaccgcatcgtttcaccaactgtcattagagaaggattaagtggttccttgatcaattgattgtccaacccatattgacgggcattgcgtcaacatcaaccccacattattgttcattgactttaataccatctaaggacctcctatatccattctccactaaaacctcaggcaatgtcacatttgactattgaactaccattttgtagcatggcaaatagccctcattgcgcaagggcatcaacacatagtgtgaccttctcttcccactatcaaacctcctcgtcaatgtgaaatcttgccatcaaatatttacattacccacaaacaaaac

SEQ ID NO: 101082 - DNA, 675 bp, Zea Mays
agatgaagggagattctgaaggcttgttcagtacgtctatatggtaaaaagacgatgacccccttgatgaatttcgtagtttatgtgtataggaactgtgtacatgattatattttcatatgaagatgtataccgaaccgccactataaatggaggcacagtgtcatacacgagggacgttgaggaacggtatcgctctgcctcctaaggtacgttttcttgtcatcgtcaaaccgttgtctcaaccttcgaagatataattgtaatcacttatattcaagggaagaataataaagagaatatgatagtaatgattttccttaattatgtttgcctaccttgactactttagaatcataattatgatggtcttcttcctttaatctgctcttcctctcgagatagattgaagggacgaaggtcttgtatctctaattattatgttgcattgttttaatcttctcctgtaatcgaagcagttgaccaacaaactcgaaactatttaattttggtaatctcttaggagagactttattttgtcttggacataatgtagagagaagctgagaagacctgctgcgacgacgatacggcagatcggctatatggcagaggacacatggggcggccggggctccagtactccgggcaacttcaactccagggaaaaagtat

SEQ ID NO: 101083 - DNA, 425 bp, Zea Mays
gcaagaaatgaactatcttggttagcctgtccacaatgacccaaatagaatcgtggtgccgggatgtgttgggtaaacccacaataaaatccatgctgaggtcctcccatttccaagatggtatgagaagaggctgtaaggtacctgctaccttcaaatgactagccttgattcattggcaagtgtcgcactcagatacatacttagcaatttccctcttcattctggtccaccaatacaaagatctaagatcatgatacatcttgttactgccggggtgcatggaaaatttggaaagatgagcttcatccaatattttctgcctgagttctggatttttaggaacaaccaatcagtcttcaaaccatagaactcccttgctgtcctgacgaaagcatttgtatttatccaccttttgttcgagc

SEQ ID NO: 101084 - DNA, 502 bp, Zea Mays
atggtgacttcatttaacgatcggtaatcaatacacattctcatgcttccatccttcttagagacgaacaggactggtgctccccaaggggatgagctgggacgaatgtatcccttttgctgaagatatgtgatttgaagctttagttctgccaactcggtaggagccatgcggtatggtctcttcgcgatgggtgtcgtcctagggatcagatctatgtagaactccacttctctttctggtggcattcctggtaactcttctggaaacacatccatggattcctctaccactgatacacttcctgttgctagactgaacatcattggatcattggcgggtggctgggcctgacaagagactgactttccctgatggtcggtgaggaggactgtcttgtctgcgcaactgatgatgcctttgtgtttagttaaccaatacatccctaagatcacatcaattcctttggatggcaagacggttaggtctgccaagaatacta

SEQ ID NO: 101085 - DNA, 384 bp, Zea Mays
cttcttgactttgaagaccgcactccaaggtcgacgaggcacgagacgctgctcgggataactctaaccccacatctggaatgtcagtgcaaacgtccatcataccaccatctgttggctcggatagcagatcttcaggaaccatatcctcgagagcctgatcaaaatttgctatggacaactcttgcagaccaatgagagtagacaaagctggagaaggaacatcactactctcaccactgactaggtagcgccgactatttttccgaattaaggggatttcctcctcttcttcctcatcctcatcaacaatacgaacaacacacccattgggatcagctctggctggattacacccattgagatcagcatcatcaaggtcac

SEQ ID NO: 101086 - DNA, 317 bp, Zea Mays
tattatgactaacatatgttttacaggttatatgataagttaagtcataatgcatgaatttgggctttaacatgagaaaacaccccgaatgatgaacatcaatgaaatggctgacgaataatgctagaaaggtcatggtgtagtagtttaagtgtcgaaggagttcctaggcacttagtttagttaaagggcctttattttcttttagtcgtactataaagaggggttgtggataagtaacttgacctaggcatgtctaagtgtagtgtggtggttcactcatatacaaaactagtgctaggtaactcttgagagcc

SEQ ID NO: 101087 - DNA, 407 bp, Zea Mays
gcaactacgacatcacaagtacgcgcatttaccacgctcaccttaatcatccattagttacttatcattaaattagttaaaatacctaagttctctacgacctatgtatatgcaacttagttgaaaaggaactagacacttaattcggctttacaattattcgctaggcaaacacttattagaccttaaccaatttagttcactaattttagcgagacgtgtacttgttacttatataattaggcccaactgtattagttatattatcattactgcgggttcaaccaatcatcaaacgaggaaacagtcgactcgagtcaaacacaacagagtagagcatccaacaaacataacaaaatcaggacagcagcacagcaggtgcttgtttcagtcataactcttcaatt

SEQ ID NO: 101088 - DNA, 368 bp, Zea Mays
tagtgttgaatcaaaggagggttttgttattcaatcacctgggggtcaaatttttactaaggaagtagtcttccacgtacccgtgaatttagccggatatgaatttcctaccaatatgatagttataaaggggcaagacatagatgcgatttagggtatcaattggttagcccagaataaggctattatcaatgatgatcaaaggactattcagctaagtcatggacaagaagaagtcaagttgtccatccctgtatctgtcccagttaaagtatttcgacatgtttttgaagccgtagtgcaggagatacaagacatcccggttgtatgtaagtttctggatgtattcctaaagatttacccggatt

SEQ ID NO: 101089 - DNA, 527 bp, Zea Mays
gcaaggaccatgcaacataattttatcaacaatccattctatcgtctagcatgcgagctgctgactagttttaggcggctcgctgctatggggtattccttgctggctaggtctagcttggaaaataaatgttctacttcatcaaatagctctacacttcataaaaacagtgtgtgtgagtgatgtggctgtgtggaggaggtgctggttgtgttaacacgcacctccgaactctttcagaaattgcattcagaacactgtgtatgaaacacataaaactaaagcaggctaaacaacagactttaataagcaacaagctttaatgccttatcaaacaaaaataagttgtagtgtaacacagtacatgtcaccatgtacagagctgaagtctaaactgacacaattgtcttgaatctcattcgaaagtttagcaagcttagaacgggtgggtcacatattgcagcaccagaccaaggtcacgagtgccacagttgacaaccataccaccttatttaccccgctcggat

SEQ ID NO: 101090 - DNA, 571 bp, Zea Mays
ctttttggctgtcgtctacacggtgacatttgaatttatatatgcagcagacggtgcaaaaacatcccaagtggtgatgttttatgcttttttacttgaatgttttggtttcttagtggtttttgatgccagcagatcattctgttagctagaaggaatatctgttcaaaatgcaacctttatttcaggcgcccggaacctagcagagttcgcatgtttgagcttctttctcattacctcctgcatgcgaccaagaaacggatatatatatatataccaacgatgaaaaccaaacagattaattactgaactgatgtgatctttcgaggaagcttgatatataaactgctggcaggtaattgacacttggcaattcgtatattcatcaaaagaacaggcctgtgcccagtggtatagttttgctatactaacaaaccttgcgtgcgacagtcagcttgtgatcacgtgaggggctcaagtgctgaattgtatgaaagcccgccgctcctctcttccatgaactgcaagttgttacagttcagctcttaatattagttggttagagttcaag

SEQ ID NO: 101091 - DNA, 790 bp, Zea Mays
tgcggtgcaggatgccttttcctgatctgcaatgcaggagagggatctaaagcagaagatctctacaacattgaaggtgactgggaagttgaaaacgatagccatgaagtcatcgtagatcaatgtcgcaacccctgcctagcgcgccagctgtcgatgtttgtgatccgatcgcacaccacagggttacccacatgatgcttttgggtaggacattggcattgattgcgacttgatggtacatagaggagcacattggacttgcacaagggtttatacaggttcgggccgcttcaatgcgtaacaccctacttcctgttgaggctatgtactggaatttctctagagtatgaggattacaagtgagctacgagggtgcttaggtgttgttgatgagggctagtgtgtgatggggtgagatgaaatgattttgtaggggtcccccttggtcttatatacacgaccagagatttatccctttacaagttgtgataactatctattctacatatctcctttatcgtggctcgtagtcctacttatccggagtttgatcactcccttagctgagttaacgccgaatgtatagctcttcaggtacgtgcaacttccttacccaagatatcagtgcttcggtcagcgcacaactcggatgtccagtctttgtctccttggatcaagttcacccaacctgattgcagcctaatggtccatcccgcaaagcaacccatcgggaagcccatggtggcccatgatatgtttttgtgttcgtgaggacccaggggatatc

SEQ ID NO: 101092 - DNA, 484 bp, Zea Mays
gccggactagcacaataagtgcgaaaacttgaagtcatttccaaaagaccctccgcgcaaaagtcgcctacgggtgcagccggaatactagtacgaaaaaatcgaagcctacgggagcggcctgatcaacgaaagcgcgcagcttcatcacacaagagtatggttacatacatacagcgagggcatcgcacattacattggctcaaccttcgggatgatacccatctacctatagttgaacaacattatcctcaattcctcacccgcaaatagacttcgcaactccccctaacccacactcgccccagccggcgaggacaacaattcccgcttgccagccccgtccacacgaaggcgaccaccttccacctcaccacgatgacgcctatcacctcgcggcaactcactcaccctccgtttcgccaccgcccttcgccgcctatgcccaacactcgcacccggaagatcctcatcacccattaca

SEQ ID NO: 101093 - DNA, 332 bp, Zea Mays
ctcctgccgaggcccacgatgtgtcccttagagccttattgggggccttctaggtggcctatgaagtgggtttgtgtcttgatgacccaaggggtatctatcccccacaagccaccaaggctcaagccaattttggcataattggctcgagactcttaaaaatgaatccggagttgaaaaaatatttttactaaagggatgcttaggagtttgctttcatgggcctggatccccctgagcaggacttgggacgttagacctagacccacgcatggatatgtccagggccgccacgtgtcccaaagggggagacgctcgaaagatgcactcgc

SEQ ID NO: 101094 - DNA, 956 bp, Zea Mays
caatttgaagatgacttcaacatcttgaattggtggcatgagtgtgttggcaccttcttgggccaaacaccaatggtccctagatccagctcgtggggaacaagaccttggggatttctctatgggagcttggaccgttcgtggtaggtaaccaatcatcaatgactctgcacagagagctctgctcttctctatgagcgtgcagaccgtccgtaagcgcaatcaacctcttgagggttttggtgattaatggacaaaacaaatgaaaatgtactaatgagttttctcctagtgtacgtcacttttaaattataaaaggatgcaaatgaatgaaatcaatgagctaacaagaaaccaagcgatgaaaagtaaagatctacatgtggtttctggcaaagactcccaagtgttttgatttccttatctttgattagcaatagggatctctgtatgcttagttttttcgtgaggtaaggatggtatgcaccaactaagtttatccgcttcaaatttcttgttttgaaaagttgtgaagtcaccatttgctttcttcccctctcccttctaaatctgagtttttctgtgcataccggttcagccgagttctatgtcggttcaaccgtaattctttaggttcttctctgaaaattttaggttcaactggaattttaaattcaggttcaaccgggaatttacaaagagttctctcttgaataccggttcaatcgagattagtgtcggttcaacctggatttgcacagtcgcccagaatcagccagatctgatttgtgggggctataaaaaccttcctcccccacttctaaaccctaaggctctcgaacctaaaccctgtgatggctgctctccttcatttcaaagtgcttccactttgatctcgcgccccgagtccttccccttcattttttggaagattcttcgatgtgagataagttctc

SEQ ID NO: 101095 - DNA, 1231 bp, Zea Mays
cgggcaatagaagaccctacttccagtagagggggatgagacttatattatcttgcacctaagtgcttgtagtagaggggtacaagctagtcgagagagggagtggatcccaagtctctgaggatgattgaggtaagtgccaatatcaatcctggagagaaaaacctgtgaagtgttgttctcattcctctccatggaagccctggactgctccttttatagcctcaaagagggaacctaggagcaccaagatttgtcgtaatggggagaggaggcgagcccgagcccctgtagaagtatggccactagaatggcttctgtccttgtggttgtcttcgatcaggggaagaatgtcggaccctatatcctatatcttgaccaagcagagagccatggatagggtcgggggctcggacgcgtacccgagcccatcttgtggatgtgttgtccgagtcctactagttgaaatagtgataagtatggtgaaaagcacatggtaattcgtcccgtatggcgtaaagtggacttgacaccagccttgcagtttttgtatccatcttattgttagctgtctttgtggaagggttggtggcgtcgggcgccattttgtcgatgttatttgggatgaggccatgctcgggcgaggcagaggtttatcccgaggccatggtcggaccagcgcctgagcatgtagtcgtgcagggagtggttagaacaattgtcgggtggcctccttcgggattcacggggagttggtggctactaccagggcagtcggtcgaggctgaactaaggtgaggtgaagttttctcctgaggctgaagccgtcttcgggcgaggtggagttctctcccgagggtgaggttgtgcctagacgtttgcatgtcccatccggagttgttcgagaacagtgaccggagtgggggagcagggtccgatattcgcgtgcttgcgtcatcgtagtcggtgaaagtagatgggaccgcgatcccatcatcctttgttgactgcggtgtcacatggagcagatatctgtatcattgcatttaatgcgcacgtcttcatggttcctgagatctttggctgaggctaggctcgaggctgtccttcgttcgagatgagctcgagtgagacagaaattgctttccgtgaagggggccttcaggcgagtcaaggatttctcacgggtgcagccttcgccggtggatgggcttgagcgagacatagtttt

SEQ ID NO: 101096 - DNA, 339 bp, Zea Mays
ctcatcatcctcatcatcaacaaccatttcaatatctatgtccattccaatagcttcggttaagtctatctcaaataacccttctagcccatcttcttggaagaactctccatcatatgtgtccgggtctaagttataatcttcatcgttaggaacaggtaatctatcgtgcggtgataccttatacacaacatcccaacacttaagatgttatttcgtttggcacgtatatgggatataatacacttgtgtggcctgttgggccacgatatagacatcgtctcctggtaaggtggaatcttgttgaatttcgactatcccaagattagaatgtgtctg

SEQ ID NO: 101097 - DNA, 455 bp, Zea Mays
tgtgggtatcccctacaacttggtgtagttattaacaaagtcagttatttagttgggtaatctatttatttccactttcctctttatctaagaagttgtcattgaagatgatcaattgttcagtgctgtgaagatttccgtatatcttttcttatgctgaaagactgcagagtcagatctgatatgtgtgtaatttctacagatgtctgagaataggcgtagaggtgcgaggcgtgctcagccagagcagcaggcaccccaagaggaggcagctccgcagcagcatttgccaccgccacccccgatgaccattaagcagatgttcttgatgcaaacctaggcagttcaaacaattgatcagacattagcagcgatgcagcaggttcagcagcagccaccaccacctcagcctctagtgcaagtctagatgccacaagtgccccgagacaagcggg

SEQ ID NO: 101098 - DNA, 387 bp, Zea Mays
ttgttccaaaggattttcccgagcaggcaaggcaccagatacaaagaacagtggccaagttagcattccaacctcttcatcaagcctatatcaaattatggaggtaatgacaaagcaaacccccatgatgcttttgagtcctttggtgttgatttagtaaattttgctcctccactgaagcaggccggtacgatgatcttgtctgacgacacatgcgatggcaacctggggaagtgccgaaggggtttactcgcatagtgaagcctattgatgacattttcaacaatatattcaaggaggcgagtactaaagctactgggaatttgtcaaaggacgacaaagaggtaagcatagaagaaactagaatagcagccgactggtagcccg

SEQ ID NO: 101099 - DNA, 334 bp, Zea Mays
tcctcctcaagcttcacgactcctttgattgaactagaccgccctgggttgccgtgaacgcccgtgttcttccgttgcgcatgcggtcaccgtggccagaacaaactgggtagccatttgtgaaattaagtgggtggaaacgctcattagaccttgaattcggtctcggctaagatagagtgccgatctttgagtgtattggctggtacatgagctcgtcggagctctgcgcgacaccgttttccgtcagggactcgattcgtgaaggaatagaacttgagggacctttttgcacgatgtcagtgactatctagaatagtgttttggatttttt

SEQ ID NO: 101100 - DNA, 382 bp, Zea Mays
ctaacttcttcgggagagggtcatactctaaggcccaaaccgctatcatcagcaggaggatttgacacgaaactgatgaaggcctgggagggaggcaaattccaagtcgagtatgcaacaggagcgccgatgttcgacacctagcctctaagtatcatctcaagccggttcaccaagtccacagtaggaattcttctgttagtcacccgggttgaatcagccaagcctcggtacagataggccgaatatgctatgtctttcagtggctgaatgttcttgaaaacaaagtcaacaaccacagcttctgcagtcagacccctttctttcaacaatccaacttctgctaacagagcccttgccttagccacctcctggtctatgg

SEQ ID NO: 101101 - DNA, 394 bp, Zea Mays
aaggattcgggagtccaattgttttgacaacacctatttcaagatgctgcttaagaagtctcagacatctttgagtaagtgcgtcttcctcaccagttgctttgatgtctatgcttacccgagcttactgtttaggcttgtcatgttcctctctgtgaagaagttggcatgccatgttcctctctatgaagaacaacttaactagaactatctgtttctctacaatgttaacaaatcttcccctgtcccagtgtcgaacataggagttgcactgaaatttaaagaaaacaaagaattttatttggggaaggttgagtggaaaaaatacttacattttagattcattctatctgtattttccctagcaatgagtccacttgttcttgaacaaaac

SEQ ID NO: 101102 - DNA, 315 bp, Zea Mays
gttttgtcgggggctttttcctcttccccacgacgacgagctaccgcggatccacgtggcagatctcagcgacaacgcttttctcgctcgacggttgtgatccccgagtataaaccagagctgcctcgaccgggatcttcttcctcgcgtgagcacccgagccggagaaatcgcgaggttcgttgagatccggccggtttctttgctaccagcaaagtccgattcaaccgaaatctgcactggccgccaggactccctgctcatataagcctgcccatgcggccctaccccaaacacctagctcgcgccccacca

SEQ ID NO: 101103 - DNA, 274 bp, Zea Mays
gccaaagggtaaaagtcgagcatcagagacctgctggatcacttcatccactgaaaatacctgagtggaaatgggaacaaattggcatggacttcattgtgggactaccccgcactcctgcagagtatgactccatttgggtgattgtggtcaggctaacaaaagtggctcacttcatacctgtgagaactaattacacgggagccaagctagcagagttgtatatggctcagatagtttgtctacatggagtgcctaagaagattgtgttaga

SEQ ID NO: 101104 - DNA, 985 bp, Zea Mays
ccgaatgacgactggttgaaatgcattgaggctactagcgatgagttgcttggggcatataccagggccgaagatgatgctttgtcctcagccttcgggggttagagcaagaaaagattaaaccgagttttcgacgtgattggttttatgtatcctgattattgctatcccctgcaaaagcagggaaaaaagaggaaagttgccgcttcggccatttctgttgtgccgaagggcaagaaaatcaaagttttgacccacaggcccagatatattgaaacgaccacagtgccgaaatttggtgaggagacatcttccgctgccgaggcagaaccggctgctcccgctgccggattgctgaagaatcgactatagtaccgaaggtgcctatagtcgagccagtcgaagctgaagatgagacaaccaaaaagctagaattagaaaaggcaacaaatctgccagaaattctaagccaaccagtagaagtggagctgccgaaggttgcaaaagctcctgccaccactcccaagaggagaagaatggctagcgtgctagacgccgttgtggaaacaacaagagcactgactcctactcctgtgaagaaggttgccgaagctgctacaacacatacagaaaccgaagctgggccctcagtgcccgctgagacgaagctcgccgcaaccgagcagagggccgaagaagaatctcaagatactggcgtagctctagagaaaagtgtggccaaagaagccaaatcccctgctcccgaagcaccgtccgaaggtcttgattatatcatttgacatgcttcgggaaaaagattatttgaagaagaagtttttgaagccaaacactatgcccgggaactggagtacccgaagagggccttagtgtttaacggtatggacgaagatgatttcctgtattgcctcgcatacaacagtctgaaggtacagaagttgtgaattttgaagcttatggacttggg

SEQ ID NO: 101105 - DNA, 310 bp, Zea Mays
gtctgtatgatttagtaactccatcctttcccctgaagctcttatcaattctttcaaacggtacatcttgtcttgatgagacagtgtacctttgcaatatatactttgaaggtatcttttcaacttgtagatgcatgaaggctcttaaaagatgaacacataatagacctgaaatcatgaagaccaaccattatttttttaatgatcaacattattttgtactacaatcaacaaattatataatatgcaattttattcgtataatcaagacaatatgtacaaacctgtatgttcccactgtttgcactcg

SEQ ID NO: 101106 - DNA, 489 bp, Zea Mays
gatgttgaagcatgccagaaggcctttagtactgtttgcgccttcattggcacgagggatttaattcaagagcacatatccttccgggtgtggccacttgtggagagctgggatatgccgaaggaaactactgccgaatccagtgaaggtggcctggttcgattgaaatataccttcaggtttagagagaagtttgacgaaccaaatgatgactagttgaaatgtattgaagctaccagtgatgagctgcttgggacatattccaagatcgaagatgatgccttgtccgcagccttcgggggctgagggaagaaaagattgaacagggtatttgatgcaattggctttgtataccttgactatcactacccgctgcgaaggcaagggaagaagagaaaaagtgtcggttcgatcgccactgctatgtcgaaaggcaagaaaatgaaggtcctgacccaccgaccgcgatatattgaaccggccatagtg

SEQ ID NO: 101107 - DNA, 332 bp, Zea Mays
ggcttatacaagtttgggccacttagaatgcgtaacaccctacttcctgttgaggctgtgtactagaatttctctggagtatgaggattacgagctatggtggtgctcaggcgttgttgatgatggagggtgtgaggtgatacagggtgagatgattttgttggggacctccttagtcttatatacacggccagagagttatccctgtacaagttgtgatcactatctattctacttatctcctcctttatcgtggcctgtagccctacctatccgtagttcgatcaccttctcagctgagtcatcattgaatgcatagctcttcaggtctg

SEQ ID NO: 101108 - DNA, 387 bp, Zea Mays
ggaagagagaggcggggctgcaggagggcgacacgaaggacggcggacatgggcgggtgaagctaggtggcgggaggtaaggatttgggttagagagaggcggctgccgaaccgtgcagtgggaggaagaaaaacctggaagcatcatggcgttgcagtgacaaggctgaaccagctatccgttggttgatgatccaacggttgttaacaaaagcgacaacgtggacaccttggctgagcatgtttgctcccgcgtttaatatatagaaaaaatgtcggttttttggccgatataaataatttaaaccgacatagatttattagtttcctatggtgatatcataccattaattacttcattagagactacaacgctacagattttat

SEQ ID NO: 101109 - DNA, 583 bp, Zea Mays
gcaagccggttaaggtggcacttgagggtggcgacgcgcctctcgaggcgttgcttcttcgcctagctccaactggtgacaaagcgtatgcatcctgcgcttgtaatgataagcgtatcgggtcggcaaggtagagcttgccagtggcgatggagaggaaatcgagggtgacgaacatgatgtggcttcctagtgcgaaggtcttgccgctggtgagagttaaaatctaagccattagagtggaagatgtcacttggcacgctaacggtcccctacctagtgcgccaactgtcgtggtttcagggacaaggaatttgtgttcgggaggggctactagcacagactcactccgaatggtgaatcactgggattcgagcacaaggttgagacagagagttatactagttcatgcttgcgcccttgtccagtgtagtgttgatcgtaatattgcttgaggactgtgttacaactggtgcgtgtgtttgaagaaggaaggagtcataccctttttataactcaagggtaggaccttacagcggagacttatttcctactaataagagtggtaaaggcgtgatccatc

SEQ ID NO: 101110 - DNA, 739 bp, Zea Mays
caaactgtacatttaactgaggacaaattcaccacaaatctgaaatttaaattgagattcaaaaataagaagaaaagaaaatagggaaaaataagaagagaaaaagaaagggaataagtgccgcttgggccgggggcatcattttcggcccaactcacgattatcacttccgcgtggcccagaccgagtaccaatcgtgtggggagtatgataggtgggccctactcagtagggtctccttcaacgccgatgtcgctccctctcttctcgctgcatcacgggcccactcctcagtccgggctatccgcgcgcctcgtgcgtctctcggactggtgggccaaggtcgttagccacacccgtaacaactcgcaaacccgccactaccgtgtttgccgccatccggttctcgcatcaactgaccagagctcggatgagggggataaagactcaacctcgtacccccacgacctcccctgtgccatcttctagcaactaacaccgagagattgggccggaggaggaggaggagagtcggcgtcgcccgccatgaagtcctagtacctgtgccggtgtttgggactaagaagggatcgagcgtcctcggcatcgtgctcggagagtgtgggtggataatcgcctccagtgttcatcccgggcgtccagaattgctcaccggactagatttccaccgccgtgccgcaagacatcggtgataggattctgtgccatgcaatacctc

SEQ ID NO: 101111 - DNA, 466 bp, Zea Mays
acagggcatacccagcttacctgtaccgaggcctagctgactcaactcgggtcaccaacagaagaattccctctgtagacttggtgaaccgacttgagatgattcttagaggcaaggtatcaaatgttggtgccccagtggcatattcagcctggaacctgcctcctcccaaggccttcactctttttgtgtcgaatccacctgtcactgatgacagtttgggccttagagtgtgaccctctgctgaagaaattagcgtcttggttgcttcactcgggggaattcctgatgatgaacggcaggtccattttgaggtgcctctggatcctagtgacgcagaaataagtgctatgcttgatttgctggctgaggactcttctgatgctgctcctgctgggacgttagtggtgacacctcccccagaaactgatataaccttggatattcagaaacatgtcagtactca

SEQ ID NO: 101112 - DNA, 300 bp, Zea Mays
gtcatagtcaaatgcccttttcatttgtttgtgttatgtggatttaattgagcaattatgtgttgtaatggtgaatttagctgagttgagttttagtttgtgtgtatttgtttgttttttactctaatgtccagagatacaatgctgaatttagttgagttttgtagtactgaattttgttttttgttacctagttatctgtaagaagactggtgtttttttccatacaaaacgaaaagatctcacctttttattcagcagtctggtacaatatacatgtgacaaactaatgaatcgaaa

SEQ ID NO: 101113 - DNA, 280 bp, Zea Mays
acctgaaatgggataggtgttctctgaacttggcaaacatgcagagaggatgtgttttccagtgtgccagcacaacatggactcaaagacgtggctcccatgcactactatcatgcagattcatagcacagacaaagacacagaacttggtccatcttatatggtcaaaatatcaatttttgtctcctactgcggataagagagggcagctaggaacccacaaatataccacttgaggataggctcaaacaggtctaacacttgatatttcgtacaggga

SEQ ID NO: 101114 - DNA, 588 bp, Zea Mays
gttcaattggccgagaccaggagcttcactggcagtaaggaatgctaaaacataagtttgggaggcattaactgacctgagaacggcaggccacggcgtgatgcctcacggcagtgacggtgaccagagttgggggaaattccaaattctcgggctacagtggagtggtgctctgggcgcgtaacaagagggtggaatagagagggcactcagtttatagagtccgactatggttgctccgaatttggacggagatgaactcacagtggtgaaggggtgagtcaccggagctcgtctatcgtggcgctaaatggggttaggactcagggcagtaaatggccatccaccacgacttactgcgacgtggtacgatggcatatggcatggcatgatcagggtaaacggcggcatgacaacgatggtcgcgtggccacgtcaccgagcaagtgggtacggtgagaccggcctaatccaatcctcctctgttcttttcatcctcgaggtaatatgccactcgaacggagcacaaatctcggtgactggcttgaatcatcgcgcggaggtcgccgtcggacaggttccctgcac

SEQ ID NO: 101115 - DNA, 782 bp, Zea Mays
tgagaggaaggtatttccgtgatatttcaattgtgagggctggaggagaaaataatgtccctctgcccgaagctgacgaggtggtagtttatagaagtttcatgaaggcggggctttggttcgctctagataaattgctagtcgaagttctaaagactttcgaaatttaccatcatcagcttacccccgaagctatcatcaagatggggatctttatttgggccatgaggagccagggattggaacaaatgcttctgcaatatccacgagctatcctatgaaacgaaggctactagcaaagagcaatatcacaacaattttggttgctacagctttgtgcctcgctctgaggtgagctacctagttccgacatttcggaagagatggccaggggcctgaatgcaagagtggttctatgtaaaaaatgacttggttgaaagggaagatattaaggggattatccaacaccctatctggtctcacttcggcattaggaggccatccactgcctttgggaacggcattctagcatgccaggctgcttttaatacagtatgcacttacataggcaccagggacttagtccaggagcatattacttatagagtgtggtcgctcgcaagtgggtgggagatgccgaaggaagctgctgctgggtccagcgaaggtggtttggtctatctgaagtacacattcaagtacaggagccagtttgatgagccaaatgttgactggctagatgccattaaggcaaccaatgatgaattgctcggtgcctattc

SEQ ID NO: 101116 - DNA, 401 bp, Zea Mays
ccaccggtcgcgatatattgaaccggtcgtagtgcctgaatttggcgaagggacttcttcaactgccgaagtaaaacaagttgctcccgtgtacagagcgctgaataatcgattgtagtgccgaaggtgcttacagtcaagccatccaaagccaaggcagatacggccagagagccagaattgaaagaaacattgatgatgccaaaaattttgagcccaccggcagaggcagaattgctgaagatgacaaaggctcctgccacaactcccaagaggaggaggatggccagcgtgctagacgctgtcatggagacaacaaaaaccttgaaccctactcctattaagaaagttgccaaagttgccaaggtacaggccgaagccgaaactgagcctacagtgcc

SEQ ID NO: 101117 - DNA, 483 bp, Zea Mays
cgacggatcgctgcaactgcatccaattaagcacaggctgctagctgcggccgcaggcgcacgccgacacagcatacacgcaggcggtgtacatgtatatgagtatatcgtcccaggccggctgcagagacctataatatacggtttgactctagagaccgggggagggctagcggccaagcaacacctctatctctccacgctagtgaaccaccccatgacccaatctttgtaggacgctagtcatttgtggtgacccttggatcctagctatctaatgctaacaaaccactgactagttgtcgtgttctagtactctatcttcctttcctttgatatctctatttctctatcctcctttatctctcctgtactgtagtatcggtctatctctttccatcaatctaatgacatcctagccctgcttgctgatgatatactaggtagccatgggctctcttgtgcatctgtgtctatgcctct

SEQ ID NO: 101118 - DNA, 472 bp, Zea Mays
aaatgatagactctagcgtaagatggcaacatgtttggacctcacatacagcagggctatcagtacagcactggcagttgaagccaaaaatgcgggagacggaaagtcaaagggatatgcgggtgaaagatcaattcagggacctaaaaagagaacaaggttggtaatccgacctttcaatccaaactgttcttcacgtcgcccacctacatatccattcaaacaacccgtatttattcgtcccactcctgcccccgctccgaccaatcagccgagtgcccctggtactcatttccctgcccttcccagttcctccagtggttgcttcaattgtggaaagtccgagcatttcatcaaggactgcccatatcagaagcaaaacaaatccaactttcagcagacttctgggaactcaaatcaaggaaaggggaacatgaccaactcttcaacgggcaaaaacttgaagaaaact

SEQ ID NO: 101119 - DNA, 405 bp, Zea Mays
ctttaaactggactggtagctgttattgtaagaaaattctgccaaggaaagacacttgtcccaatccttcccatagtgtagcacacaagccctcaacatgtcttccaaaatctgatttaccctttctgtctaaccatccgtttgagggtggtatgctgagcttcatattacatgggtcccaagtgattcttgcaattgctcccagaaacgtgctacgaacggtgctcctttgtccgacacaatagtccttggtattccatgcaaacaaactatctggtcaatataaatttctgcatacttttctgtcctgttggtggtatgcactagcaagaaatgagctatcttggtcaacctatccacaatgacccaaatagaatcatggtgccgggaggtatttggcaatcc

SEQ ID NO: 101120 - DNA, 283 bp, Zea Mays
ctttccgggatggccctagcttggtgggataccttcaacgctgccatcaaagatgctacctggacagagtttgaaactgctttccgagagcaccatgtgccccaagggatcgttcagctcaaggaagatgaattccgggaactaactcaagatggaagatctgtcagtgaatacgtgcacaaattcacagaattggctcgctacacgccggatgacgtcagcaccgaagtcaagaagatggcccgctttttgaaggggctcagaccagaactcaagaccatcc

SEQ ID NO: 101121 - DNA, 464 bp, Zea Mays
ctgtagcgccgttgggggctcgccggagattaccgccgtggctggtaatgtgccgccatcggctagcctgggggaagatgagagacagtcccgttagatgcgctatggacggtctggattcgacgtcaccgtgaccgttgatcgggtatcgacgaccgtgactcagccggcatgccgagtcttctgtggatgatcctagccctcggttgccagatctgcgcttaagattagatttccgttcataaaatctggaccgttcgattgaaatccagtggccacgggtgggtaccgaatcgtaatagcctgggtctaatctgggcccttgggtcgggatcggatggctcagagtccatcatacctcttcgccacgccatttcactaaagagaccctatgcttttagctattcaacccgcgatccactcagggtgcgctcggagtcttagggaatcttgtgccaaacccc

SEQ ID NO: 101122 - DNA, 555 bp, Zea Mays
ttcttcttgttgtatcggctcagctatggcctatgggtgttctgcctttcggggatggagggagatagggagaaaaaggttgtggcatgtgggcgcacaagagagagggccgcctaaaatctttgcttttggtgcaggatcatttgatctatagcagggtggaaagggaaaggaaattggagctacgaccatatatgcttgccaccatgccaatggtagagttggtagacagtaggcttcatttggtacagaaactaatgtttagtttttcaatctaaggttcatatggccaggatggggaggagctgataaaccaaaggttcgtcaggttcatgaacactgcctccatcttcttcagattgcaagcaacaaactccacttgtgcttgtgcatgttccgactctgtttcagtgccgctccactttcccagtggactctttcaattcgtatctggtcgggtttgtttctgtgcacatcaagcaccccggaagtgatgttccctacattgattgcatcttgttctattgtaacagccggcctcctctacggctccgc

SEQ ID NO: 101123 - DNA, 979 bp, Zea Mays
cttcatggtctatggttcagaagcagtgctactcgccgacctcatgttcggggcaccgaggttggtcttcaaaaacatagctgaagcagaagctaccaggctagaggatattgatgtactagaggaagagtgattgaacatagtaattcagtcgactagataccagaagaccttgaggcactatcatgataaagtcgtacaacatcaatcctttacagtgggagacttagttcttcgccgaattctaacgggggaggacatcacaagttgtcaccactatgggaagatccattcattgtatcagaggtcactcggccgggatcataccggcttactcaaatggatggcacggaagtggggaactcatggaacatagagcatcttagaaagttttacccttagcaaggcctcaaaagctctcgaagcaacattgtactctgtaatcggggacttcatcatcaataaagttgtcgttttcaaaggcattctgactcttgactatcggctgacttcgattcaattgaacttgaaatcaatatgccaactcggcttagggtgaccactataccctactaacggagcaatcggcttaagtcggcaacaacttaagacggtgcgacatgctcacgctaactcagcttagggtgaccactataccctactaacggagcaatcggcttaagtcggcgacgacttaagacagtgcgacatgctcacgctaactcggcttagggtgaccactataccctactaacggagcaatcggcttaagtcggcgatgacttaagatggtgcgacatgctcacgctaactcgacttagggtgaccactataccctactaacagaacaatcggctcaagtcgacaatgacttaagtcggcgcgatatgatcacatctacccatcttagggcgaccactatgccttaccagccaggcgatcggcttaagtcaaaaaagcctcaaaaccagcacagcac

SEQ ID NO: 101124 - DNA, 418 bp, Zea Mays
cacatagagctttatttacattgttatgaaggaagagaaagaattgttgagaataaaaattagacattgtagacacggtgtgattcagggatgacggtggaacttcaaacatcatcagggtgtgatgtttactttatagttcagtttcctgcatgcagttgaagttgaatcatttgcattgtgattatcaggctggtaaacccagctctgacaacttttagtaactacaaaggtcaaagttgtaaaaccaggggatcaagtttaagcataaatttaagagcagctaccaaaggtctaatcgtcttcaaagttgtatcatagcttgccacagaacttacctttaaaagccatttgagtagttttcataggtttactcatcttcattttctaaatctagacgtgctaaatgacacaaatc

SEQ ID NO: 101125 - DNA, 1085 bp, Zea Mays
caattttgctataaccttagattgttgtttctgttcagcttgagactggacaataatgcaagattgttcttctaactgtctcttggcaaaaccaatttccttttcaatttcttgacaatgatgctgcatattcagtttagcagtatcaacaaatgagcaggactcatgaaattttcctagtacaacagtaagaaatatcaaagcttcccaactctccactgtttgtagctcaagggacctataactaccgcgtaactcattctgcagttgcccgataagaatatctttggattctaaatctgatatgcattcaaccaagtcattcacaagctttgtcatctgtattctccattcttcttccttatctcttagcttcttagtgcaacttctatgtgtctgctccagggctcggaacttctcccataaacttttcaatgacacaacagcatatgtgccaccaatctgtgcctcctgatactccttgagacttgagcgcaaatcctcattttcttgttcaagatgtgccttactgtatcctatttccttgagcaatgtaaccttctcagccagtgctcttctcaaatatgcaatccccccatccgtcttggagctcaacgactccatcattgatttggccccttcatattcagagaccacatagccatacatgaggcgcaactcagacaactctgcttcgactcgcttcctgcagccttcctcatgggccaacgcctggctgcacatatccaacctcgacgggaaatcctccgtgaccctggtcttggaatccaaatcatcctcaagagtgccaattcgatcaacggaagttgatctatctaagccccactccttcttgacagccctgaagccatcgtggagcttattgagagcctcctcgaggtgcctgaactgctcagccttccagttgagcttaccctcgacggtggccttctcctcctccggcttcaccagcatgtcgtccctcatcaccacctccctcggtgtcaacaccctcttctcagcctcgcttcccctccagtccttctctgacaggagccccctaagccgcgcgatctcgttgtcac

SEQ ID NO: 101126 - DNA, 441 bp, Zea Mays
ctcggtcgcccgatcaaacacggacagatagaattagagcagagctgttatgaatcggtatgaaaccggggtcactggattaaattatttcccacacacatgggacggcgggttgattacccataaactaggggtcctaactgtaaagacgctcgaccgaaagggtatctgcccaactgagccatccgatcaccaacgatcggcccatattagaacccagacgatacgtaaccagtaatttgctctggtcgccagatctgatatcgacggatgaggaacatccacgccccaacatgacctaaaccgtctgtcatagaatcgacgccccaaatcaactctcgcaaagggggtacatgctgacctaatcttggccgcccgcactccaatcaatggccatgctcaactcagttcctcacagcggaactcggcggcgccgcccac

SEQ ID NO: 101127 - DNA, 662 bp, Zea Mays
cacaaagtgaaccctagggagcagttacaaacccctaacattgttggttatcaattcaaagacgaccatgtcgatgcagtttatcaatatgaggaattgctaacctcttttactgtttgtgagggtatggcactcaactcattgaatagagaccgtgacaatatcattgcctccgagaaacagaaatggcagccaaggaaggaataagccaccgacatgctttgggtcgaagaagactccttgatcaagatgctaataaactttagtctgtaatgcatactttatttgtattgccttttaagtttatgtattattttgtttttattaaatatattgcatttttggatctaatacaattaatgtttttcattgaacatgatgagtagtaagaagaccacagggcaaggggatttatcaatgtggctaccaagatactccctagttcacatagttcgctttttcaagggagttcttctagccacaacatacaagaggcgttgttgagacacgcctgactagagctgcgtgatagcatgattgcactacaaatgagtggcgaggtaaatcttcatgtagtttctcttatttgtcattaacttatatataaatgtgtttacttatctcatttttatgtccatgggaagaggaggacgtgaccaaag

SEQ ID NO: 101128 - DNA, 465 bp, Zea Mays
caagagggagttcatgtctagtagagtgattgttatttgctaattgcaagattaaagacttcattagtgtatagggagtagtaagtgtgcatccatatttttaggccaagtgggaatttatgcttattactcttagtgattggcgtcaccgagctatagcttggtggtgattaggaacttggtgatctctcagtgatgtttgtgggagtttatgcttattactcttggtaatcgacatcatctaggcggctcagtgacggttgggagcttggtggtctcttagtggtgcttatgggagatctaactcatgttgtgaacattgtaggtcattcaccatgccggagtagtgaagaatgagcccatagatagcacttaggccttacacaaattaacgggtgctccaacaatgaccattggaactgccgactctaagcatataccttggaaaatatcattgtattcctt

SEQ ID NO: 101129 - DNA, 732 bp, Zea Mays
caccgtgtgcacttacatcggtagcagggatttggtacaagagcatattgcttacaaggtgtggccgctcgtgaatgactgggaaatgccgaaggaggcggctgccggctctagcaagggtggcctggtttatctaagatacaccttctgatatagaagccagtttgacgagctaaatgatgattcgctagaggctgttgaggcaaccagtgatgaggtgctgggagcctacacaaaggcagaggacgaagccatgatcattgccttttggcgctcaaggaaaaaagaagctgaacagagtttttgatgtgatcgggtttgtttatcctgactattgttttccttctcgaaaacaaggagtgaagagaaaaattgccacttcgacctctttcggtgtaccaaagtcgaagagagctaaggtcctgacccataggccaaagcacattccctagagaagactgttgtagtgcctacaacagagaagatgcagcttgttgaaagtgctgaagttatccctttagctatgggaacagttcctgttacgccagccgaagctagtgccgatccaatgaaagagccgagaccaaagaaaacagctaaaaaacagccaaaactgctcagtcccccaattgtggcagggttgacgaagctatcaactactacaacaacgactccaaggaagaggagaatagctagtgttttggatgctattttggaatccataaagacgcc

SEQ ID NO: 101130 - DNA, 296 bp, Zea Mays
gtgaattgtgaattcagttggtaaagcctaactcatggttcagttggtaacttgcttgttacttcagttggtaaaccaacttcgacatcagctagcatcctatcgtttacagcatttttacatccaagttttttaaaatggtctggttgtagaaataaagaaaaaaatcatgcacatagattatggtggcgcgagtgctttttagctctgtctttcttctgtatctatcaaccactctaatcctacatgttccaatgcactttatgttttccatcggattcagaattcagttgttt

SEQ ID NO: 101131 - DNA, 802 bp, Zea Mays
ggagtttccccctctccttttgtttctctacaagtcatttaagctcgccattctgttgaatcatactagatcaccatttccatgtccctacaatttcatgtagtgtccggccaacagcttcggttttccctaccttcataaagaagacttcaatttccaaggcgtgttcccttcggagcagtcatgagacgtgctcatttgtgatttgagttatgatgcctgtatctttctggcaccacgttgccatactttcttttgtccactgtttcggcatccccaccggggaaaaaatcatgggttctgtctaatggcaattattagagatcctgccatgttgctggcaattcgttatgcgatgagggaaatgagcttagctgcccttcttttctgggggcgatttgattgccactgtaagtacctgccggcctactgcttctggagcaacacgaggtgtggtggaggtcgatggaagtgtcagtttggcacctcttttccatttcatgtagtaatcatgttctaccacttcatcatttgcctccagtccaccacggcaccaccaactttccacccctcacattagtttttctcctcagtcttgtgttcctgctgcttcctgtgaatggattggttctagatcaactggcaaacaaactttcttgttctttgctatgtgtgggaaatgatgctgttttatgacttcagttttgtctatccattgttagtgtgggtttctctttaacttcacttgtcagcatacctgcaatgaaaaaaaaatttgattcaaacatgcattaaatctgca

SEQ ID NO: 101132 - DNA, 741 bp, Zea Mays
atttggcaacattaaaagtaaacttgacatcttcttgctgattcttctgaaccagctacagagaggagcaggcatggggtttggccttgttcaaccaaactagctcagtagcatataattcctacggctcgtcgtcatagctactttggttgcactcgaataaatagacattgtgatgagctgctttaggtgcatatttgctttggctttcacaagacaaagccccctttgatgcaactaagctaatgtaaaaaaaattggatgccctctaaattttctttcaaatatgaatgcatcccattaaatgctaaccctgctaattgcttatctgctacatggatctagaaacatcattttcttgtgtctcagaaccttcagatgtaaacattaaacgactcatcccgcccttttcacagtgttgctaaatcgactaattctaactcgtattccccaaagaaaaaatgctcatgaaatttctgctctagatctccccatgaataaatagagttatgtggcaagatggcataccatgcaaacacagtactagttagggataatgaaaataagcaactatggaaagcttctctattggcaaattctcctaattatgctagaaactagcctatgtgctcgtgcgtgcttttgccatgtttactagaaagttttgtcaattctggtattctggtcccgtgtgggtatgggatgttgttgaatcgactgtggtatggcttcgcatatgac

SEQ ID NO: 101133 - DNA, 932 bp, Zea Mays
gtgagatgttccacttcagatccatctcttgcatcaccaacaaaagtgaaactttgcactgtgttgtcgatgcgagaaacactatcgagaggcaagcggtcgtttcctcggtctagggggccactcactcaaatttgaaacgacttcggcgacagccgtggctagaccatggcaagctgcaacactgtcgcgagtcatgccaccttgccaccaaggttattgcctcattcggcagccaagccacactaggccccgaccttaatgcccgagagtggatctgctttgacaccacgacctcatatggtacctgtgatgtctccaacacaacgcataccgctatccacttccccaaccaagatctggacccaaatcaataggaggggggagtaccgggccgctgcgccggagccactcatccacttgcccgacttccttgtcatcaactggggagtggatgagaacttcgtctctgatgatgaaccagttaaggtgagggaagacccacaacagtgggaagcacgcaagctccagaactgacaacgcaacatctggcattaccatgtcgctagcgaacaggactcaacgcagtcggtctctcatgatgatgagtctgtgctcagagatactctagaatattgagaattcttcttatgaaggaacgcccggcaacaagctcgctacgacactcaagatcgtcctcatgcgcaagaagctgctcatgcgcgcaatcgtgagcttgccaagctagcgtgtgcacaccagcacaaaccatcacccacttctagcaacatactacccgacttcacttgggccatgcagaccccaagtcgccaatgacctccataactcacctgagggggaattctatcggcaactccttacccaagcagcgaaccacctcctgcccttggttcctactgaagacaatgaac

SEQ ID NO: 101134 - DNA, 319 bp, Zea Mays
gcttaccaggacaagaaacgtcgccaggtggagttccaagtcggcgattgggtgtggcttcgcctacaacagttcacagcagtcaggttgacttctgctgctccctccaaacttgggccaaagtactacggtcgataccaggtcctccttcgggtagggctggtctcatacaagctgcagttaccacctcgtgctcgaatacacgatgtcttccatgtttccttgctgaggaagtttgaaggggaggcgccaacacaagtggtaccattacctgtgatcttgcatggtcgtgtcctaccaacactatccaaggtggtac

SEQ ID NO: 101135 - DNA, 911 bp, Zea Mays
ctcggttcggccatccctcgaaccaagttgttaggtctattttaagactgaataatcttccgtgctctaaggagtcgagtcccaccatatgtaatgcttgtcaattaggcaagagtcaccaacttccatacaacaatgctattcatcgttctacacgtcctctagaacttgttttctctgatgtttggggtcctgcccccacatccgttggtgggtattcttattatatcagctttatcgatgactacagcaaattcacttggctttacttgctgcgcgatagaactgaggtccagcgtatcttcttgcagtttcaagctcatgtagaacgccttcttgatgctaaaatcaaatgtgttcaatccgattggggtggagagtaccaaaaacttcacaatcaattttttcgttcgcttggtatttctcaccatgtgtcttgtcctcacacccaccaacaaaatggctcggccgagcgcaaacatcgtcacattgttgaaaccgggctctccctcttagctcatgcgtccatgcctataaaattttgggatgaagcttttgtcactgccgcctatcttatcaaccggttgctaacacgtgttattgataatctatgtccgctagagcgtttgttcaaagctccacccaattataacatgcttcgaattttcggttgtgcgtgttggccccatttaagaccttataacaaacacaaactctcctttcgatctaaagggtgtgtgttccttgggtatagttccagccacaaaggttacaagcgccttgacatggattccggtcgtgtgtacatctctcgtgatgtagtttttgatgagagcaaatttccctttgccactgatcctctatctcgtagcgatcacccacaaaccaaccaaactagtccaccagatcgt

SEQ ID NO: 101136 - DNA, 392 bp, Zea Mays
caacaagggcgtatgatcggaaatatccctgttcagagctactactgtagataaaggatatttattgtcccattcagtagctactaggacacgatccagcttttcatatgtcggattaggtaacctgttagcccaagtagaaataatgcgcttgattgattcgtcaggtgaacagtaacaggatatctatattggctatcgtctccaccggcactgctgccactgggtgtgcctcttctattcacagtggtgttcttcagtatctgcaggtaggaaaaatcaaagtacaaattcagagtctcagttataagataggaaacgatgttggaacatccccgttaggtcactcgctcttaacgggcaggatggaccgaaactgccaggcttttcat

SEQ ID NO: 101137 - DNA, 565 bp, Zea Mays
agaagattgataagggtatgaagcatatccaagagaaaatggaagccggtaaagctacttgttttaagaaggatgaccaaggagtgttatggtttaaagaccgtatagttctgcctaagaatgttgaacttcgtcaacagatcttggatgaagcccatcatagtcgatattctatccatcctggaagtaccatgatgtaccaagatttgaagcaacattattggtggactaaaatgaagatagaaattgctctctatgtggcaaagtgtgacactgtagacgagtaaaggcggtgctatgaagactactggacccctgcaatcattgtctttcccaacatggaaatcggatgacataaatatggattttgttgttggattacccaaaacatccaaaggatatgattctatttgggttatagtggatcggcttaaaaagacatctcattttcttccagtcaaaaccaatcacccaatctttgtttatgctcaattatacgttgctcgtattctaagcctccatggagttccaaagacgatagtgtcggaccgaggacaacaatttg

SEQ ID NO: 101138 - DNA, 417 bp, Zea Mays
atgagtctacgtctaagttttctgagtttgatgactctgggagttcggttgtgtggacggaagagtcttcggatgagggcttggattactttgcggccttggatgtggctgaggcggaggcttctccgcgtgttacggatgctgaagttttgcctggtccgagtgttgggcgtaggcagcgaagggcggtggcgaagcgtagagtgagtgaattggatggtggttggcttcgtgtgggcaaggctggtaggcaggaattgttgtcctcgccggttggggcgagtataggtgagggggagttgcgaagtctttttgagggtgaggagccgaggataatgctatttaactatagggagatggggatcattccgaaggttgaaccaatgtaaggtgtgatgccctcgctgtacgcgtgta

SEQ ID NO: 101139 - DNA, 545 bp, Zea Mays
caaactcggaacgtgatcgccaggtgcaatagcacgggtgacctctacccgttcttcccgcccaccaccagcagcacacccgcccttgctgtgacatctaccctgtggcatcgtcgtctcggtcatatcggttttgatgctttgtccaagctcattagctcccaggccatcacttgtaataaacctaaacatgatcacctatgtcatgcttgccagcttggccgtcatgttcgtcttccttttggtttatctaccactcgtgccgtcaataaatttgatttaatacattgtgatctttggacctctccagttgtcagcgtgtctggttacaaatattatctcgttattattgatgattattcgcattatacttggacatttcctcttcgtcttaaatctgatactttcaccaccatttctaacttttttgctcatgtgcgcacgcagtttggcgcctctgtcaaggccgtccagtgcgacaatggccgtgagtttgacaactcctcggctcgcacgttcttcctctcccacggtgccattctctg

SEQ ID NO: 101140 - DNA, 308 bp, Zea Mays
atcatactgtgcatcaagggtgagcaggtatgcagtgaggtacacgactgtggggtcgtcctcaagcagctgctgctcctccaatgcacgcatcctggccatccaagcgggacggtctctctgaaagggcggaaagaatctgagtggggtgtcgaccacttcttcttcatagatctgacacagggccctcaatgccttgagagcgacgacttggcaggtgtctttgaatctgtgcccagcagcagtgacactccattccacatggtgtggactagatccaatgtatacagtcacgacacacttctctg

SEQ ID NO: 101141 - DNA, 362 bp, Zea Mays
agaaagctagcttttgaaaaaatacttcctagattgggttgtttagtttcgattttggtttttagagggcaaaagtcaaagttaaaaaccaaaccaaaacacccataatcgctcactgtcgttcacgtctgtcgaaggaagaagaaagagtaaagtacactagcggtccacgaacttggcacgatgtgccgcttacccctcgaacacagaaaaccaagcaaacatgtcctcgaacttcgtcagtccatgcaaaaccatccagaagtcaggtttgtaaaaccggataccgatgtggcatgccacgtcgcagccacttggggtccccaaattggcatgttgtgttacttatgtccacgaacttg

SEQ ID NO: 101142 - DNA, 321 bp, Zea Mays
agcttcgggtcaggaagtcgccttagaggtcgacacacctgatgctagagttttgatttctgctggtgatgctaaattggtccccaatgatgctttgcagattgctttggttggtaatccttcgtcaagtcaccaactaacttcccatgatttggggcttccttcgttcttctccaatctctaggtgatttggcttttcctgatctgactatactctgggtgaaatactgtccttgcactcatttgttttcaatgttaggctttggttgacgagatggctggtcagctgagatcgcagggtgcctctatcccggaaagagc

SEQ ID NO: 101143 - DNA, 382 bp, Zea Mays
aaaaacaagtattatatgtgaatattacagtacaaaaagctgaagctacaaattaaatggtcaaaagaaacctttcccgtattatctctagcagattcatcttcttcccaccagtaagccaaatcagcataaaactttcttcctagttctacaactttggctgaaggatcattaatatcgctcacagaaaccttaaagtctggcaggataacagacttcacatgatcgcaaccagctttctcaagtagggaaactattctccatgcactcacacaagaacagaagtcccctcggctagtcaagacttcgtcgaaggcttcaacttcacatttgatccatttcacaaccttaacagcatcaccacagacaaattccccctcgc

SEQ ID NO: 101144 - DNA, 494 bp, Zea Mays
taattgttagatactttaaccttagctaaaacgaactgataacttattaactgactagaggtttagaacagagggatagattctgtgcagcttctggtggggaaaagatggatctcggtgccaaacgcccggattctccacctgattctcctggaagcgcttcttcccactgcatcgtttcaacatggatggagaatcggctctacggccgcgtcgtgaggaagcgggtgattcctgcagtacctcttcacattccgcacactggtgtgtgatgttgttcgtatattttaagcttcagtatagcgtggcaaaaggcaaggaacgtgttcgtttctaacgaatgtttaactcacgtaaattcaacacatgtttctgatgaaggtttaactcatgtttggaacagtatatccatgcgctggtgctattgcagttgttaagtgtaccttaaatcctcatgttcagatgttaacaatacgataatttggacatttaag

SEQ ID NO: 101145 - DNA, 316 bp, Zea Mays
gcaactacatccacccagcacttcggtaactttaacaactactcccatttaggcgctggtactcaggcacaagcccttgcatcttcatgtagaagtcatagagattggataataaatttaggagcatctagacatgtcacatgactaattgattctttcaaaacataatttcatactattcaccctgaaactgtccaaattgctgatggtacctcccaactcattcatggtgtagggtctatagagtgtacaccatccattaatctatcatcagttttgcatgtcccatcatttacagtcaatctcctttttgtca

SEQ ID NO: 101146 - DNA, 448 bp, Zea Mays
ccgaggcagtctgggtgttaaacacgactgagtgcagggcgaccgggttcacccctttccgccttctatacggatcggaggctatgaccccaccagaaataaaacatgggtccccgcgaacagttacgtcagctgtccccgatgtggacgagcccacttcgaaggatctcatcgatggagaccgagtcttcacgctacaggctctaaataaataccaggcccagacaaaagcatggcgcgaccacgcggtcatcccgcgggaattcagcgaaggggacctcgtactcgttcgaacagctcggacagagtccaggggcaagctggagcccaaatgggagggccctttcattgtcaagacgaagacctcccccagcgcatacaggctcgcaacgccaaacggcgaagacctggagcactcctggaacatcgacaatcttcgcaaattttt

SEQ ID NO: 101147 - DNA, 515 bp, Zea Mays
acacgatcggttgatgaacccagccggcggccgtccgtcaccggcttgtcaactcctggagttacgccatcatgatcagtcgtcgttgttgtgtgaggccaagccatccagttggaaataggctcgacccgtcggtgtcttgtggattccaacgcctcttcctgcacaagagccagagcgcaggcaacatcgaggttggggggacgctgaaccataattacagccttattgtcatgcctaagaccatcaatgaaacgcatagtgtaatacaatggatcggtgcgagattcatatgctgctaactcatccactagtgacgcaaattgttctatatactcggacacaggacctagctgcctaatatgaaacagctgtctaatcagtgattcatgttgctccctaccaaatctctcatgaatgagctcacaaaattcttcccatgacatgaaacgtaaacgacgctctacggactgcaaccagcgatgagcctttccctcaaagtgcattgacgctac

SEQ ID NO: 101148 - DNA, 467 bp, Zea Mays
gcatcgatcatgtatccatgcatgcacatgcgaagtgtaccataaaacattatgaagtacaaaaggctacatcggctaccaactaaattatactgatagcacgggccccaacactcgatgaaagtgacatattgtatttgcccctttaggaggtatggcaaccgataggaagagaaaatctctgacactatgccacgaccaatggcatggacttcgatacgactccatgaatatgataagaacgggctagttttgccttagtgagtggactttgatggttatgtaacctctctcctctcttgcactataaaggggatggggtgagcaatgatttgggattcgatttaggaacatcacacgagattcagaccaattctatcagattcggacatccttgctcaagaattcatccaggaggcaagcataaaggtggattaggacagttataactagaatccccaccatag

SEQ ID NO: 101149 - DNA, 488 bp, Zea Mays
ctgtaatctataaggttcaaaagatctctattaaggattacaacacttgtacgctcttgtagtatgatgaagctaggcggaaatctgaaaccatccttggtccttgactaatcttattttggaaataaaaaaattgtgttcgctctctatcttaatgtcatacaagcctcttatgcagtctgtctcactaactcttttatcctctgactagatgatgaaccccaatggaaatgaagtaaatggtgtcaatgacaatattcctaccttaacaactatgaacgagaaaaatgagtcaccgagatattcgatgaatggaatgaagaacaacaaaaggaatagaaaaatgtttggatacatgattggaccacctcaaccacaagcaaaagtcacgaaacacacggatacccaaacagaagaatcaagtcaggctcagctatataagatacagacacccaatgaaccctcaccccctgttggtcaagcaaagt

SEQ ID NO: 101150 - DNA, 306 bp, Zea Mays
gaaggcctctacgactgtcgaagaccaggcgcatcgagacgaagattacgtgttgctacctgtgctatattaaaatggcgggcccgtgcaaaaccaccctgggccacctggtcccacttgtaagccactatgtgagcagagttgatggtgtgtccgttcgtgggtgtacttaagcaagctgtaatgacccgcgataacccttgtgaggggaatattctagagataacgtaggtaaccagggacataacaaaaagggaaatagggttaaccattttctataattaattttggtggctgacgaccaac

SEQ ID NO: 101151 - DNA, 405 bp, Zea Mays
tgtcgatggattactcatttgttttcaacacaacaagaattcatatggatttcagattttgggaacgccaagcttactttgtgtgtgtgtatggccaccgacgttatgtgttgtgtttgtgtggccggcgtcaacattttgaccttctccatgttcatcgtggactgcacgagatcaaacgaattgttcatttgagtagcaaaagacaactagagagcggtcaagaaatgtagcaaacgtaattggattgacctaccttcatccactatgacgtgaagatcttcacctagaccaagacacgccaggagcagcatgcatcgtgcaaagagggccatgaggtagtgactagtgaaacaggaagcgaatagtgcaacgttcttcatgggtatttagcgctaatttttc

SEQ ID NO: 101152 - DNA, 311 bp, Zea Mays
gttcacctctctctggacgacgcttgcaaagcggccatggcagttcaggaggaagtacagtttgatctcaaggttgacgaagcagttattgccccaccagaacagggcgtgactcccaaccccgtgtttacttcggtctgctctgatgttccttcgtgcactgctcaacacaatccagctggaaaggagcagcctctggggctctttttggatttgccagatccagggataccggacttcgggggagcaactcgtccccctgcctccacctgccgcggcctgctgccaaccactgccccgcttgctgttaa

SEQ ID NO: 101153 - DNA, 703 bp, Zea Mays
tatagctaccgtactggtgctttagcctctcttttacaaggattctgggattcggcagctggctcgtactcgcatccggtcaaatgtgtggtcgctgccgatccatcacactggatccccgcatcaaatgcgctgtttacagagactattgtgtgcaggccgggccggcgcagcaatgcagcatgaagcagcggcaattggacgggttcaggggcgagcagactgaacatgcatgcatgcatgcatatatggcgtttgtttgcttgcttgctgggtggctggcccagcataagtcttgccaggcagattgaagttcccaattgctgctgccatccatccctaattgcatatggccacatctcaaaacacacactaatgcaaacacttggaatccgtcgttcgtacactggtttggaaggaaaaaaaacacagacacgtaaacggaactctgaaagttttcttctttgtcctccttttacttgacgaccacactctctctgctatgtgtgtgtggcagcgatcgagagggatcgcatcaccgtatcgccgccgcaacgaacgaaccgcttgctgccatccgcctcgtcgggcggaacgggggcgatgattgacgacgacgattcacgtatcgtcacacgtctctcccatcagacatgctagctaccactacagatgcatgccagcattgttcgtggacgaaacc

SEQ ID NO: 101154 - DNA, 468 bp, Zea Mays
aataatcaattcagatcagcacacttggacacatcatttatcatgtggttcagttctccacaaaggcttacctacctccacattgttgaggagagccacaaaggccaagggtcacacacacccttcctcgatctcaagccaagagcttttgttgttagtatgagagagatttcactatgaatcagggtaacttacagcagtccaaggccacaacaatcttgtagctcaagggagatgtcacacgctgactaggagcaagctccaagaatcaatgagtgaatgccagctttgagatgctccaatgctcaatgggaaaactgaggaaaccctagggttcttgctattcttggtgttttctctcaactatagaggagaagagccaaaaaatttgtgccaaagtgatcaagtgagggatagggagattgaaaggggaccaaggggtacttgtaacctgtcctgtagcatccc

SEQ ID NO: 101155 - DNA, 1113 bp, Zea Mays
ccaaattcgggacagcagcaaattctgcacgtataccagcagtgatctccactgccgaggactcctccaatatctcataatttccagctgtctgatcacattgactggcatcgccttccttcctaggctgaacttcagaccttgggcctagacgttcaagagcagatcgtctgcccaaaagtacactgtcttccgtagaaccccttcggccatcacagtcccctggtggcgaacgcgaacggaaacgccgcctctgtcgtgtggaaccattcatatctgttgggatctggatggggtcagggacaacacgttgtccatccaacaccttaatctgaacacgataggcaacagatagcctctcagcgcttggtcctattcccagcggttcagtaatccagagatctctagaatgagggattgaggccaagtcataacaccaaccataacagcgaaaggcctccaaattcttgagctcaagagtctcctcatgtaccttctgcacccaggcgaaagggttcaaaatgtgctggacagtggaaagttcccaagcatgaattgggatgccacttagctcgaattccacagggataggcaaacttgcacctgaggatccaaaaaacctggaccatcttttacagtgcagagagaaagcgcctgcacgaatagtgttccatctcgatgtcagctggtcaacagagtggagggtggggagcatgagcagaaaatgtccatgagccaattgcctcaggattagcgaatcagaattgacttcaagcttttgagcaactgcatctgcgatatcggcgaccggcacaagcacatcactgaccacaaagatagacactgcgttcttcaaatcttcttctgctttatccatcaaactattccaaccgatcacacaagggtgctgaagatgcacagggctgggaacatccagaggggtctcgtcatttccaggttgaatagattgtccacgacccggatcagaaccacccctaggggatgacttgcgctttcgatggcgtctggcgtttgcgtcgcgggcggggtgggagggagccctgcgagacagaaacagcagcagctccaacgtcgctggaaggagtaacaaat

SEQ ID NO: 101156 - DNA, 455 bp, Zea Mays
gtgaaaccgctccattggattgtatggttggttgctttgttgtgctctcgatggctatgactagtcctcctcatcctaggtgctcgggcttgacccctgtctcttcctcgctatagttatccaaggcctatgcactaaccctgatgttctttggtttggtgtaacttcgcgacgactaccttgttggcctcgggtgaaagccctcctaggctcttgggcgacggtggcttcgatgatgccttgtgcgtcattcaccttgttggaggtgggccctatggtttgtggtcgcctttgttgctggtttgctctttgactcggttgatgctcactgttggcggcctcttctttgtcgtcggactccttgtttagggtgccttcgattttttttgttgagggtgtccatgcttattcgccctccctcctttgtggcttcatcctcacaaagggtgttggat

SEQ ID NO: 101157 - DNA, 473 bp, Zea Mays
cgggttttatttttaagaaagccagaggctcataagcaaaagaggcgggccgaagaggtatctttgattttcagccgttcgattacaatctgaccgaccagattagatcagccctgatatgaaccggtacgtgtacgttatccctcagatcaaaatcctacggtcatggtttaacgaatcacagatctaatctgggccaagggatcagagatccacggctcagatcagtttcatccaaacgctgtcgaacttctaatcgtggccgttaagtatccgatcgacagccatagacccatcttccacccgcagtcgtgcaagagggaatcaacggcgcagacaacctcttcaccctcttccttaccagccggtcgaccacggtggcgcggtgcacaccgcggcggagctcaccggtgagcatggccgaacggcacccaagcccccatatcaccaacaaaaacggctacacgatgcgg

SEQ ID NO: 101158 - DNA, 370 bp, Zea Mays
gacagcagtgtatattacttatcatgtgacttttgattgtcagtttgtcactgttggagatgagcttggagcaaactacacccctacaactattttcagcttcaaggcagcttctgaagcggacaactcggcagatgggtcgcgtgcacaagctagggcagagaagaataaggcgccaagccaaacagaaccaaaacttcgtgtatgagtatgaccgaaccctgcgcggtcgtgggcatgcagagctcccgatgtgcgtggttctcattcaagccctgttcgtttaaatatttgatgtatgtgttttatataaatgagatttattgtcattatttaaatatggacacaaaaataaagaactgaaatgaac

SEQ ID NO: 101159 - DNA, 1320 bp, Zea Mays
cattcacaaaccgtagagttgcaatctgtacacataattccccaagatagttaaaacatcttgaaccactaaaaatggttaaagacaatatgcaacaacaactcacatggttcttaaaccagatagcaaattgtttctcaatggttttttcaatatcttgatttccttcgttctctagctcctttctgtataacctgcaaagcatttttgaatagacaattagctcataaaattagtaggttttgtagacaccagaagtgaaattgtagaaattgtagataggaagacgtactctatatattgttcaacctccggacaattgtttaacacataccaaaccatcttgtcatatatattttcttggtatgtaaccgtatgagctctgagtaaatcgactccatgttggaaaacagataaatcacccttgctcatatcaacacgctctctgttcctgccctcccgattatgccgtgtgtcgagatcatcaaaataccgcgaacaagcaatcaagcattcatcaacaacatatgcttcagcaattgagccttcaggtcgtgccatgttcctcacagaatgcttcaaagtatataaccgtctttcgactgggtacatccaaccatattgcactggtcctctcaggatagcttcatcagctaaatggacagttaagtggaccatgacatcaaaaaatgcaggaggaaatattttttcaagcttgcatagaacaattgggattttagatttcattctatgcaaaacacttaactttaatgtcctagcacataattgctgaaagaagttacctagatcagcaattgctatgtacatgtcattatccatgattcctcgtagagcgacaggtaaaaaatccgttgcaatattatatggcaatcatgagtttttaacccttggaggttgcatccatcagtagtaatgcatgttgctaggttctaagcatatccatctggaaactttacacttcttataaagtcatagaaagcaagcttctgtttttatccattgtgtatggagcaggaggagcgttatatgaatctccatcacgcttcaagtgcaaagattttcttatacccatgtcttccatataaagcctagcattaacactaccctttgatttcccgggaatacctaataatgtaccaagaattgactcacatatatttttttcgatgtgcatcacatcaaggttatgccgcagtttcaaacctacccagtaaggcaaatcccacaaacatgaccttttcttccaacattggccatcatttgcatcccgctttctcttcttgttttgaggatgctttc

SEQ ID NO: 101160 - DNA, 489 bp, Zea Mays
aattgggggaaaactggaattatcgggctacagtgggtaatcggaagtgaggagcggtgcactggcttcgtaacaagctgacggagcacgctgaacactcaatttaaagggatcactcgagtgtttcgcgaatttgggatgggatgagcttgcgatcggaagggaggtgagtcaccggagcacagctaccgtggcgctcaacaaggtaaagaccctggcagtaaacaggttgtccactgcgacttcttgcgacatgataatgagcgtaagcacgtgaacggctacaaagagcggcgaactccggcgagaacacttcagccgatcgcgcgacaagtgacgcggtgaacagtccggtgataaggctccaactcctccctgcgctgagatattttacctcaagcagttatccgcgcgccacttggtacgaattgcaacgccgacgtggatcgcggcgtgggttcaccagcggcgagatgcactgaatctgaa

SEQ ID NO: 101161 - DNA, 967 bp, Zea Mays
ccaggtagctatcactctatttgagaccttatctactgctctgtactcttgcttatattttcactctaccttgcaacagtcaggtcaggatggtgtggatgaagaatgtcacaccatcagggggaggagatgacaaggaccctcctcgccccttcagacaggtcaagcggaagattgcctatcttgagcagcaagagggcaggaagaagagaaatatggacacagccacatgtgcagcacttgcagcggcagcagtagcaaaccaggctgagcagagaggccagctctagatttcttctgatcagattgcctatcaggttcatcgcctcgcgtctcggcctcgctccactgctcccccactccttccgccgtagtctccactccacctcccactttgctagctcctgtcgctcccgagccatctaccacgcccgctgtgtccaccacctccaccactccagctctcggtcccgcttccgctccgcccattcctccaccttgctttagggagcgtgacgagaccgaggtgagaccgcttgctactgatccgtgtctgtttgaccttcatcgagccaatactgcctaggtatgtcggttcatacatttacccatggattctttgttgctagcctagagggacccagcagctgcgccgctcttcagcattaggactcaggagtccttctttagggcgcagttgccagcttaggttactttgagggcacaccgacttttggatctccctgcatttctgtcagccaccggtgccgagtcagagggtcacctctcctatctgccaagtttgctttcacttctaacctctggtggaagatacattgaggagtgggttagagtgttctatgccatagtttgggtagaccctgatcattagtggctgaggttccgctttgagcgcgaggatgtgacgctgcatgctacccagtttagagagctctttggatttctt

SEQ ID NO: 101162 - DNA, 445 bp, Zea Mays
ggagaccagagtcgttggattataatccgagggtccggattagatcttcatcacttatgaagcggtatgacacgctaaccgtaggatcaaagatcgaccgtccagatttttaaacactaagccccattcacatccgtccgatctgagatccacgtataggatgtgatttccccgaagcagtctcagggatctaatcccgaccgatcagaccgagatcgatggctcggatacactccggacgaccaggtacgctcaccaaatcccggtcgctagcttctcatccatcgcccaaccaacgccccgcgcgtttcttctccctttcagccaggaacggtggcggcgccagataccgagcggtggcgaacccgccggagctcggctccgagccaacccaacagccccgcccaaaccgaagtccctacacgcactgaggttgacatgttga

SEQ ID NO: 101163 - DNA, 771 bp, Zea Mays
aagagtgctgaaacaagagagcagagggcaagattggaccataagtgcactgaccacagtgagagcttgttcacggtggcggaaaactgatttgggggaactgagcgattcgggggttctggtgagtaattggaggcacgagtgggtgtgttgagtgcacaattacacagtggagtcgagggtgtgctcattttatagggcccttgagcagtggcccatgaatttgtgattacgcggtggcgatcggagggaaggggatgcactggcgcaagcgattagtggctttcaccgtggcgagctcactggcgatcaacgaatatgcataacgcgagctactgtgatgtggtaagatgccagagcacgtggtgcaaggtcgcaaggtggctaactccggcgaacctatccacagcagctgtgactcaggcgggtacggcggccggagtagaatagtggtcggagttcatccatgacgcgatattttcttacccctctgcgatatccaactgcgccgaacatgaatcaccatggcaggcgcaaatacgggtgcacggtcgccggcggtgagttctccgagctggcgttctgatctagtcactgtaccattgaaacccgattcagagcgcctgacagaccgaattgcaatgtctagatctcgaatttttgtgcaacaacttgccaatacatctgtaacaaacttgtagcccttcataccagctacaattctgctatagcaactaccctcaatcaagcaatagatcttactctaattcg

SEQ ID NO: 101164 - DNA, 379 bp, Zea Mays
tgaagcgcttgtccgcggggacccatgtttcatttcctgcggggtcatggcctccgatccgtatagcaggcgaaagggagtgaatccggtcgcccgacactcggtcgtgttcagtgcccagactgcttcaggtagcaggtcggcccatttacccttcttgtcgtcgaggagcattttcttgattgccgtgaaaattttgccgttggcgcgctctatgacgccgttggattgtgggtggtacactgaggtgaaggcaaacttggtgccaatagagaagcagaagtccctgaagtcttggctatcgaattatttgccattgtcaactgtgagctcggacgggactccgaatcggcagacaatgttttgccagaagaatttc

SEQ ID NO: 101165 - DNA, 429 bp, Zea Mays
cgacttgctagtcgacacacctgggcgactaggcgactaatcgcgattaggacgacgactaggtcgactaatcgtggctaaggcagcaacagattgaagaggggattcaagaggggggggacagatcaagagaaaggtgcagaggggattcaagaggggggacggatcaaaagaaaggtgcagtgattgaagttaccgtcggttgatgtactcatcttggtggtaatggctgctgggccgccgccgccgcagactgctgctgggccgccgccgtcgaggacggtgagctgttgacgccgaggaggaaggtgcagggctgccgccactgaggaaaagggtgagcaggtgaggacattgaggaacaaggagggggcagagggtacccaccggtgttggacagggagaggtgagccgccgcacaggcacaac

SEQ ID NO: 101166 - DNA, 303 bp, Zea Mays
cctcgctttataaaagagaagtattctcggaagtgatgttaacgcctaaaggcaccttcccagtaggatacaaatgggttttcgttcgtaagcgaaacgaaaacaacgaagtggtgagatataaagcaaggttagtagcacaaggctttacgcaaagcccggcattgattataatgaaacatactctccagtaatgagtggcataacatttcgatacttaatttcactggcagtacaaaatcgtctatctttgcagttgatggacgtagtaaccgcatatttatatgggtcactggattcgga

SEQ ID NO: 101167 - DNA, 555 bp, Zea Mays
caactcctgcctttgcaaaggaggccgccgaagctgctacaactcatgttgaagtccaagctgggccctcagtgcccatcgaaacagggcctgttgaaactattgaacaggatactgaacaaggaccttcagatgccaccctgatcttggaaaaagaaggcgcatccaagaaggttaaatctcctactcccgaagcgtttactgaggagctagactttatcatacgacatgctttgggtaaacagttgttggaagagcagattgccgaagctaagcactatgtcatggaattaaagtacccaaaaggatccttggtgtataatggcactgatgaagatgactttctgtactgccttctggacaacaaggagttatctatttgccgggagatggcaaggaatatgaggtttccgaagctcgagcttggtctctctgcaatgtcaaaggatgaccttacaaacagtctcgcttataacaatctgaaggtaaaaacgttctggcttataaacaagttattttagtgtcttgtaccatagtgttgatcctccttttttg

SEQ ID NO: 101168 - DNA, 328 bp, Zea Mays
cctatacacctatactcaaacaagaacacaagtctacaagagttcttatattatgtcatggaatgaaatatctcatcatctcgggcaaaatggtgaacaggtctagaagtcaaatcaataacctagaacagacctagtgctggcgtctctcacatgagtggggtatggggaagaaataagagaggcaagctgtcaaatcaataacctgaacaaaaaaatagacaaaatggagcaaactgaaaactggaattaactagatctagcatgggacaaaatagcacagcattgtcgttttaataacagaaaatggactcgttatcctaaaaag

SEQ ID NO: 101169 - DNA, 867 bp, Zea Mays
tgaaaagaccctataaaggaaaaagagcgcaacctagctctaagatagatagttcaatgtcttagtttaggtacatcatatgaaattaggaataagaaatgcaagactgcgtagcctaggcctgaggggccatcaagattaagtccttcaaatgcatcttcaaggtctttcatatgtacagtagcatctcaaccatttctggtgccaggtggtcagtcaagagtcagagcactggctccatagggtggagttagagatggcgcatgttggttcctcacggtcgataaagaaattaagaaataaattgagacttaaaagataataacaaagcaaaatcgagactttgcttgtcatagtagagccagagcataggttatgttggcatgagagtagagatggaggaccacgagtctacagtggatgcgtcacagatggagtgaatactagagagggagacaacttctagatttatggtggagagctagagcctgaaggggattgcctcaatgattgttggaggagggtggcggttgaatgcgatggtggctattggagtcggatcatggaacttgcatgacttgcgagagccgagtgagaggagcacgagggtagggttggataggggatcagtcggggcacgacacatgccgatcaaccgaggcatggcacatgcctcccttgttatatactctaactagtacaaagcctgtgcgttgtgatgacacaccaatcatatttgatggtataatggtgcaacgactgtacgacacacaagggcccaatgttgagatgacgcacactagttcctcacgaccgacaaagaaattgagaaatatatcgatacttaaaagataataaatggatcaa

SEQ ID NO: 101170 - DNA, 592 bp, Zea Mays
gccgtttagtcattatctgcgtaattagttttataattagacgatatttgatatttctaactagcatcaagcattcgatataatagtcactaaattttagtttgagaatccaaacacaattttgccatgcgtgttttgtggtacgttctatgtagccaagaatcatagtgacaacacttcgagttcagcgtcggtctgtaggggtcgttggcgtggcagtgatggtggtcggtacagaccaaaccacagatagtatcaacgaagcgtgtgtcgagggaacgacccccggtccctaggacccaccagtaagagagcgtgccgggaaagggatcccctgatcgctaggtgcgccaaacctagaaggatccacccccgatcgaaccccgtagcaccgagcccagggtcaagcgttgcggaacctgacgagggaggctgggcatgtcagaagggaaccactcgaggggatcctgcgcccagccccggactgacccgccgtaaatgattggccgcattaaccatgcctggcatcgagctacacgtgtgcatcgatccgcttcccactcatgacctacggacccctccggccgcatag

SEQ ID NO: 101171 - DNA, 348 bp, Zea Mays
cctacccagtaagttcactactaaaataatcatcgacagttggtggttggtgcgccaggtaggggtcattgcattgatcatagtagatctgatggcaaccatgtgttctacgccaggatatgcatcaaatgtagctttcgtcaccgatccatgagatgatgttggacccacccttgatctttttatgtcatcaacgctccatagtgaacatagccatgacttagaagacttaatctatgttatggtgaatctatattagcctagacacgcaatactgactcaaacatgaacttcatttcgacgtcgactccaacttggtacaagggcgatctagaccacatatttaac

SEQ ID NO: 101172 - DNA, 717 bp, Zea Mays
agtccattggcaggactgtaacgctcttctgcattactgctagcttccgagatgattgaggaggcgcctgaagtgctattgttgttgccagcgtgttgagctgcaggcgcatgacaaatactaggtgataatgccggttcggcttccatcccatcagactgtcgggcgcgcggctccatactaggcatggcagctttctcagcccatttaatgtggcgaccacacttccattgtaagcaagatctcctcttgtgaccatatctagcacagaaccagcaaagtaactggtttctacagtcgctgaccagatggcccggggccaagcattgtgaacatgcaatatgctttacttcttgagtgctagattggttcttgacaattggcatgcattatacgactgttgcagcccctttcttgaaagcataaatgtcttcctttggcaaactgtagttgagaaacactactagttagaaaaggagtttgcaagctttgtccaagtattttccatatactgtgtataggcttataggagggcaagttgaagaaagacacaaaggccacaacttgctgctattaatctagcgggtttgttgctgactggctatccgccaattcaatcatgccgcccgcttgtgttcttttggacttggtggatgatacatacaaaccagcatgaccctaaggcacgtgtagctgccttgcttatcactactgttt

SEQ ID NO: 101173 - DNA, 1181 bp, Zea Mays
gtttaccaccttccgtttgctagaaacggggaccaatttatcaatgttattatacaaatgactgggtgtgctgtcaattatataatatttgggattacttgaatcacttctatgtcacatttatcagccagaggcagatgtttttcagctggttaatgtgcattctctgtctctgtgggcaacctgaccgatgacaattcacattgtacacctgtttgtagcgctgattattcttttaatgcaggtatgtacatgccttcctattgttctgacagtcacattagtattttctaacatctgaactttgttcatctaaagattgtgtataggcctggcgaaaaattgaatctacgagatttccagtatcctgtaaataacgtatctcatatctctggatgactttattgctgaccaacctggtggatctctgactactggaggtaatgacaattatatcggtccatgatcttcctgtttcattgtttcatggatagaagatcaaaacgaactcagaagcacataaatattgtgaatatgcatgtatttttaataggatagtgatcttcagctggaaacttgtctgatcctgtttctttctctactatataaagcaacagttttcaccgtcatctgctcccctacacttaaatggtaaaaaagataaaattatgcacaaatcgggattcgaaccatggttgttggctctaaatctatatttaggcccacctaaccaacataacacacgtcttttgctttatactctatacttatattacttataaatagaaactgtagcgacgcacatgcactttgctagtatgcaccgatgtgtcactaacaaaccttttttagcaacaaagccatatattcttgggctactgatgacatctccaaggaagtgattgctatatacatgtctgcacaaaatacataagctctcttaataatttgtatttttttctgaaaggggttgaacgatgctcccccccccctaactccttgatatttatgataacatcctctgatcactgtttatattgtcatcaggatgcaacagaacagagtgttgctgtggattttataatgttggaagtagaagctgcattcatgtgcgatggtgcttctaaaatgccaattcttttgtaaacagaatttgtgatcttgaaaactttgtggtacgg

SEQ ID NO: 101174 - DNA, 1084 bp, Zea Mays
gagagagcaaataattaacttatctgtgtttcattgtatttcaatttaatttcccagattattcaagcactatagagcttgatatagttgttatggccacttggcaatataaataaatatatgatgccacacaacacaagcaaataaaatatagagctaaacaaaattgtttacgaaggttgcacataatgtgacttcaggaccttgaacaacccaccataatccacgcgagtacaagctctagtgtatctggcgtcaacgcgtgtgcgaccatcagggctacgacaacacaacaagccttcgtaataagcgcaacaggcacaattatggctcggtaatcggggtacacgataagtccacgcaacatgcgcaacaggcgcaattgtggctcaatgatcacggcagacagacagtgcctacatggcatgcgaaaaatacgcgactcagcgatggcggttcgactcaaggggagctgtccgattaaacgagagtgctatatagcaatcacatgacgcagccaagttcgtacgacacaaatattgcgacgcgttgccaaggcgcagtcaatattcagctaatgtcataactcagccgataataacatagtttggtcgatgtgtctgagtacccactatatcatttaatcgctcgatatgaatataaaagctcaacgcaacatgaatatttagagcgatttgagtatgtacagacaatacaatattgccttcacatgcattctaatatttctgctatatatttaccacaaaaatagagcagaaagataatactagaattaatacatgagcagaagtttatcagttacaagaaggcatttttcatatatatatatatatataatcatgcaatttctactaattatttattacacaaaataattatccaatgtacttaaacatcacctatggtcaagcagtcaagccaaggccaagcgcacggtcattgcaacaggaaacatgaactcgtggacgtgctgagcaatgcgcctacaacatttttttagggttgtggcacgaagccccgagcagcaaatacctgtcgtagcgcacttaccgagtcacggtac

SEQ ID NO: 101175 - DNA, 716 bp, Zea Mays
caaacatccatagcgccaccatccgccggctctgacaacagatcttctggaaccatgtcttcaagagtttgatcaaagttcgccagagataattcttgcagaccaatgagggcagacaaagcaggagaaggaacaccactactttccccactagctatgtaacaccggctgttcttccgaattagagggatttcgtcctcttcttcatcatcttcatcaacaacacggacagtacacccattggggtcagtttcagcaggatcacacccattggggtcagcagcagtcgggtcacacccattggggtcagcttcagcaaattcaggcactggcacttcctcagcaataggaacagaaggaccggcaccctgatccaagctagacactcgacgaagacgtctcttcttctttttctgcccctcagcaggagaagtgggttgatcggctcgacgagaacacttcgggcgaacactgacagacctctaagcatccaaagctttgctggcctcagggatgggcgccaccactagtgttttagcaggagtggcgtcagaagaatcctcagctaacatatccagcatggcacttatctctgtgtcacttggattcaaaggcacctcaaaatgaacctgcctctcgtcgtcaggaatttcttcgagtgaggcaaccaaagcactaacttcttcaggagagggtcgcactctaaggcccaaacc

SEQ ID NO: 101176 - DNA, 573 bp, Zea Mays
gttcagctggtgtctactgttctatctatgtcagctgcaccgcctggttctgggaatcaggtgactgaggtccttccggtcagagtgatgtgaatactcagtttggggtttctgtgcaaggaaatatttggactgttgaacctctgaacagattgtcttcggtttttctcagcaagatgattcatggttggaaggatgatactcccagcctcaaggtttattccaggagaaagaagcttgttctagagccagttcaggatgaggagagtgtgctttcatcacagctgcaagagttcaagaatgatgtaactaaaccgattaatagtttgctgccacctccttgaatcaccaataggaggaggactgtgcctgctaatttcattcccaggcgtagcaggagagtggccaagtttcctccagagctgggttctagttctgctgcccaggtctgtagacaattgggtttttgtgatgaaatggagaacatctctcttgatgatgccaacggatatgcaaggctattcgaaaatgggctctctagtagccatattgctgcagttgctgcgctttttg

SEQ ID NO: 101177 - DNA, 577 bp, Zea Mays
gttagtgccttatggagtgtttcgtgttgagtttgttgctatagttcttgtgctcttaattttctttctctcactcttgttcttgtaaaagctaacgagagactctttgttgtgtggagatcattatggagacttcagtctcttgatttgagaaaggaaagttcaagctcgatctaggtgattgcttgagagaggaaaatggttgaaagagacctgtcctgagtagactccttaatggagatgcatattttctttggaaaccgaactccggtaaataaatcgtttatgttatttgtgttacgtaccttgcgatttatttccccttccctcttttaagttctcttgcttgtgcttgataataaaacatatgtgttactaagagcacctagaggggggtgaatgggtgatcgtgcaaaaatcaactctgaacaagacaaacttggtttataacgagtgttagtgaaagctaaaaccaagttattaagaatagaggtggagggaaagaggagaactcttcacctgattgctccttttaaatgagtatcaaacttaggagcaatacccaagtaaagatgag

SEQ ID NO: 101178 - DNA, 1160 bp, Zea Mays
attatacgagcacccttaaaaacaatgacaaggatcatttgtgggttttaaacaaagacaagctcatttcttatgtcccttgaagtagaatcatttgctgattaaggtacatgaacccagaagtgttcaagttcaactgttcaaggttgctcaacttgtctgcctatcacacttaactgcagaagcactcaccaggtggctgctaagttgttatccatcattaggcgcagaatggtaattttgcaaccatcaatgctagcttagccacagtaatcactcaaactaagttctagcatgcttgatatgttaactcgtcaacttttttggtatattttttctcaaacgcatatgaatttttggtatatgaaacatagacagtaatttgagtatttagaaacactgattcccagtattcatgtctagaattgcttgtgtatggagatggtaagatgacaaagcacaactacaccaaactttgcagaaaataataaaaaggggcctccttagcatatgactagtaagcatgcgtgaaaagcttaccaagttttgtgtagagcaactgaccccaaaagccttaagtatatttgtgactgtgaaagtgaacttccaccagtagtccatgtactatggctcggatcctttgccaatttaaaagtcaacatattatcttatttttaagacgtctaagcaatccatgatcgtttctaccagaaaccatcaaattcagtacaaagaaataggcaacaatttatccttcatcgtagcatcaattcaagcgtacaacatgcctatttgaccatagcattcatagcaacactactgaagcagcattccacatgctttacattgacttggcttcttatccctatttattaatggcttcttatctctttttattaaatgataaaacaggctcagctaacatagaagctaatagttacacctaatagcaatccaaatattagtcctgcatcttctatatgattatacccacagctcagcacatttacacattatgggctatcttcttctaacgttttcaatctaacttctccaagtaacatatttactgagagacacctgaggctctggcagtgtggctctcatacaccataagaatctttcacaacagagttatcagtagaatagacagaagataa

SEQ ID NO: 101179 - DNA, 722 bp, Zea Mays
gggcaagaacctggtgaagaggtggagactcggaaacccaaaggtgctcgcccaaagcgttcacaccgagtaagcctctcgactgcacctgttgaagaaaaaaggaagaagaggtggcttcggcgactgtcatgcttggaccagggtgcgggtccttctgctccggttcatgatgatgtaccggtagaagcccttcctgaggttgatgccaagggttgtgatcgtgcataggctgctgtttgcatatttgatgaggacgaagaggaagaagaagaagaaatcccgctgatccgcaagaacagccgacactatagaggtagcaaggggggtagtgatattccttctccatctctgtcgactcttgtcagtcttcagggactttcaatatcagactttgatcaagcactagaggaagtcatccccgaagatatgttatcaaagccaactgccgatgatatcccggccgcctgtttagtggtcccaaacggtgggctttccttgcttgactctgctgggcaggaggtaacccgagcggtgtctcgcgcatcgtcgactttagagggtagtattcaatgccaagacgctggtctgagtcacccgactcccatggaggcgactaaagggccctcagccttagaggtggctactgcagaagacccagcccccgagggtggtgccggcagttacccagcccccgagggtgttgccggtagtgatccaac

SEQ ID NO: 101180 - DNA, 299 bp, Zea Mays
acatttgctcccaaatactcaaaaatatgaaacatttggtttgttaccatagaggacttcgtatgaagtcttcttgaggaggtggtgtaggtacaaccgatttatggcatgacatgatgtgttgatagcttctgcccaaaattggtctgatgtcttatattcttcaagcatcgccctcgccatgttgatcagtgtcctgttcttccttgccattctgttgtggtgtataaggagcaaggaattcatgtttcatgcattcttcctcaagatactcttctacttgcaagttcttgaactct

SEQ ID NO: 101181 - DNA, 441 bp, Zea Mays
ctctgtgtatgtatttattcacatttcacataattatgactatgtgactaatacatgctcacctcttctatcattttagtgattttgcctgttcgcgtgcacgtctcctgtcctgcctggatcttttctctctcgagaagtttccagcagtcaggtcaggatggtgcggatgaagaatgtcacaccgtcaggaggggagatgacgaggaccctcctcgccccttcagacaggtcaaggggaagatagtataccttgagcagcaagagggcaggaagaagagatgtatggacagagccgcacgtgcagcacttgcaatggcagcggcggcagattaggctgagcggggaggccaactccaattttcttctaatcagatagcctatcgagttcgtcgcctcgtgtctcggcctcgctcgactgctccccccactccttccgcc

SEQ ID NO: 101182 - DNA, 610 bp, Zea Mays
ctgagtgcagggcaactgggttcacccctttccgccttctatacggatcggaggccatgactccacaagaaataaaacatgggtccccgcgaacagtttcgtcagccgtccccgacgtcgacgaacccacttcgaaggatctcatcgatggagaccaggtcttcgctctataggctctaaataaataccaagcccagacaaaagcatggcgcgaccacgcagtcatcctgagggaattcagcgaaggggacctcgtacttgtccgaacagctcggacagaggccaggggcaagctggagcccaagtgggagggccctttccaaaaggcttcccccagcgcttacaggctcgcaacgccaaacggcgaagacctggagcactcttagaacatcgataatctccgcaaattttttgtttgactcatcagggccgattcgcccttgtaattcgcaaaaacaattttattccggcccgcactcttttcctcccgaggggtgaggtttttaacgaggcggagtcatgtaatatacaagtgaaaaatcccccgcaaaaatctacgtcgaaaaaagaccgcgccgacggtcttcgacattcgaccaatacaaaagtc

SEQ ID NO: 101183 - DNA, 508 bp, Zea Mays
gcgccaccgccggccgctgctgtctcgagcaattgaacaggcgtggcttgcagccatgccccacattacgtcgccttcactcctccatcttttccacgctagagggcgcgtcccggacaatgcaaatttgcaacgcagaacctgtctgtctgaatgtgctgctatactggcagccagccagccactcttcagaaacgcaaaggtactgtattactaggaatctttctgagtattggccactagggttcttcgttaaatgggatggaacaagaagggcaaggatgccacattctatgatgtaactttatgttagatgcaactgtcaatggctaatatgttagaaaattggcattgttcacagggtgcagaatgttgcttagaatcttgtctttgtttatttgtgtttgagtaatcatacctcgtgaggcatggcttagattgaatgattaccttctttcgttggagtgagtatggatatggtaaaggtggtaaataaacggctcgctcc

SEQ ID NO: 101184 - DNA, 313 bp, Zea Mays
cttcctgccctcttgctgctcaagatagacagtcttgcccttgacctgtctgaaggggcgaggagggtcgtcgtcatctcctcccctgacggtgtgatgttcttcgtcctcaccatcctgaactgactgctgcaagattgagtgaaaagataagcgagagtagagagcagagatacggcctaaaaaagagagactacctgggaacttctcgaaagagaaaatatctaggcaggacagaagacgtgcaagtgagcaggcgaaatcactgaaatgacagaagaggcgagcacgtattagtcacatagtcattagt

SEQ ID NO: 101185 - DNA, 283 bp, Zea Mays
tgctttagtaaatgtgtctcgactgttgtacaatgatgttgattgtccgagcttcgaactcttcatgtgcatcatgttgttgttgtacctagtggcgcccttctggctgttgattgtgagacgaagttggagccatgagtggtggtggtgatagctgggcccatgcagcttgtgagtggcttgccgaagcaactgatgttgtggattgttggttgcctacatactcggggatgtatggggaatagcacgaagcagtatgcaggacctgcgttggctgattctg

SEQ ID NO: 101186 - DNA, 310 bp, Zea Mays
cacgatcgaagttatgtgtaacgagattttagggaactatacgaaaaagaagatcagttgatgactgcagcctttggctcccgaccgaagcgaagattaaatcgggtaatggatgctctacattttgaatatcctgattatgagcggttgaacaagggcgcctaagggcagaaaaggaaaagagttgtcagtgttgtgggcagacaggccgctagaatggtaaaagaagatgaagaaaaactgaagaagaggaaattgagccctgagccgacagcggttgctccgaagaagagaaaagttgcagctccga

SEQ ID NO: 101187 - DNA, 864 bp, Zea Mays
tacttccaaagcccaagctgaaacccagaagtgcgaaattgaggatcttcggaaacagctgactgaagcgaaattaaaatgtgctatcgccgaagctgattgagacgccagtgattactggaaaaattattgggaaaaacggttgtagaacttcgttcttcaaaagaaaaatgttatgaaaaatccatagaatgcgtgggaaaaataaaaactagcttcaccaatgttggcgcatactccagcgaagacaacttcgtaagaggcgatcctgagggcccaattgactggatcagcaacgaagccgaagcttttgaggaaattttgagtggtcgtggagatgtctgtgccttctcaggtgccaagggaattgcggctattttggagaagtcaggttgcaatcatgtgaaagctttggcccaaaccgaagctactttatctattgatgacacgaaggatccttcggctgaagcgagcttagttggcggaaaattctttactgacatctgggagaatggcggccgagggatggcccacgagataataaaaaagagcgaaaaagattctcacgatacaagagaagcagcagaggcagctgaaaagactgcagaactcgaaaggcggataggtattgcctaattgtttttaactttatattttatttttgtgacttcgaacttatttacgttttgtatcgcagctgaactatctcctcctccagagcctttcgagtcaatggccgacctagaagcagagaaagaagatgaaattactaaagtggccgaagctattgtggacgaagctgtttctcgactgctaaacgaagctgcggaaatagttttaaaagaagaatagctgttattgtaa

SEQ ID NO: 101188 - DNA, 493 bp, Zea Mays
ggatacattttgatcaattattacagagagattatacaccaaagatattgcatcacacctctatttgttagcatttgtgggaggcgaaggcgttgcgcccacagacgagtgtccgacttgcacccgcatattacctggcgcaaggagttgagttcatccttgaagactttggcattccggcgtttccacagatgcaagcagcaaagcagaatgaagtcattgaagccccaatcttgaagaaccgggggacatgcaagctcatgaagatgagagcggtgcatatcagaggggacgacaatgcaaccatatatctagaaagctctggcaaagacacagtggaagagaatatgaaggtagtttcaagcgctataggacagacttcacatgtttcattatctaggaatcttctcttctgcaaattcacacgagtttggagtttgtcttttaaagcaagccaagtaaagaaacagactcttatggcacgctattttcc

SEQ ID NO: 101189 - DNA, 441 bp, Zea Mays
aacagactggggaataaactgcaatctatggtctcccaaaggcagagtgctttcatcaaaggccggttcatccaagacaattttatgattgtgcaacaaactgccagactcctccatcagcaaagacaagcaagaatccttttgaaactagacattactaaagcttttgactcagtttcctggcctttcctcctcgaagttcttcagaaactggggtttgggcagatttggatgaatgttctgtgtggactgctatctacctcgtccacacaagtactgcttaatggtgttgctggcgaaaaaattcagctcaaaaagggtttaagacagggagaccccctctcacctatgctgttcatacttgtcatggacgtgctaggatggttaatttcaaaagctgatctagaaaatctgttgcatccattggcttctagacctttg

SEQ ID NO: 101190 - DNA, 548 bp, Zea Mays
gctatctctttccatgttgctatatctgtcaagttggtaaattttgtaaattttcaacctatttactggtaaattgtgtaaattttttaagaattcatttgtccctatcaagctgttaaatataatcaaaaaacacgcccagttctgtccatttagctggtaaattgtgtaaatttttaagctgtttaaatatagacaacagatctctgtaagctgtttaaagatagacaacatattctttttttaaatttttaagctgtttaatcaaaagacatgtccacatctctgtatacacgcccagcaccagcagattaaccaaacacaagcccatcaaatcctggctcactaaatatagacaaccaaacacattcccatcaaatcctggctcattcaatacagataaccaaacaaccaaactaattatcacttgcatccatttattcaggctgggctcaacctgcatcaatgtttcaaccaggctctgcccagccaaggaaccaaacacgcccattgtgtcttggctctatgcgctcaagacagagagttac

SEQ ID NO: 101191 - DNA, 579 bp, Zea Mays
ttatcaagggattctccagcatagcaagacctatgaccgaactcctcaagaaagaccataagtttgtgtggaccccgaagtgtgaaggaagtttccagatcataaaggagaagctcacgaccgcacccgttttgacactaccagatatacaacaggatttcgtcgtcttctgtgatgcctcgaggcaaggcttagggtgtgtactgatgcaaaacgagaaagtcattgcttatgcatcacgcctactcaagccgcatgagcagaattatcccacccatgatttggaattggcagccatagtgcatgccttgaagatatggaggcactacctaattgggaacaaatgccacatcttcaccgatcacaagagtctgaagtatatcttcactcagccagatctcaaccttcgtcagagaagatggctggaactgatcaaagattatgacctcgagattcattatcaccccggaaaggccaacgtggtagcaaacgccctcagccgaaaaccttttgggataaagggaaccaactttttagaagattggaagaaggaatcagctcaactgaatgcatgtttgg

SEQ ID NO: 101192 - DNA, 565 bp, Zea Mays
tcagacaaaagcggctgggaaagagcaataccataataactttggctgctgcagcttcgtccaccgctctagggctagttaccctgttcccacatttcagaaaaggtggctaggctcttggattcaggagtcgttttatgtgaagaatgacctgaatcagcgggaggatgtgaaagggattattcaatgccctatatggtctcgcttcggcattagaaggccactcattgcacttgggaatgacgtccaagcatgtcaggcagctttcaacacagtgtgcacctatattggcacaagagatttggtccaagagcatattgcttacaaagtgtggcctcttgcaagtggatgggaaatgccaaaggaggatgccactggctccagccaaaatggcctggtctatctcaagtagacctttcgatatagaagccaatttaatgaaccaaacaatgactggctagatgctataaaggcaactagtgatgagctgcttggagcctactcgaaggctgaagacaaagctatgacggtcgcctttggtgctcgagggagaaagaggctgaac

SEQ ID NO: 101193 - DNA, 470 bp, Zea Mays
gaaatttttgatggctctagtgtgctttccacttagtgaactaatttggggtttttgttgggcctttttgtaataccttccttaatacattttgtagatttactaatatacttcatctttggtaaaggtttccttttatgatttggccatttgcacaatcttttccctctaatcccatgtttagggtttaatggcttaagaggggatttagggttttagaatctttccatgagtgagaatgtatgaaggctagggtgtctctcttgttatgatcaatacttagcttagccatgattctaaggcttttagtgccttcactttccaattttagcatataggataagtaggacataagtgtgttcctttggccagggccttgggtaacacttggggtgttaaagtgactgtaggccgagattcagaaaattgaaatggcaccagtgtgatgtagctaatgtttgggcgccata

SEQ ID NO: 101194 - DNA, 506 bp, Zea Mays
cagcaagcgaacgccgcagaagcgacaccacagctgctgctgccgccgccgccgccgtctggtgattaatagtagtagtatgataaaaaaaaggctcggcagtgcttttggcatactaggagctactaatgatgcaaacattgtgtacttaggtttgtcagataggagtacttaattataagtaactgtgaggcagcagtactgtcctaatccatggtggctttgttgtccccttctccatcacactactagtagtattagtagctagtagctagtagcaataagtacaccgcctataggcttcggtcgcttcattccaagaggccaaaacaaaaagggcaagacaacgccggcacgtagtaggctataggcagctagctcctgcacctctgctgcagaccatgcacacacacatgtaatgtttgttcaggccgtggtcacgtctcttcgcaacatttactcacccccatttactactacgtactgcgctgcacactgtactactc

SEQ ID NO: 101195 - DNA, 960 bp, Zea Mays
gcctggcagttacttctctctgttctctgcctctctctcagtctttggcgatctccacccctcgtcggcgaccacccctcctctccggcgatctgctctccggcgatctcgtcccagtgctcctctgccctcgctcggtgagcagcctcttatccctctgtcttctctctctctccatttctccgggcagtgagttcctttttccacccattttgtgcccaattcaatttcctgtcaattccagtgaaaccaagtggtcatatgtgttcctctgtgtacctttagtatccttgcaggttcctagctccttcgggagggttttcccacctcaaatagccatttccccaaaaccctaaaactccgccctccacgtgttcggtgaaatgcccaaaccagccaaaaatgctccaattgaacccaaatttttcaggcaccttcacaacatctccagtaacatattcgccaaatttcacgcccatccgatattccaggctttaatttcacccaattccccgtttcgagcgatcgtttccgagccgagtgcccaaatctcattttcttagcctaaattcaaaccaaacacacacttcactcatatttacccatataaacctattcgtgaagtatcggctcaattccacgtcatttcgtgcctcaattctaattccaaacctcctatggcactttttatcgttcaaacgccgttttcacgtcgtttgacctctcgatcgtctcatctcttgttttctgtgccatatttctctgtgtatgtatttattcacatttcatatacttatgactatgttactaatacgtgctcacctcttctgtcatttcagtgaccttgattgcccgtgtgccgtatcctgtcctgcctggattgtcacctctcgtgtgagttttccaggtagtcatctcatcctctgatattctatcggattttatcaacctgtgcttagc

SEQ ID NO: 101196 - DNA, 541 bp, Zea Mays
tagattttggagcttgtttgtgattgatccaaggggtttaagcctaaggtccctgtggagaagtggtagagagtcatttggtcgacaagttttgttaaacttgctccccctgttgccatggaaaactgagagtttgcagggggtcaacagggaggtgtgcagatgaaacagttggctgatgcagttgagttcagtgtggtatatggaatttgaagaagatcagttgctttctgctagtgccactcgattgtgggatggagataatattgagatacatcactaaaggtctagagaccactctccactaaaatatccaaggattttggactgttttggagcagtgagctatggacagcagaatccctattgattttgtttgctgcctgcagtaatggacaaaactgatatttaggattgagataaggatgaactggacagcaaattcagtggcctcatccttgtacaaaatatcaagtgttagacctgtttgagcctatcctcaagtgggatatttgtgggttcccagctgccctctcttatc

SEQ ID NO: 101197 - DNA, 386 bp, Zea Mays
tggtgttgacaatgcactcatcaagggggagattgtgaccacaaggtttacttgtcccttatggtttgagtttgtgatgagtaattgtcatcaaagatagtgctttagtgtgatttagcaaactaaccagagtacgagtttgttgttatgcaacatgtctctcgacttgtggtgtgtaggtgtgcagtcaggagacggtggtcgatgatgaaggtgaaggactaaaggtcatgtaggttagtgctaatggaccaggagcgataaaggacgagcgctgaggcttgaccgagggacttgagaatctaggtgactagctatggtggttgacacatagggacactatcaggtgcgaggacgtggcagagaggatcttgtagtcggcgcgg

SEQ ID NO: 101198 - DNA, 309 bp, Zea Mays
tactactcacttactcagtgactcaggaagtcaggaggccggccgggggatccgggttttgcagcactacagctctgtaccattttttggagggattaggctcctggtcgtgctcgtcaatccgcatttgcgcagcacatggcggatgggagatcgcgacagtgactaggcagcgcccgcgtggacatcgacacgcccacacgggtcgtattcgtgattcgccacactgactcacagtgcttaattttgcgtagccaatctgttctgcaacaggcaagaccgcaagagacgcacattgccagttctcgt

SEQ ID NO: 101199 - DNA, 343 bp, Zea Mays
cccaatacatccaggcaccatgattctatttgggttattgtggacagattgactaagactgctcatttcttaccagtgcacaccacccacaggacagagaagtatgcagagatctacattgatcagatagttcgtctgcatgggataccacggactatagtctcggacagaggagcaccatttgtggcacgatttggggagcaattgcaggaatcacttgggacccaggtcatacgaagctcagcctatcatccccaaacggatggtcaaacagaaagggtaaaccagattttggaagacatgttgcgggcatgtgcactacactacggaaaagattgggaca

SEQ ID NO: 101200 - DNA, 361 bp, Zea Mays
tcagtgaagttctgggaccctctaaaaagaagtatcctcaagttcaaaaactattgtacgcaatacttctaactgctcgtaagctccgtcactactttgacgaccacaaagtcatagtagtcaccgggtttccaataggggatattcttcacaacaaagaagccattggaagaatagccaagtgggcctgcgagctgggagctcacgacattgagtttcagccttgcattgcaataaagactcaaacactagtggacttcgtatcagaatggaccgagcaacaagtaccagacaacccggaggctgcagaagtatggcgaatgtatttcgatggcttgctgaagctgcagggagcaggcgc

SEQ ID NO: 101201 - DNA, 597 bp, Zea Mays
ctggactgtgaccactaatgtcacagagtttaggggctgttttatgaatttccagggcacggatgtaaatactttacacagggcacagacgacggttgattcagtgaaaaccgaggggctcatttgtaaagcggtgcgaccgaaggggtaccaacacaccgtggccgcccgatcacctatatgcggccacgattggacttcgggcgcaatgaagaatcccgcacactacccggacgtccgatctaaaaccgaccgccaggattatatcgtcgcaatatgtgaaccggtatctaccctcagccatccaatgacctcccaatggtctggatctaattgagtgaaatggggtaccttacgtccaatctgaggccttcgtttcgatccaacgctccccagatcatcttcctcaacacgccctgcgctaccgcgacattcactgcacacgcttcttcatcgcgacggcggatgccagagctccctttcattgatgggcgtgaacgcgaacaagatctggacgccacaactcgcccagccaaagcgcccgcgccacccggagattaagcggtgcaggggtaccggcgcatagaccacactctc

SEQ ID NO: 101202 - DNA, 544 bp, Zea Mays
agtagcgtcggtgacgagaacattgtatagttgttttccaatagcagttgggacctgaagtcgctatcgtcatcttcctcctcgtagtagtccccaccgtgtggcacgaccttattgctaggcctggggcttgcgatgatggttttcgatgacacgtcggcacccttagccctagggctcagtccttaggcggtgacgccgacgctactctacgactatcactcgcacaacaaggtgtgatatatacccaccatcgattcgatcgatctcctctgtacatgattccatcttcgttttccattattaaccactccatatatgtcaagttgcaagcaaatatgtataaaacattagcactagaacaggtcaggcccaccgcatcaatggaaaagaagactattttgtttttagttagctcatgataccaatatataagtgacttgttttacaaaataataatcttagtctaaaccaacatccatatgttatgaagcacaactagttagtttatcattattaggaaaaatatgtacactatttagag

SEQ ID NO: 101203 - DNA, 339 bp, Zea Mays
caacattgaaagcaactatagcagcctgagctttgaagttgatataacatgttggtttttatacctgaagcatgtaagaataggagtctagatgattccctttatatcactccactcattcaaatcattcttaatgtaaaaccactctcttgcccactcattcggacacttgcttcggtattcaagagccagaaacattgcacctctttgataagcgaaattataataaccgaagttgtcgtggaggcccctatttgccttcgtctgaaagtgtaattcatggatttggctgaaggcttcattgaaagcttcatcatcaagctcaacgccctagctccg

SEQ ID NO: 101204 - DNA, 287 bp, Zea Mays
ggactagttcaagaggggaagaggttacatgctttgatttttgaaatggcaattggtgagccttggcgcgttgacaaggatcacagactctagatgactgacgcggtgtacacgctaacttattggacttgacaataaagtcgacgacgctaaaggatggatgaccaagccgacagtgccacagatcagaggaaactgagtggctggacagagcagcatggcgggacataggtgatgaagacttagagcatggcaccgggtacagaccattgaagcttttaccgcgt

SEQ ID NO: 101205 - DNA, 308 bp, Zea Mays
attttggtcgagaccgcagctttgtctgtcacctcagattttaatgtgctcaggtacgcatctgcaggctgtacctgttccgctgcagctgcgactgtctgtctcgctcgctcgctcgctgtacaaactgcagcaggattgtttggtctgtgttttttcttttgtgagcaacatacaaagaggaatgaatgcctgggccctggggtgggacgcaggagtgcgcgcgcagtaaattttggtgggtggatggccgttgatgggacgggctgtccttgatttgttattgtcgtcgttcgttttcgctctgc

SEQ ID NO: 101206 - DNA, 360 bp, Zea Mays
cgacggcgtagattagaagatgtggataccggttcgtgagttggtctcgaccgtttatccgcgatcggacgggttgaatcaaatcccatctatgttaagccaggacccctggatcgtgatacagcggccattaacgcgtaccaattatgcgcgggccagatctaatctaggccacccacttaggatcggatggctgtcatgagaagatacctcttcacggcacaactttttaaaagagtccctgcagttttataaactcaaccctccatcctttctaggccctggaaatattacacagagccccctagactttgttaaaattgtgtccgcggtctagaatccttgagaaattcagaattt

SEQ ID NO: 101207 - DNA, 510 bp, Zea Mays
cctggctaggatcctaccgacttacccagatggacggaaccgaagtgggaaattcgtggaatattgagcacctcaggaaattctatccgtagcagtacctcgaaaatctggtggacaagctgtactttgtaagcaaaaggtctcattatcaataaagcttctatgttctaccgcatacaaactctcaatcaacaatcggcttaaagtcggagacgacttaaaaccgacgcaacataccttcacttaaggtgactactataccctactaacggagcaatcagcttaagtcagaaacgccttaagtcagtgtgacatgctcacgcttacatgacttagtgtgactactataccctactaacggagcaatcggcttaagtcgtaaatgccttaagttggtgcgacatgctcacgcttacatgacttagggtgactactataccctactaatggagcaatcggcttaagtcgaaaatgccttaagtcggtgcgacatgctcacgcttacatgac

SEQ ID NO: 101208 - DNA, 290 bp, Zea Mays
tattaaggctctaagggtagcctgccgttctgccttcgttcaatctggatcgtccatcgctgttgttcaatctggatcgtccatccgcatcgctgttgttcaatctggatcgtccatccgcgcgcacaaaaattcgacacatgttcacaataccactaactgattacaagagctgattgctttctctgtagcaggcacgtttataagttgctaccgcactcttttgctggccgatatggtaccatttatttgcgccgcggtagagaacatagaatttatttggctggctg

SEQ ID NO: 101209 - DNA, 455 bp, Zea Mays
aacatgggtagtgctttggtgtgactcttggacttaccagagtgtgagtttgtgtatgtgcaaccatgtctctcgacttgtggtgtgcaatacagggacgatagtcaacggtgaaggtgaagatcacgcgggtcatgccgaggggctgagagcggcaaaagacgagtgttggaccttgatcgagggactagagaagttggggtgactagccatgatggctgacagttgggacacacactagagcgaggacatgtcacaacggatcatgtcaccaacacggtcaaggactgatgggacacgtgtctaggacgtgggggacgcgtatggagtatgctactcatagaggtttcggtggtgagcctcaaaaccacccatcaccccggatcgatgattttgtcgagtttgggcctccaaactcaacagtgtggttctggtgagaatcggaggtgacacgt

SEQ ID NO: 101210 - DNA, 388 bp, Zea Mays
agaggatccctcatgccacctcactccaagctaacatgcctcgatcctagcgtttgatggcaacattcgagcattaggtccaagaaagctaacaaccaggtaagtagtttgcacttgctatcattaacaaatgcaacgtcactacctagggagagagaagaacctccatgcctcagccagtttacctcaactcttgcacccaaagagtaaaagcagtgactaggatgcgacactaggaaaagagactccctaactccccacttccacaactccacaatagaagatgcttcgaccttcgcatatggtaccatcaatcaaattgctgataaaggagcggaatgggctaatagataactagcattctccacgaacacattaagggtttcca

SEQ ID NO: 101211 - DNA, 714 bp, Zea Mays
ttctagacaagggtaggagtgggatggatgaacacgggttgtctgaagggatatgtgggtgggcgagaagaagaacgatttgggttgaagggacgaattaccaaccttgttcgcttttcagacccctgaaatggtccttcacccacatatctttttggctttccttgtcccgaatttttggcttcaactgacagtgatgtgcttacaaccgtgttgtaggtgagatccaggcacgtagccattttatgctggagtcgatcattcaatcccctcatgaagcaattctgtgtccacttgatcgatggcatattgggagaggtgattaaacttgttgagatactacattacagaatctcccccttgctttagaggtatgaactcctccagcttcatctgtagcaccccttccgaaacataatgttccatgaatgcttgtttgaactccgcccacgtgacctgatgtcctgcaggctgaatggctgacaaatttgcccaccaagtactagcaggacctctcaactgttgagcggcgaataggggtttctgcgtttcagtacattggatcagtccaaatttttgttccatcacccatactcattcatctacttccaatggttcttctgccttaacaaagagcggtggacgggtttcagagaactctaaatatgtggtgtctcgtgacccttgaggtcgacctctgcctccatgttgctg

SEQ ID NO: 101212 - DNA, 378 bp, Zea Mays
gtcgcttctctccggacgtcgcccccggctgctcgtctcatgtgccaaggcggagctctagccggcaggagcaaacctgggtctagcggcgggagagcacgctggtatgcacagtggcgtgagtggattcgatgcggaggaggataaaaaacatgaggtcgtcgttggggagattgttgatggtatatatagtgccgcattgtcccctaggccaactccacttgccataacagaatcacaggtgaagaatcatgatgttatataatggagatcaactatcgtgagttacactagtagaaaaagactcaaagcctgcggtgcgttatatttttataggcggattcggttatcaaccgtctgtgctatttttagtgacgg

SEQ ID NO: 101213 - DNA, 467 bp, Zea Mays
gcgattcccactccctcgccggcgacctcccctcaccgggcgaccaccgtgctccggcgatctcctgtgtttgtgcctgctcttcacccctctcggtgagcagcccctttctccctcggtcttcctccctctctgttctgttgtacagaggttcccctctccaccctttgtgccattttccaaatcctgtgaatcccagtgaatccaagttgtgaaatgtgttcccttgtggccattgagtgtccttgcaggttcctagctccttcgggagggtttttccacctcaaacagccatttccccgaaaccctaaaccaccgccctccacgtgttcggtgaaatgcccaaaccagccaaaaatgctccaattgaacccaaatttttcaggcaccttcacaacacttccagtaacacttttgccaaatttcacaccaatctgagattccaggcttcaatttcaccaaattcc

SEQ ID NO: 101214 - DNA, 435 bp, Zea Mays
gttaaatcggaggtagaatgagatagttatgaattttcaaaggttttatatattcaatacaagattaattaagagattaattttagtacagttttcatatcaaatcagagacactatgtgatgaacaatattattacaaaattataggaactggaatgagctaaaaaggagtcagaatgaattttatatgaattaaactaggttccggaattgtttttatactaaatatccattttctgtatttatttacttatttttcctgtttcgtggactgtgcgcacaatacagagaagcacaggggcctactcgctatttttctaagacctaggcttcccttggtgtggactgcgggttgtttatcgggttctacggggtctctttagtaaaattgccaagacgaaagggtaaggacctatatgaaccgttggatcagcg

SEQ ID NO: 101215 - DNA, 470 bp, Zea Mays
caacatttgaaaccttgcctctcagcatcaaatcagcttgactcaacatgtccttctcagatattcgcttgttggtaattcgagtggggtcattaacaccagtctacaggtaagcagggtagactctatccttcaaaggctgaatattcttgaaaacaaagtcgacaaccacaacttcaatggtcaagcctctgtccttcaacacacatatctctgcaagtagcaccctagactcagcaagctctgaatctgtagggatctctgtccagctaggcgttcggacgtcggctgtctccctgatcgagcgggaagtgacttcttatgattttccatagtaaaccactcaaagcgtcatcccttaatactgtctttcaagggaatgtcgagatactcagctttcctgcctcgacaaagttccaagctagcacctccaacaagctgatgctgccctccagcaatcccaagccgac

SEQ ID NO: 101216 - DNA, 548 bp, Zea Mays
gttttaaaatggacattacgcaatccttttcctagggttatggtttggcagcttcctagatgttttaaggcattcccgtgtttaagccgtctttccgaaatgaatattcctcagtattatcttcaccacccttgatttcaagaatggttggaccttcatcttcttgaatgatgtttatagatgcaaaactatcaatacggagtgaatgtttatagactttggttactatagatgaaatatcctgctgacctagtcctatctgattcagttgaaaagtagttgcaactaactgggctgctttttttgtcccttgagatagtgctgtgtccacctattataataactaacgttctgacctgcctaaggcgtgtttcttcctattcacatttcactgcatgttgattattgggagtccaatctattttactcagttcttagttctgtgctggatgtatcgtcatcatacccaaaccaattacataagccattgcagcttcatcaggtttctaatagcctaatatgttggccacaacttgcttcactttttt

SEQ ID NO: 101217 - DNA, 371 bp, Zea Mays
gagctttctgagcaccgacttcgtgcggatagcttcaaacaaagtgtgcaagtccatgtgtgggtggtcttcgaggatttccgccaagtgtatgagcagcttggtgtggtggttcacccgctggacttgaaggtgatggtctcttcgacagttaggtcgagtggttgcagacggagacgcacgggctacctatcgtcattcaagggctgatgactctatccgcccttgtgacatacgaaggcagttttgaggcgttgatctatgaagggtatagccatgttggtgcttggcgatgattttgttgtgaatgagaatgcatatactgaagtcagcgcggccgctaatatcgcaacagaggagatgttggaccg

SEQ ID NO: 101218 - DNA, 444 bp, Zea Mays
aacctgttaacttttgtgtgtgtaccagtgaacatcacagaaacctgtgaacttatgtgtaaattctatgaatctgtgtacctgtgaacttgggtgtgaatatgtgagacctgtgtgaaatctgaaacctttgaactattgttctgtctgtgaaacatgttaagtttttatgtgtaacctgtaaactaatgtgaaatctgaaacatgtactatattagtcactaacctgtcaacttgtgcaaacactggttccccttggctggacagatttcaaactgaatatgaggttgtctctatcagcagcaagggaagaaaacttgacggttaatcctggaagatggcgagtgctctatcttggagacttggaagatggcgaatcttggaagaacaatcaaaaggatggtaagattaatggttttagcccaaacattaggccaagttatg

SEQ ID NO: 101219 - DNA, 477 bp, Zea Mays
aagttaaaggagaacatggcttgataaccagtttaatcagcgggaccatgtattttaccgtagtggtgtatcaaggaatcagtggtaaacatttcttagtccttgttgatagtatttaatttgaagatcatgtaatttgatctcatgaaatgatgtcttaaaactggtggtatcacagattctgatgtgtactagaatacatgagtctgagcattaggtaaaagggcaacgttgctatgtccttgcgtgctttatttttttagttgatcaaagttgatgcttttcctatgagctcttttaaagtttaaattaaacagaacatttgttttttttctcacctagggtcgcaatctgattcgattatctgtagccaaacttagcgtctaggcttcaaagcatagcacaattttggggttagtgctctctattttgttattctctcattgccttttgtatgtacacagaggtccttatcac

SEQ ID NO: 101220 - DNA, 769 bp, Zea Mays
ggagtaggagcgacagcttttccaggcaaaatctgttctatagcttcttcctccgctgccttttctccaatttccgaggatttctccttggcgggctctgaaggcccagcttcggcgtcagcctggctcattgtagctttagcttcggtcagctttgtctcggtttcaatctgcgctttcgaagccttggcaattttccctggagtagagcttgaagcttttattgtctccagcacatctagtacactagccatcctttttctcttgggggtcgctgctagtcctttttgtgtctttggcatctccactcctgccgaagggcttagaacttctaatgttttcgtcccttcgattctcggttcttcaattttgtcagtctttggcattgcagccggctcttcaatcctctgcgtaagagcaggtcctttggcttcaatagctgaagaagtctcaccgccaaattcaggcactatggccggctcaatgtagcgtggtcggtaagtaaggaccttcagctttttcctcttcggtgccggctcgcttgaaacagctgaagcggcagccttcctagaggttgcaccctttcttttctgccctcgtggcgggtagcgatagtcagtgtacacaaatccaatagcatcaaaaactctatttagccttttcttttttcgcctctcgaaggccacagatagtgcattatcttcagacttggagtatgctccaagtagttcatcactagtattttcaacacacttccgccagtcatcat

SEQ ID NO: 101221 - DNA, 540 bp, Zea Mays
cgacacccagatccgaccattgagtccctcgacgccgctgcttactcctccatcgccgtggtgacctcctcgggctcgatggcgctgccatcatcttactcctccgtcacccgtggctagcgcgtgggtttgattcccgacattttcttgcgaattcgggagtgatttggggcccctatatggcgaggatttgagtggatttgagaggaacaagtggaggtcggcgacatggccatcacaagcctcctggtcctggacccctacttccgagggaagaagccgaggggagactacgggacggcgagcgtagaaggcaggctagacgacggtgctgccatcacgggcctcttactcctgtacccatacttctaggggaagaagccagtggccgagagacaacagaccgcgtgaggcagcgacagtacgaggcacgccacctagcctgcagagaggtaaatattatttcaccttaagcaccagtctggtggcaattcgtttaactcatctgtattcattccttagttttgctgtggaaaaatc

SEQ ID NO: 101222 - DNA, 397 bp, Zea Mays
tattacgtgtgactatgaccaatgatttgctcaaacgattgagatggatgttttaattgattgatggcgattgtaataccagtcttgatgataagtggtgtggctgcgagtgatgggatgccatgtgttgctcggccatggatggaaatggaatcgtgacacctgactggagagccaaagatacaacttctcatcttctcctgtcatgtatgcgctgatgctgctatgatattaattttgagagtaatttgcagtgatcttgttgtttgaccttttttttcttgctttactgaaagcggtccactccatatgctcagaattcaatgccttacatgtagctagttgtctgattactttcgtccatgaatggtttccagttaattggttgagaacaggt

SEQ ID NO: 101223 - DNA, 360 bp, Zea Mays
gtcggtgcctttccacttttcagtttcaaaccatgaagcaagttattaacaaggtaacaaactattctgcagcaagacaaggtagcacgatcaagcacaaatatagctagatcggatctagataaaaaaaggagcggatcgggtatacaaatctgggggagggggcttatgcttgccgccaccaaggacagagtggacgtgcctctcgtgaccaaacaggcggtggattggcaggtgccggtgctagagccgagctggagaacttggatcactaataatgagcaaaaaatgcatccagaggcagaattatttcaaactgtagaactgtcatcaaattctcaccacagtcacccatcatgc

SEQ ID NO: 101224 - DNA, 322 bp, Zea Mays
tagagtacttcatgatcgaagtccttgttcaccaggtcgaagacttcgaaatgcctgcatcccttttgggacaaagcattcatagccccctcacaggtaatgagagacgcgtaggacgtgagaccagacacaatggacaggagtgactccagctcatcttgcaaccacccagaaagaggagccccacctcctcccctgattcatcgaagtgagcggtctgcgcgccaaggtcacggtatgcatccacgaaaagcgtgtgtgcctattcgaccccggtgcaggtggaggtctccgtcctttcacgatggcagcggatattctt

SEQ ID NO: 101225 - DNA, 462 bp, Zea Mays
cacttacccaagggttagaagcatgtgggtgtgtgagatgataatttgagtatgatctcaaaggttagtggatatgttcaagagagaataaacatagaaagtttgagtggcacataaaccctagaacactcaaaaccctaatagaaaccgtaaaaaccctaattagtgttctattaggtgactccaatttctatgcacttttggaccaaagtgcatatatcgaagtagtagagtaacaaaaactaagcaacttttacattttgggatttccaagttttgtggagcaaattggagtaaattgcaaaagatcccaaatgtacccctatacttaaccctgaaatgcagtgttaactagctaaattcaagccctattatcttctgatctgtggagattttgctatgggttactacaacaaatttgtagagttaatatagtagtccatgtttgattaagtgattgag

SEQ ID NO: 101226 - DNA, 1549 bp, Zea Mays
tccacaaatttcatactcatgcatgtgtgtaagcttgaatttaaatcattcaagcacacatgtaggggaaattatcactactaaataaagttttatggtgcttttttcagaattctatttttgttcttccacccatgcaatagagagagcgaatgagaaaagaggggttttccctgaaaaataggctttgaaatagaaatcatggaataatgctgaattcaaatgtttatttctttatttcttttctatagtataaaaaatgaattaaatgaaattcctggatttagcacgaccttggttgtgaccccatagataaaaatgcaaaatttctatcttcgagacgactgaaaaagggcattgaatgagaaagaaatcatccacagataatcaaactatcgtatgccctggaaataatatgaagtgatcgaaaatggttgaagtaattagataggaggatcactatcgccgaagtagcagattggcaaagcggaggaccccaaatgatgcaaccaggcagatccaaattgacttattaagaacaatggatattattgatgcggatggggcgttcagcgatgaagctcttcaaaaatatggcaggctgttcaactcccccctgtctgaatcccatattaaagccttggctgctttgttcggatggtcagtgcctgtcgatatccatcttcaggatgtccaggtgctgcctgctgacctaggtccagaggatataatgtaagccatcacccatggttatgtagttcttgttgcccttgtttcctatggatccatcaaaaaatcttttttggaatgttagaggtttgaatagaaaagtcagaagggatgtagttcgtgctatggtcaatagtacttgtcctgacgtggtatgtttacaagaaacaaagaagagttctatttctcgtttcatggttacgtctctcctgggagttgtttttgatgaatttgtaacgctcccggcagttggcactagggaggaatttattggcctagaaaagtacttcgtgcaaggttattcaatatagaattgacaccttttcagtctcagctcagttccagcatagcgatggcactccctggtggctcactggagtttatggcccccaattggataacctcaagattctattcctgcaagaattgcaactgattcgtaatttgcgcagtggcccgtggatgattgggggggggatttcaaccttatttataaagctgaagataaaaacaatggcaacctaaacagagccatgataggaagatttagacgtctgttaaacgagctgaatctgaaggagctgtcattgcttggaaggaaatacacatggtccaatgagagatcttcccccaccctggtccgtttagacagggtgttccatactgcagattgggaaaccttatacctcaactctgtcctacaaagctcagcttccatgatttctgatcactgcccccttttacttggattgcatgaactcgtacaaggaaaaagaaggtttcattttgagagtttttggacaagaatagagggttttat

SEQ ID NO: 101227 - DNA, 358 bp, Zea Mays
aaccagtgctccgcaagtttgctcttgtatttttcgatgacatcttgatttacagttcaaccctagaaaaacatgtggagcacctgtctgcagtattgtctttgttacacaaggatgcatggcaagtcaaattttcaaagtgcatatttgccacccgttccattgcatatctaggccatgtaatcagtgcaactggggtgcaaacagatcctagtaaggtcacagctgtggtaaattggccagtcccatcaaacattaaggaactacaaagcttcctcagtctagcaggttactaccgtaaatttgtgccccattttggcattatatccaaacctttgatctctctactgaagaagca

SEQ ID NO: 101228 - DNA, 393 bp, Zea Mays
gaaaaacacggggtgtgcaaatggcacatcactagggtaggatactaagaataataccagtgctatgggatctgccaataaaagatgtaatgaaaaacaccaaacatccccggtctcgaagggggaaagcgatcagcatgagaagcaaagcatggtctgttgggcaagtgagactcaaagcctctatcatggggtcatttgccatatggcatacgaccagcaccccaccgagcacgaccaccctatgggctcacttcctgaaggcaagtagcaagaggcaaagcacctctagtccttgtaagacgtctctgagcaggagcattatgaacaccatgggagggcggtcatgttccttctgctcgactcagaaacctgccgcccatctctctacct

SEQ ID NO: 101229 - DNA, 532 bp, Zea Mays
tttagggaggatttaagctcatttacagtggatgacatagttttgttttcttctttcatctcatcactagcttttacaactatgtcatatttggcaattaaaaattgattttcatcttttaacttatcacatttagtctttgacttgctaatgatttgagtgtattccttaagcaagtcagctaattcatcataggtaggtgaagcaaattcatcatcactatcactattatcaataatatcattatcaatttgtaccttccgttcacctttagccatgaggcataggtgagaagtcgatgagggtgatggtggtggtgaagagaagtcccgagcgatagcggcaagttttttatcattttcttcttcacttgaagaaggtcttcttcgcttgaggactaaatgtcagcgagccagtcaccaacaatgtttgtctttccatttttcttcttattgaaccttttgtgtttcccatcatttctcttcaagaatttcttttcctttttctcgtcatcactgtcatcatctttctt

SEQ ID NO: 101230 - DNA, 351 bp, Zea Mays
ctaaagtattgcttgccgaggtctgcttgctgaaggatagaggtctgactgctgaggctgtggttgctgatttcatttttgagaacatccaacccttgaaggatagggcgtaccctgcttatttgtacagtggtgtcaacgattctacccgggtcacgaacagggaaattcccacggaagatctgatgagccaactggacatgatcctgaggggtagagtttcaaatgctggtgctcctgtggcctattctgcctggaacgtgccaccacttaggccattttctgagtttgtgtccaaccctcatgctcgtgatggtagcctaggtcttagagtgtgaccctcttctgagg

SEQ ID NO: 101231 - DNA, 759 bp, Zea Mays
gccaattctcctaattgtgctagaaactggcctatgtgttcacacgtgattttcccttgatcacccgaaaattttgcaaattcgggtatcctggttccctgtgggtatgagtgatgatcaaatcagctgtcataaggtttccgatatgattgccccctagggaccatgcttactccgagcttatctcagaacgccccagctatttcttcccttactatatcaatggcagccggtgcgagcccaccgaccctcttgtcaaacattggttgggctggctggatattagcatgttgtctttccccccactggtttgagttatgtggtacattattattcgctctatatggttcataggattgaccgttcctccctggccttctaggtggggccgaaaagtactcgctcccatgggcctgagattctgtgttaatgggatggtgcattgtatagtgtgatgggaggtgttgctgggacatgtgaggattcaggtaacaatcctcctcaaaaaactctacgctggaccgtccacttggatatgcggaccgtccggtgatatgcgcggactgtccaggtatgtgcacggaccgtccgtgattatacgcagaccgtctattgctgtatgcggaccatccaactgggtaattttgattctgtgcagtacgttgtggctcgggtgcatgtctctgtaattcattaaaaacgggcccagccggtgctagcccgaacggtccacgctcatgtgcggacggtccggtcatg

SEQ ID NO: 101232 - DNA, 323 bp, Zea Mays
caagcaaaggagcatccagattaagtatgcatcagtggcacaccaaagagccaatggacaggtagaaagagccaacggaatgatactggaggcactaagaaagaaggtattcgacaagagtgaaaagcttgcaggaaaatggatcagagaactgccatacgtgatctggagcctggaaaaccaacccagccgggctctgcatggaaataccccgtttttcatggtttataggtcagaggcagtgttgcctgccgatctaatcttcgcggcgccaaggttaactttcgaaagcatagccgaggcggaggcaaccaggctagaag

SEQ ID NO: 101233 - DNA, 281 bp, Zea Mays
tttactttaacatgtagtagctccatttacataccaaattaatatggagcataaacaaaatcaattttctgtcaaaccaattggttcactgttagttttgtgctgtggttcagaaaagcgcaagaaaggtccatcacaaaaccaatcattatttttggcaacagctgatgctacataaggcaactggatggaataaagagattcactaacaaggacatatacagtttgtgattgctgattacttcagggcaagtttgcatttagcacacaatgcatttatc

SEQ ID NO: 101234 - DNA, 539 bp, Zea Mays
acttaggtttcactaatataatattagtccaagtttgtgttgttaagatatttttacaggatcgcctattccccccccccctctaggtgctctcaagtttgtggaagccatttctactagtggttctctacgaattattagggtggcacgagggagccaaaaaatttacaagtcccttggcgccggttcatttcatcacgctgtcagactgccatatttcgtcctcgagggtttttccaccggcgatcgtccctgtgcccccatgccaccgttaggttatcctctgtccctttcccttctgtcaccgccgtcgccagccttgttggccgccgcatgccaccgctggtcgtaaaccctagggcgcactatggattgccaacatgctctctctgtagagagtgagaaagagagagaggatcgctcgcgccgctgccgtttagtaaaccctagctagggcgtgctatggatcgcccaccacactatggccgccaccggttactgtccgtttgtttctgtaggaggagcattgcgatctttac

SEQ ID NO: 101235 - DNA, 341 bp, Zea Mays
cgaacgacgactggttgaagtgcatcgaagctaccagtgatgagctacttggagcatactccaaggctgaagataatgccctatccacagcctttggtggctggggcaagaaaagattaaacagggtatttgatgctattggcttcgtataccctgattaccgctacctgctgcgaggacaagagaaaaagaggaagattgctacttcggtcaccccagctaagcctgtgccgaagagcaaaaaggtgaaggttctgacccaccggccgcgttacattgaaccggccgtggtgcctgaatttggcgcagggtccacttcagcagccgaagcaacacagact

SEQ ID NO: 101236 - DNA, 534 bp, Zea Mays
actgtgatgccactgctgcactgaggcatgtatgggaactccctgagtctaataaaatcagtagatcgaccccctgaatggaacccagaaatttcattgttttagttgcagacacttcgccctgagcggcttgagacatgagtaccgcatgcaattcggcaggcaccgtatccaccggttcgttagactcgaatggagtgaagtggttccaaatttcttccacctagtggagttgcacagtgtcggcacatttgtgacccttggaataggtaaggccacacttgtaacacaacctttttgccttccggtaagcatacaaattggccaggcgatcttctgttgtagtattcttgagcatgtcctggttaggcctctcagcatatgatggtgcagaaccacctggtgaagagttgcttggtggtggcggtaagggcaggggtcccttagcatatggtcgtgcttgatggacaggctcccaacgtcgattatcccatttcttagccgagttgcccacctcctcctgccatgaagcca

SEQ ID NO: 101237 - DNA, 571 bp, Zea Mays
agctcttaatgtgatctatgaggttcttcattcaaaggccttcgaatcaatttaacacttggagtttgcatatgaggtatggaagagtgttgaggacacatcagtcgtgaaagaagctaagatctacatctccaaggacaaatgcactaagtttaagatgttggaggatgggagtatgccgaagatgttccatatgctcaatgataatgttaatgagcttacactacatgacggttcacttttagcaacccatatttagaacgaatggttggttgctaaatgttaagaactgatagttggtcgctaatgatgtttttaatcacgatttgttggtcgctaaaactatttaactttaacgacttatggttggtcactatagagccaggtggacatcggacaatcggttgctaaaaaattgggctgtttaaggttggcccaaataagaagatgtttcatgcccactcttccttctctcctccttctcccgtgcccacactgcccaccccgtcatcgccatcgcgccccagctgtagcatagctcaacaacgcctcgccctagagcacccaagca

SEQ ID NO: 101238 - DNA, 441 bp, Zea Mays
caaacatggccaggggcgctgtcatcttgcatatgggttgtgggggcaacggttccctaggcatgagttttttggcataccatataatggttgggactgtaggcccatttgttgccaatgcatctagcgaggtcacctctattgcgacatcatttgatggaaaaccgggaataatagatttttcaaatacacgtgtgagtttttgagtatttattctattctcctgatgtgttgttctagttgatcccgttgtaattccataaaatgcttttcatcattggaattacttatattgctatcgtggaatctatagaacaatcttgggaaccaccatcgtggccgatctaatagatctaaaacatagttatccctaatggagtcgccaaaaagtgtgttggcacctttttggtcaaacactaacaatccatacatcatactcac

SEQ ID NO: 101239 - DNA, 793 bp, Zea Mays
attgtttttacttgagtctggaacgacaggaatggaagcatacagagaggcagaggatgtacctagaatcagcaatgatgaaagccaagtcatggccatcaccagttttatcagttgagcctcccaatatcttcctcgcaacctgcctggtagctgaggacccaccttttgatagtggcgttggcgaccttgcacgctacatcgaagtgcatagtctgtaaggcaacttgagttggtggcaataacaaatttattgagtgttcgaaagcatgggttaccttatccttgctgtagtttttggtgctctgtggtgtctgagaagaggtacctccagttgggacagagtctgctgatgtagacttggatgcagcccgcgcagacgaaattgatgaaggttgggatccactgggtgaaattggaacttgacctccatcaccaatctcggcgacaaccgtgttaacctggaaacacacattgcctaaagcaatggtgctgtctgtgaagcttacgttgaatgtgtacaccttttccatcagcctatttatttcatcaggaataaatctggctggattatccgcgatcaagatgtcaagtggtttcttaacaatgcgttgtgccatacatccaaatagtatgaaatcagtctcgcctgtctcatcgcctgctgtgatgagcaacctgtacctgcgcacaaagtagcagccacagatgtatgattaaggagtcagcaggcatagatgtaccagaccaagaaacatcacataccttggattaggcggaccaacatggccac

SEQ ID NO: 101240 - DNA, 330 bp, Zea Mays
ctcgaaacgccgacaacatgtatgtgcaacgaatcaatattgttaaaatattcagaatatatggaacataagttcaagcaaacgggtatggagatacttacatgttcatggaaccactaaacaaaggaaggactaccggacaccccgtttaagcgtaggtcatccaattccttcaatgtaagtcgttgagtagttacccgatacgtgttctcaaagatttcaaaatatggataaagttcctctatattggtgtacaagaaaagcaaggatttgttacactccgacatatctaaaagatgtgaggtagaagctctgaactctttaccctac

SEQ ID NO: 101241 - DNA, 1015 bp, Zea Mays
ttcaaagactcaggcattaccgtcaggcttaccctagtttagtttaggtttctcatcctataactccagataattgccatacaaaaaatatattccgctgtcctagaatcattgtttagccttgcaatttcgtttcagattgttttgttgagtttgtgttcgtgtcgtcatcatagttcaaccgctctatcgctgttatttgtttccgccgctatcccatccaccttacccagattacaagtcgagacaccacattactcgatttgccctcgctagccgccttgtgtgaattctcgccacgctagccctagattaggttgcaagccgcattgcattgcagcccttccttgtttcatcatctcgcgcttacctattgcttataccagggaggtttgtgcccctgtgctctatagccgccgctacggttcctaccaatttgtgccctggaaaaccataacttgatgtaccttccataaaacgggcataacttttcgctcggtgctccgtttgagctcaaatttttatagcagatttctgactccattctggggtgacccaaactcgcctaccgcctatttggttcggtcaaaaaaataaaaaaatcgggaagataattaaaaaaattgtttaagtgttttaaggaattttagagatcctttgtgattttctctaggccacaatacaactctgtttcaagtgaaattttgtgtgcttccatcaattgtgattctggaccagtgataaaaaattcagaatatttcgagctcgtttgctggtactcctttggaaacgtgcctttgatttctactagtgctgaaaaatctgcgctatttacagaactgtcattctgctagtttgttacttttatcttgttgtgcttcgataggacacgtcttagccagcaattatgacttgtactttggacacttattgaacttcgctaatctgcactcgattttgttccacattcacatacatattgtgcctgtcctacagctccacatactatatcttc

SEQ ID NO: 101242 - DNA, 662 bp, Zea Mays
caccacagcaagcaccaggagtccgtggtcaggcctacaaccgtggaaaggtgaatcacctggaggccgaagcaatccaggatgctcaggacatggcagtaggtatgtttctagtcaaatcctacccagcaaaagtactatttgatactagttccacacattcttttgtttctgcatcttgggtagaatcacataacatccccatagaactaatgatcccatctctgagagtcaattcagttgggggaaaaattcagttcgataggatttgtccgaatctaaggattgaaataagggggataggcttccccgctagcctagtagtcatgggaactcaagggttagatgtcatcctagggatgaattggctacacagaaaccaagccactgtcagttgtgacaagagaacagttaagttggtgtccccatctggaaaggaggtagtaaccaagctatacttatctaaactagaagaaggagcttgtcaccatttatcagtagatgacatggagtccaacctaattgaggcaattaggattgtgtcagaattccccgatgtattccctgaggagttaccaggcaagccacctgaaaggaaagttgaatttgtcatagagcttattccaggaaccgcccctatttccaagagagcttatcgtgtg

SEQ ID NO: 101243 - DNA, 350 bp, Zea Mays
aaagataacagtggaaatgggccgacccaggaaggagatgggctcacgtccagattattcgtggcttgggcgtgatcctgttcgcttttcccgcgcccgacatccttgaacaccggggatagctcagaacgattgcgtcgggttctcctcaagataagtgcagtctgttcactattaactaggagataagctggaagagtgtgatcaacatgtacgagggaagtaccctacgatcgtgtatataaggccaagggggatccccatcattttcatctcattagcacctcaccattcaaaagacaccacttgtaaacacctccctcacacaatgtcactccaggaagtagggt

SEQ ID NO: 101244 - DNA, 469 bp, Zea Mays
ggtcactttgattatggcacccctgactgcaggacccagatagatttggatccatagatcgacagagtcgaagtctgtaataatgcttaattcagtgtcttagtcatagtcagtctttagagtcagtttgtttatcatatgtttttatgcttgtcgtgatgaacttgtaatgaagttggatctttgtaatgattgtcatcaaggtgtgggtatcccctgcaacttggtgtagttattaataaagttagttatttagttgggcaatccctttatttccactttcctctttatctcagaagctgtgtttgagagttagtgaagatgatcaattgttcagtgccatgaagatttccatatatcctttcttatgctgaaagactgcagagtcagatctgatgtgtgtgtgctttctacatatgtctgagaacaggcgtagaggtggaaggcgtgctcaacaggagcaacaggc

SEQ ID NO: 101245 - DNA, 572 bp, Zea Mays
gtgttgaagtcggagttcggcgcacggccgtgacctgcactctagggtcggtcgtccctcctccatcggcggtgagtacctcgccctctcccatgctgcctgtaccggtgtgttgtctccttgcaccggcgtcggatacgtgggttgatgtgggcggcggcgtaagaaagaagaagcgtgagagccttcggatccgagatgaagggtggagattagatcgggctcataccctctgcatttttatctcggtcgtagatacggaatctggcggccaggattggacgcagggtttaatcgattcatggccatcgatcacggatccggcggtccctggggcataccgcttggtcagggatccgatctaatctgcgccgtgcgaagacaatccaacggtccacatgtcatggtaccccttcgaccaaccctttttgcatatgagcccctatagaatacagaaaccaacccgccatccctcgcgtctgtgcattgtgtcttaggaataattgcgtgttagcccctgcgcttctcagattttggggtgcagtccagtaaatagaaaatacaggaaaaag

SEQ ID NO: 101246 - DNA, 338 bp, Zea Mays
cagaagtgtgaggcatgccagttcctgtcgaagcaacaacacttgcccgcacagcagctgcagaccattcctatgacatggctatttgcttgctgggggctggacatgattggacctttcaagaaagctcagggaggctatactcatatactggttgccactaacaaattcacaaaatggatagagtacaaaccaatcgcctctttgacctcatccaaagcagtggagtttatccaggacataatattcaggtttgggataccgaatagcatcatcactgacctgggatccaatttcaccagctctgaattcttcaatttctatgagcaaaggagtat

SEQ ID NO: 101247 - DNA, 505 bp, Zea Mays
gcttgagcgccgtgagcacctccgcaatctcaggcatccatgcaaaagcatccttgcgcaacaaccgcgtcagggatgtgacgatagtgtcaaagtcccaaatgaactttcggtagtagccacacggccataagaagccacacacatcttggggcaagcaaggctctatttaggatgagatgatttccaccttttcattgtccatggcggcactatcgatggagataacatggctgaggtaggcgacctatggtgcctcaatggagcactttgagcacttcaggtggaggtcgtgtgtgtggaaggcatcaaggatgagacaaacgtgttgcaggtgctcaaaccacaatgaactgtagatcaaaatatcatcgaagaagacaagcacgaacctacaaaggagggtcataggattgtcgttcatgagcacatggaatgtggacgatgcgttagagaggctaaagggtatgatgaggaattcgatgtggtcgtggtgggcatagaa

SEQ ID NO: 101248 - DNA, 423 bp, Zea Mays
ccgggaggctggttggctgtctacaccaccgccgcccgagccgctggggcaactgaagatgtgatgaccgcgtacttgcctatcgtcctctggcaggatgcactgcaatggctacgacacctaccctgacactgcatcgacgactagagcgacttcagtcgatgtttcatcgccaacttccaatctcattccgacaaaccggcgtagcaatgggacctcaaatccatcaagcgccaagggaacgagactctctgatcgtacctcaaaagattttagactatgagaaatcgtatccctgaggttccggaagcagcagtgatcgaggacttctaccggggatctaatgactcggccttcgtccgagccatactacaaaaggcgctgactaccttcgagcagctattccgggaagcggacctctac

SEQ ID NO: 101249 - DNA, 646 bp, Zea Mays
agacgtgatgtgtttccttttccattacttaccctaggacttttaatctcgggacgagattcttttatggggggaaggatgtaacacccttggtgttactgtaactaaaaattgagcgtaacatcataagcattggcattgcatatgtttgatacacttagagtgcattcactaggcaaaaatttcaagcaagttgtattgttatggcattttgccaatagaaccctggaataggggacttaaccctaaatagggtccaggagggtaaaacatgacccaaattgagaaaaccctaaggtttaagtaaaacaatcataaaatgttaccaaagatggatctacattacattcatacccctgagataccagaaaccctaattgaaaccctagaaaacccaaaatccaaaccctaggggcctatgtgcaaaaacagtgcacctttggactaaagtgtaaaaactacaatgttaaagcatataaagtcatttggttcacaaatgtgtggacttgtaagcccaatattggattttggacttaattgcaaaatggacctcattcgagttctatgctaagtctgaatttcagtgttataagctcaactttggagcttattaactttcaaaccagtaagaatttgccctaggtca

SEQ ID NO: 101250 - DNA, 287 bp, Zea Mays
tgagtgaggtgatacgatccgggccgagtgacttctgctaccatgaagggtccttcccataagggtgataacttgtgtcgtccctcccccgttagaattcggcgaaggacgagatcccctactgagaagaatcgctgtcacacaaccttgtcgtgatagcgccttagagtctgctgataccgtgctgactggattaccgcgtttagccgttcttcttcaagtacatcaatgtcctccagcctggtggcctcagcttctgctatgctttcgaaaatcaaccttggcgc

SEQ ID NO: 101251 - DNA, 481 bp, Zea Mays
aaattttaacaccagaaagataataaagttatctactacttttctatagcacatatctacagaaaacacaatttagctcatcaaacatacagcacagggaaatcactgcgtgcagtccaaaacatcaattaataaatttcagctcctatacaattcatgaattgccgcgttctagatacttgaattattctaacactttgacaattgttagagttaaaataaccgagtgagaactaacaagtagacttactaatttttatacaagttattttgcgctctagaactaccatacacaattaatcaacgcattcaccacaattatcaaatccggcatatatgtatattgaagcgcttttcacccactagttcgcattttaacttagacaccacatgagcattactaatttttttacccgcgaccataaccatacgcatttagactacaacaagcaattcatcgtgaccacgaacttaacccaaa

SEQ ID NO: 101252 - DNA, 687 bp, Zea Mays
gtcgcgatcgcgtgtgctcgctctaccaacgcttagacttccttacatattctttgatggggtgaatttttcttgcccgcgactgttgttgattgaatcgtgcacgatgcttctgtggaatatatgtcggaattttaggtttccaaatgcagtcgtcgttgaaattccaagctttcgggttttgtatcgtagcagtgtcataccattatgttcggttcgacgacacagacatacagttatacagatttcgctgcggttcaagtttcaggggtcaggatcatacccacgtcaaatattcttgctcacatggtttcagaacatatggtgttaccagcgctcgaatcatttttcaaaccatgcaaaaaactgcatgccctcgggcctcggggtcggggatgcagattagcacttggactccacttggaaaatgacagatgggctaatttcgtttgttttagtatactgctgtagctaatcttcgacgtttactaatatgtgtcatattaaaagcacaactgtacagttattttggaaatggatactcttataatgctgaacttctcgaagttgcattggacctatcgtatatggttagttgttgtgtaagactaagaccgtacttttcttgtcaatgtggtcgctatcttgctttccatgtgcctccaggctccagctgtaccttattat

SEQ ID NO: 101253 - DNA, 362 bp, Zea Mays
gaactcgcgttctgtttgagggaggaggaatcggtccgaaccggccatccgcgatccccggccacgcatcaggggcctggcgaggaatagggatcccagacaagatccgcaacaacccgagcggaacccggataaatctccttcgagcatgttggttatgatactccgcgtgctatgcgcttggttgaggaacgactggcgagaatcatgggcagaggaaaccggatagcgatgcccgagtctgaccggaggaggaagatcgagctgttgcggaagggagacgactggtcatccgaccccacaaggaagcgactccacgcgacagaagagatttgggctggcgagtgggacccacatcgcag

SEQ ID NO: 101254 - DNA, 538 bp, Zea Mays
aacagccacacgagtagttctctattttgtaaaccaagtctgtttgtgtttcagagaggtgtggtgttcatatttgagtgctcagagagttgtcttccatcttatactcgagcatcgcaagatttgggcggggctggcgcgtataatgggaagtacacgagcatcgcaagatccgggcggggctggcgcgtagaatgggaagaatgagatggcggggtggtcctgcacttgcgatgggatgcgggccgatggtggtcctgtgcactggatagcgacgaggggattggattgcgattccttccatggcgacaaggcatggatttcgtttggggtgcagaggatatgggtggggcatccgcggtgcatgggaagaatgattgggcagggtggtcctacgcgtgcgggtcgtcggcgatgggatacctgcgtgctggattgctaagaggcgtggatagcggcgaggggatgtgtttccttgtgtggcagtgacatgatttttccttccatggccgattgtggctaggaccatgcagatgca

SEQ ID NO: 101255 - DNA, 516 bp, Zea Mays
gaccaaccaagtactagaagatatgttaagagcttgtgctcttaagcatggtggcagttaggataagagtttgtcctatgcagagttctcttacaataacagttaccaggtcagtttgaagatgtccctgtttgaggccttgtatggcagaaaatgcaggactcctctatattaggatcaaactggtgaaaggcagttctttggactagagattatacaagaggcagaagagcaagttcgtttgatacgggagaatttgagaactgcacagtcaaggcagaaaagttaagtggatacccggagaagactgctagagtttaaggagggtgatcacatgtatcttaaggtgtcaccgatccagggtatgaggagatttaaagtttaagggaagttgtcccctcgctttattggacccttcttgatcttaaagcgagcgggagaagttgcctaccaactggaactgcctgaccatctcgtggatgtacatgatgacttccatgtatcacaattgaagaa

SEQ ID NO: 101256 - DNA, 877 bp, Zea Mays
ctttaagtcgaaaggcccagtgcaactatgtgatcatggactctaagatcgccactctttgtgacgagttatgcaaattgaaccttgaagtcattccttcaggtaccttgagttatatctcagtggagcccaccttatgtgagcaaatagtcatggcacaaattggtgacaagggtgttcaagtcattaaggaaatgatcgaacaaaaggtggacaaatacaaatgcttccgtcaggacagcaaaggaattctatggtttggagaccgattggttgttctcgagaaccccgagcttagaaagagaatattggatgaagctcacctttctaaattctccatgcatcccggcagtaacaagatgtgtcatgatctcagatccttgtactggtggaccagaatgaagagggaaattgctaagtatatatctgaatgcgacacttgccagagagtcaaggccagtcatttgaaggtagcaggcaccttacagccccttcccataccatcttggaaatgggaggatatttgcatggatttcattgtgggaatgcccaatacctctcggcaccatgactctatttgggtcattgtggatagattgactaagacagctcatttcttgccagtacatatcaccctcagggcagagaagtatgcaaaaatctacattgaccagatagttcgcttgcatggaataccaaggactattgtatctgacagaggagcaccattcgtggcatgtttctgggagaaattgcaagaatcacttgggacccatgtaataagaagctcagcataccaccctcaaacagatggtcagacagaaagggtgaatcagattttggaagacatgttgagggcatgtgcgctacactatgg

SEQ ID NO: 101257 - DNA, 573 bp, Zea Mays
cttggtgaggttctttccctatcgtaccttggggagtgctccgcattcgttttactagattgaggggcataaggattgctagtgcaccagggaagcttcctagccatggcgccaccgcgccaggattctagcgccgccgccctgggaacgcttgggtggacgatggttccggaccgtcggatcacggattgggcggtctggatgtagcatgtgggtaccggttcgcctggaccaaaggataatcgttgatcacagatcgtagggttatgtgaggatcacgtttcattaaatctgatccatcagatcgaatccaacggctaaaatcaagagatacctcttcgccgcgcacgttttgctgaagagcccttagatttttagaaaactaacccgcggtccaactcgggattaaactgagtctggggaaaacttacaggccagcccctgcgctttcctgtaactgacgcccagtccagaaggttagaagatccattaaagtaaatagaaattgattttaatgcataaataaatgccagaatttgtttaattcatataaaattcatatgaactccaaat

SEQ ID NO: 101258 - DNA, 389 bp, Zea Mays
ccgtgacagaagtcatcgaagggacaccaccacaagctttagctccgaaggccccagctgttgagagcacaacagctaccgaagccgcaccttcggaagatacagctgccgaagctgccacagccgaagatattcatttagaaagcacgattgctgatattgataagatactactaaatatggccgcagaagaagctgtcgcagccaacgaagagactatggccccagagcccgagaaggagaaagaaatagccgaagacacttcggaagatgaaatttttaactttcaaaacttagttggtcaagagctgacaaaggctgaaaaagaagagctaaaagaatatgccatatcttgcggatatcagccgggagcacttctcttcggtggc

SEQ ID NO: 101259 - DNA, 439 bp, Zea Mays
ttcttttgtccaaagactcatgcccaaatcatatcatgtattaaaaatgggaaaaatgtttaaaccatagaacaaccctaattaggccatttaagtagaaagggagcaattggtaaaaagaccatgaaaaacatggaatcatggcttaggccaattataaaagtcgaaatacaataattaagctacaacaattgttataaatgtttggccaaaataattgattaaaatctccaaaaaggccattcaagtggaagctctctagggaaaatctgaaattcagattgctgaatttcagccttcacctagaacttgagcatgttcaccttgatccctagctcaaatcattaagtccccattcacaaaattgttctaaactaacccctctgcaacgtgtgtgaagatggcatcaagattcgtgccctagacacgtcaaatctgg

SEQ ID NO: 101260 - DNA, 393 bp, Zea Mays
atcgattgcatctagaaaatgttgtccaaggaggattggcggtcaacccagtgcctaaatctagggtagtcgggggattggggacaagaggaggctgaacaagggacaaaggctgcagtggggagggctcttttcccacaacatcctggtgttgagtgagaggaggaagccaggaatggtggaggtggtgcagcaaagtgggtggatggtggaggggatgggctcactggcttatcactcaggcggcaacgtaactttgcagatatgttgtaggtttgatcttatttgggtttcaaaaaatgctatcccttttatatattgaattctaattcaaaaggatggttaaccttaatagcttctactcaacacatcattctggtagctacaatgtta

SEQ ID NO: 101261 - DNA, 806 bp, Zea Mays
ttcgggtgctaatgcagcttaaataaacataccatgagagcaactttgtgttggcttccaggtaagccgatgggatggagataggcagttttatttagcagtttacatttataaggttgttttgtgctagtcattgtaatctgcgattgcgatttccatgaacatctcgccaccatgaccaggtgaatttgcagtggtgaacacccatgggcttttggaaacttcacatgtttaataaagtcaaaagcacggaggttggtaactatggaagcatgtgaaacctttaacacagcctaacaaactgtaacacggttctgggcagaactgttcgtgtcttgttttcttgccattccaatgtatttaggcaaagccaagtgcagtcatgcaggttactgcaaaggggaatgaaacatgatcatgccgatgaccacagtaaatttatctcttgttttactcagagggattgtgattttatacgtaaactgtgaaagttcaattcgatcagaccaatagaaatatgctcgcgagtttatacaaattgtgcgtgggagtctggcaatgagcatcatactaatattgataatgacaagctactgagataaattgttatagtgatctcaacaatatgttatcacggttttgtgcaacaatatattatacaactactaatctttaatgacaaggctagtgaacatcacattagttatttatgagttgacatattggcaaaactagtaaaagattatttgagtgtatacttttataatctttgttgaatgtgtcattcaattatatgtgcacttgta

SEQ ID NO: 101262 - DNA, 613 bp, Zea Mays
gttctggagctgcaatagtgccacagtcacgaagatgatacccccgagtaaaaacaacatgagagtcatcattgttagtacaagtatcagcaacaggattatcattagggctagccgtggtagtagagcgaggacgacgaatgtaagtctgagtgataggtggtttggaagagtaagactgaggtggtgtggaagtgggaggtggtgtgatggaaataagaacatctggggtagaaacagtagatgatggtggtactgatgaagtttcaaaaatgggaggaaggctcatgaaggaggtagactctgtggaataaaaagaagaatgagtggaagagttgtaaaagaagggtcggttttcattaaagctcacatctcgagatatacacatgcgacaagaagatggatcataacaccgataacctttatgttcagggctgtatccaagaaaaacacactcaacagattgagcagtcaatttagttctttcacggggagataacaatacataacacgtacatccaaaaactcgaaggtggtcatatcgtggaggagttccaaaaagaacttcaccaggtgttttgccagagagtttggatgacagttgtctattgat

SEQ ID NO: 101263 - DNA, 294 bp, Zea Mays
gctgtagcctgactcaatcaatgtgattttactgaagcattcaccgattatacaatcatttgtagccacaaatgcacaacgttttttaatctgctgtcaacgattgcaacttttttatttcaatctggtaattcttaaatcaatctgctgtcaccgcatgcaatacttttaattttgatccggtaattcttagattaatctgctgtcactgaatgcaactatttgattttcatctggttattcttagattaatctgctatcaccgattgcaaatattttgattttgatctggaa

SEQ ID NO: 101264 - DNA, 547 bp, Zea Mays
gcaagctgaacatggaagttgtttccccaggtaccttggattatatctcagtggagccaactttacaagagcagataatcatggcgcagattggtgacaagggtgttcaagtcgttaaggatatgctcaaccaaaaggtggataagtacaaatgttttcgtcaggacagcaagggtgtcctatggtttgaagaccgattgattgttcctaagaacccagaactcaggaagaaaatattggacgaagctcatctttccaagttttccatgcaccctggaagtaacaagatgtatcatgacctcagatccttgtattggtggaccaggatgaagagggaaattgctaagtatgtatctgagtgcgacacttgccaaagaatcaaagctagtcatttgaaggtagcatgtaccttacagcctctccccatcccttcttggaagtgggaggacatttgcatggacttcgttgtgggattgccgaataccttccggcaccatgattctatttgggtcattgtggataggataaccaagatagctcatttcct

SEQ ID NO: 101265 - DNA, 414 bp, Zea Mays
ggaaagttggaagaccaagcctgtgagacaaaacaccaatccagcttttcaagcaaagggtgacgttgcatatttgaccaagtaaaggcatgccccttgagaggaatttcttgtaagcccagctggctgattgccaagttaaaattgagcattctagtagggtctcctctcggtttgttgcggttttcaggaaatctaatcatattgaaatcaccaagaaagatccagagcttgtcatcatcaacttcaaggttagagaaccaggagaggaaggcctctcgcccttgaggagagcatggggcataaatgttggttagccaccagacttgacttgttaatttagaccggaaagaatcatgtgcccaaacaaattcttctcaattatctcagcatcaaaatgagcccctttccaaa

SEQ ID NO: 101266 - DNA, 276 bp, Zea Mays
gagaatggaactatgcaatttcattgaatatcttgaagttccactgattgtgatcacagttatggtcttgcctctgaattggtagtatcttggcttaggcgctccttactttaaaatgttgtttcttctggtgtacctaaagaacctttttaattatgatgtgcttagacattgcgctttatatgcatgatcgtgttgtttttcaattagtatatgtggtgcaatgattgtcaagtatgaagcatgtctaggttgcttgtaaaatgttatacttct

SEQ ID NO: 101267 - DNA, 440 bp, Zea Mays
ccaaactaggcgatatttatttcgtttttgctgatatatcatcaatgataaatatagacgtgattggtagctagcttgatttggctccgcagccaggaccaacgcacctaccccgtcccgcgagctaaactcaagaagacgaacgtgggaggcaaggttcgctactcggcctggctgaggcgcgtgcacttggaaacggacgcaactatatgaacgacgtcattggggagattgcacgtaatgttccaacgttacccaaacctagaatagctaactcataactcatgagccgccgtattacaaattctaggtttaaacgcacactcaaaacttaagaaatttgaatccgctagagactttagctcctcccatgcatcagaccaccggcaaacaaataggagtatgtatctgatctcatagcttgctcaaccatgagcgcg

SEQ ID NO: 101268 - DNA, 502 bp, Zea Mays
attctaagcattgttgcacggaaagtgcaaaaattaataagagaagaaattggcactagcaagttttgcatcatggttgatgaagctcgagatgaatctaaaaaggagcaaatggcaatagtcatccgttttgtcaaaaaagaaggacttatcaaggaacattttcttgacctcgttcatgtgaaggatactactgcattgactcttaagaactcaatttgtgttgtcttaactgctaatagcttgagtatagaagacatcagaggacaaggttatgatggtgcaagtaatatgagaggggaatggaatggattgaaggctctaattctaaacgagtgtccatatgcatattacattcattgcatggctcatcaactgctgttggctctagtggcaacatcaagggaagtgcaagaggtacacaacttctttcagcatgcaactttcatcataaatgttgttagttcatctactaagtgcaatgatgagttactaattgcac

SEQ ID NO: 101269 - DNA, 461 bp, Zea Mays
gctactagcactccattctatttctcgacattctttgttattaaggtacaatcctccccctaatgccgggaaatgctcttcatcgaagatgtatcagcgtaccgaaccgtgaatagatcccaagttctaggctctaaatatttgattatggacagagattcataaccaacatagatccccaacttccggtgaggtcccatagatgtacgctggggtggtgatattggcacgtatacagcacaaccgaatttttgcagatgggaaaccactggttgttgaccacgcgttaactggtggggagaagcggagtggtaagcagatggtctatattggattaaggccgcagcgtgcaaaactgcgtgtccccgacagctggttgggagtttgctatcttgtagaagtggcctggctatgaaatttattcttttaattagggactcagcaagtccattctgtgtatg

SEQ ID NO: 101270 - DNA, 484 bp, Zea Mays
tgataatcagaccgtgtcggacactttgaaggtaatagccgagtggagtcagataatgtcagcgtttttagaaacaacagctgagtcaatttgagccgtgtcggccattttggaaataacggccgagtgatgacatggcgcgccagcttttttagaaatagcagctgagtgatgacatggcacgccagcgttttagaaataactgctgggtgatgactgggcactttttggaaacgacatctgacccgggaaaaccccatatgtactgcactgtcgcacgcctccacgctccgtgccctaggttttgcttagctttttgcatccaggctttctctgctttcctgcaacattgcttctgctccgctcaccagcgtggttgagatggcgcccaagcggaaagcttcgagttcatccgtcgcaatcattccccctattgatcccaacagtcagttgcccttcgcatgtaaccatatgtatgttgtct

SEQ ID NO: 101271 - DNA, 290 bp, Zea Mays
tcaagaataaaactagctcaatctgtgacatttttgtagtctcacaagttgtttgtgtcatccgatgtgctttccaggagtctcacgatgaatgtaatttgcttaatttggagcacttcttttagtctcacagatatgctcgaactgccttgaaaatctgtttgctactttagccactttagatgtgtttgtattgaacagaaaggcaagcattgtttagatcgaactgcctgcttttgttttgccaatggtagtgttagtgtaggaggctaggagctgcgtagtacaca

SEQ ID NO: 101272 - DNA, 995 bp, Zea Mays
gctcgcttctccactgatgcacgggggtggatgacgggtgggctccaccgcctagtcccaccatgtgacgcgttcgggttccttacgcactgacgtgtggggccacctttggcgggtccgtcttcctggctggtgtactccacatggagctccaacagagttgctatgttgtcgccgggtttctcgggacgatccggccgccgcgcgaactactcctgtttggattccgcatctcgcagctatatatgtgaccacccgtgcccaggtcgttccatcggcaaaccctgcgaatcaccagctacaaccggagttgggagtgacaaagtgtgacgcccttcgtcgatgaccggctcctgcgctgtccaatactccgataaggccctccttctcttagataccttctttggttcaattcgcgccgaattgtgctcggattagggtgtcggggcgtcgacgattgcttgtcgttgtttcttacgccatagatctgcgcctcactgtggctcggcatcatcgcgagccgattcgtaatgtgatcacttccctggaacccaccactctccctactatgtatagcaactagctaatttttgaataaggcaccggggcatcgaatagccatgctccactgatgctccgtcgtgggaagttatggcgccgccgcctgctatcggcagggttggaggagggggtggttggtggcaccgtggtcgttggatggcgtctggacgacccggattagaagtcgcgtacccttccgcgtaaatcctggccgctgactctagatcgagcgaaggagattagatcgcgcttatttgaaacctacgccgtggatcttgtatccaatgacccatattttgtaccatttggttaaagtgatgatctaatcggcgtcgttcatggccgatcgggcggctgtgatcagcccatacccccttcggttacgcgtcttttgcaaatgggcccctcgggttagtgcaaataaacccgctgtc

SEQ ID NO: 101273 - DNA, 296 bp, Zea Mays
gcttcagtaatttcccactagacaaattactttacaatggctgagatcccacttagatgtgaatagagaaatgaacatcctacaatgatgttattccgtgtctccctgttttggctcacactatttttttaagaatcggttactccctcgaacagttttattatcaccaaagtatttctcagtactttccattaccccctcttataatttcaacatattgcacgattttgacatcaatatgattatacacctaccccatctaaattcaaattattacgaaagcaaatctacatttt

SEQ ID NO: 101274 - DNA, 679 bp, Zea Mays
cccaaccgccaattctcccccgcgggggtcacgtctcgcttcgtgtacgggggcagcctcccatcatcgtcgtggagttaaaaccaacagctttgtcacccctagttcgaagaggtaagggaggcatggatacatagatctgctcgatccgagcgcagctggagcatgtagtcaccggtcctcaccacagtgcgaaccttcttcacctctgatggcagagaaaataactccttacagaagtggtggtgctagagatccctgtgatggtcgatcttgaggtacccctcgcagaccgccgcaaagatcgctgccagggcgatggagttcgggttgaagttgtgaagctccaccccgtagtaatgagggagctcccacataaagcagcttgctgacaccccaaaccctcgcttgtggaacggtacgaagctgatgatataacccgcgggcggggtcagctcctcctcgtccccaggcgcaagccatttagggtgcgctccgaagatgcggcgaagcaacccccatcaatgagactgcaaatcctcctcggtcatagaggagtagggccacgggtcacggggagcaaggacattcaacttctcagccatggcaaagcaagaaggcggtggtggaaaggtacgcagatttcttgtctctctcgtcttaacacaatccttggcca

SEQ ID NO: 101275 - DNA, 716 bp, Zea Mays
cgggtcctatttttggaaaacctagggtttaatctgagaatagcaggaccaaagtgtaatgatctttacacagaggaggacggcgggttgattcacaatttttagagggtttcttttgcataagtacacgactgaaagggtatcggtgaatccaggccgctggattagaaaccgagcgcccgaataacatcgcccattaattgaaccggtacacgctactggccgtccgatcggtgatcgacggtcgtgattttaaatacatgagatctaatctcacccgcacatttcgtatcgaacgactgagaaccaaatccaaccgtgcccgcacacacaccgatctgcggtcgagatcgggccaagtcaaaccggtacaagcctctaatcctagccgcccatatcaagatcaatggcacaaaggccgtgttcccaacgcattgcgcatcaactgcgcgcccccagaaatcacgtagacccctacggcggcgagaagcaccacccaccgaccctcacccctgcttgccccaaccaccgcgctaatcgatgcaaacgtaagaggagaaaatgcagaaccaaatggagaccaacctatcgaaaacagtggtgacagcgatgctgcccacgacacggggcagactcatggggacccgattgcatcggcgagcaatttcccgatcattggttgatctccactctaggtttcctcgcgaacacgctcc

SEQ ID NO: 101276 - DNA, 418 bp, Zea Mays
tcaaagttgggatccagtcgggcccaggctccacctgggattttcgtccaagaaatatcacagccgagcatcctcacggatcaggtggaagagtgcaacactttgagtcagccagaggcagatccgaatgactggagagagcctatcatcaggtacataaagaatgaagaatagccggatgacaaggttgcagcagaacgcatcgcaaggcagtcgacccactacaccattatagggggcttactgtacagaagaggtgtaggagtcctcatgaaatgcattcactcagctactgggagacaattgttggatgaaatccatgctgggcagtgtggggtacatgctgcatcaaggactctagtcgggaaggctttcagatccggtttctactggccaactgcaaagagcgatgccgcca

SEQ ID NO: 101277 - DNA, 631 bp, Zea Mays
attagaatggcaaggcaacatgctttagtgaaacgcagtgtctactaacaaatttgttcagtcccagtggttgaccatgttatataaattaaggatcagtggatcaatcagccacacgaagaaacatagtatagaccatgttcttctcagtgctcaaccatgctattcccagttcactaagatgaagttcactaagatgcagttcccagtctagaacacatacaacaattcacacaatatagctctatgattccgcgcgcagatgaaacaaataattggcatcttattcatacataggtggatatcaagttcatacatagctgtcattttgttcatacatcaagtgatcaatacagttgaccccaaattcataaataactgaatacatagctgaatacataacagacccaagttcatacataactgaatacatagctgacacaaagttcatacatcaagtatatttcttcttcctttgtgtaattttcttgacgagctgcctgtataacacaaaatgatcagtatatatcgatcacatatgcccaaataaatccaaagatactgacattttgctcaccttctagtcatccgattagggctatcccggagaattattgctacactttcttgc

SEQ ID NO: 101278 - DNA, 482 bp, Zea Mays
agaagtctcaccgccaaattcaggcactgtggccggttcaatgtagcgcggtcggtgagtaaggaccttcagttttttcctcttcggcgcaggctcgcttggagcagctgaagcagcagccttctcagaagttgcgccctttcttttctgcccccgcagcgggtaccaatagtcagggtacacaaatacaatagcgtcaaaaaccctatttagtcttttcttttttcggctcccgaaagccgcagatagtgtattatctttagacttggagtatgctccaagtagttcatcactagtattttcaacacatttcagccagtcatcgtctggttcgataaactggtctccaaatctgaaggtatatttcaatcgaaccagaccaccttcgttagtattagtgatggtttcctttggcatttcccaactgtctatcagtggccatatcctataggctacatgttcttgaattaagtctcttgtcc

SEQ ID NO: 101279 - DNA, 547 bp, Zea Mays
ctcagacccgacgccgtggccgagcatctgtgctccgttcccttggtaagaaactcgacgctggtgatcgctttgtattccccatagcgtagctcggatcaattttatgtttaacacccggaggtggtggattggctacctcgccggcgttccatcgggtgaggaggcttgacgccgccgccgggcacggtctgtgcgttggggacaatgggatcctggccatcggatgttgactatgcggctagaattagaagctaccctagatcgttgatctgtggattgatggtgcagatcaaagcaaccatcacacactcgcgatattaaatccaaaccgtaggcctgtgatccatcggttgcgattggatctgggcacatagacgtccacaccgtgggatcctaatctaagggtccgcgctacattccatttgatggggctcgggatttaatctggatcgtccatcttatatcggacggtcccaggcgttccataccccttcggccgaagccttttgcataagaaaccctgaccaatacagaaatcaacccg

SEQ ID NO: 101280 - DNA, 468 bp, Zea Mays
aattactccacttattaattagtccagcaagacgaagatttatttaatacaaatgtgctccagctaggattggtccaattaatgcaaagcaaataaaggcaggacatggaagctggtgaccaaaatattttagagctttcaaaatcagcagccaatctcgatcaggtgatttcttccttgcttggccccggaaactgattgcgacggatggttcttcccaacataaataacaaaaaacacattgcaccgaaagactagaaaaataaatgggcgggaggaaacggacattcgccccatggcctggcccaccacgaaacgaacagcaagaaaacaaagcacaagtgaccgacattcccctgggaacccgtgcagccaatttgcacgcagcggcggctagctaaacaaacaatctgatccgcacaacacgcatctatccctgctgcagtaaacaaatgtcacgcgttagca

SEQ ID NO: 101281 - DNA, 444 bp, Zea Mays
ttgaactatcccctggggtacatggtgctcacggaaagctgtttcgaattctgcccaggtagcatctctgacggcctcgctgaaggtgtcccaccatgctagggccattccagaaagttgatgagcagctagttgaacacgctgattttcggggcatccgatggcttccagtttcctcttgatcatgcgtagccagtcatcggcatcgaggggattgctggaccccgcgaacgtgggaggcttgagtctcaaaaattctcccatcctgtcctgtggtcttccaccacctgggcgctggttttctagacttttagtgaggacttcaatgagtcgggtttgattggctagaacttgggctatgtctagtggtagttccggaggtgcggggaggtgggtctcactcccttctccgccagcctctccttcggctctcagaggaaaacc

SEQ ID NO: 101282 - DNA, 442 bp, Zea Mays
ccagctaataggatatgttgccttgttgcaaatctgaattaataataaatcatacctcaccgtggtgagttaccagcaataattcaggacacccatctatatcacacgctcaagtactcccccaacaatcaccagtaaatcgtcagctaattaactactgaatgatccctagaacaatcaccaataaaacaaagttcaggatcatttccaataacatttgaaactgcatgggtcatccacatgtatctagaaacagggataggcttaaacaattaaactgcatgagttcatatctgtcataggccaagaaatactgacaattaaactgtataatcgtactgtcaagacaaagcaattaaacaaacattataattttgttgactattataaatactgatgcatcaaattgtaggtcacctatgtaatttagggctatttttct

SEQ ID NO: 101283 - DNA, 467 bp, Zea Mays
aaccccctctaggctactttcagcgtggccggtgggtaaggaccttcaattttttgcccttcggtgcaggctcgtctagagtggccgaagcagcaggtttcctattctttccctatcctcacaatggataatggtagtccgggtaaacaaagccaatagcgtcaaaaactatgttcaatctcttttttcctcggcctccgaaggctgtggacaatgcattatcttccgccttggaatatgatccaagcagctcatcactggtaacttcaatgcattttagccagtcatcgttcggttcatcgaatctatccccatatctgaatgtgtacttcagccggaccaaatcaccttcactagatttggtgacggtttccttcggcatttcccagctctctataagtggccataccctgtatgctatgtgctcttgaaccaaatctcttgtaccaataaagaagcagacagta

SEQ ID NO: 101284 - DNA, 362 bp, Zea Mays
caacatcaagctcatcatgtagttcatgaactttatagaagagagtcgagatctaacaattcaagaatggaatttctaagatattattacacaaaagctacacttgctcctagaccaacaaaaaccatactggaagcaaagtggaaatactaaatgggtgacatgtggcgatgcatgcacaaagttcttccatgccaatgtcaaacagaactctattgcaaccctgcaagatgaacttggctatgagctcaaaacccatgaagacaaagcctctcttttattccaagtttataaaagcagattgggcatatcagaacacaactcaatgcatttcaacctcgaggatctcatacaaagcacaa

SEQ ID NO: 101285 - DNA, 748 bp, Zea Mays
tgaagaagaacaaatagagaaagagaaaggtgtggtaattcattttctcatattaagattatggccttagggttcgataatttcttgatccgacattggtgttagacaccgatggatgttaacataacttccattagccatgttagaagccccgacctatggggcgttggtgtgtcgtcgcagtgctgcctagtactggccattggcggtccttccccactagacaattgctgagtccccgcgtcaccgaaccagtgaagagcgaaggagtaggcaaccagcaggcatcagttctgcagagtgttgaagaagaacaaatagagaaagagaaaggtgtggtaattccttttctcatattaagattgtggccccaggtttcgataatttcttgatccgccactggtgtcagacattgatggaagttaacataacttccatcagccgtgttagatgccccggcctatgggcgttggtgtgacgttgcggcgctgcccagtgccgccaattggcggtccatccccactggtcaattatcgagtccctagcgtcactgaaccagtgaagagcaaacgaccaggcaaccagaaggcatcaattccgcagaatgttgaagaagaacaaaacgagaaagagaaatgtatggtaattccttttcttataataagattgtggccccaggcttcgataatttctagatccgccactggtgtcagacacccatggaagttaacataacttccatcagccg

SEQ ID NO: 101286 - DNA, 489 bp, Zea Mays
cgggaacggaaatgggagcgggataaacggaattgcgaaaacgaacggaaacggaaatgctaacgaaaactcataatttaatacaaatagatatgatattgatgtttgactagtgattgattggcaggacaataacataaaacaaatagatatagagacgcaacattgtattgttgtttggttgttaatagtgtacatttagttacattcgatgttgtttaagactttagaccacgtgtcattgaaaagagacgatggttataatgatcacttgtgctataatttgtcatctaaagacacgagactttagtttatatactaatgcatattaggctcgtcctatatttaccaaatatggaataaatacgagttcgatccggataaaaacgggaccccgcaaaaacggacggaataaaccatctcctgtttccgtcatgtttccatatttttccgtaaatatggaatcgatcggatcaaatgtagaaaatg

SEQ ID NO: 101287 - DNA, 710 bp, Zea Mays
ggagcacaaagacatgaaatctgctttcgaaggccgagggaacttcgactaaatagggttatggatgacattgggtttgaatacccatattatgaagatccctcagccaatactagggtcggggaaaaaagaaagagggctacgaagaaagaggccgaagagccatcttcgagccaagtaaaaaagaaagccaaaattgttcagaaggatgtagccatagtaaaggctttggctccaataaaaactttggctactcaagaataggtgaaatggagcaaaccacaacttcgtcattgaactgcacctggattcttgaggtaatgactcaaccactgcctttccccccttaagtcccttaggacccttattgacttggtttatgccgacctcaaagggctctaatgaagaggtggatagcccacgcattatgggacctagtagtgctgccttcggtggctcatcttattcttggaaaaatggtgctgaaggtggcggctcgtcaaggcaggagaaggtggaacaaagggagcaagaaactatgcctaaagcaaaggtagccaaagctacgcaaaccacatgggaggatgaggagctaggctttgtcacaagacatattagtggtgaagagttgaatgaagaagtttcaaagctgggggaaaaaggccacaccttggggtacgaccctggtgctttactatttcctagggaag

SEQ ID NO: 101288 - DNA, 493 bp, Zea Mays
ctattacaaattctaaagagcacaggggctggtttataaatatccagggctcaatcgcaattactttacataggccgaggacggcggtttggtttataaagagtggagggtctcttgtgaaaggttgccatggccgaaggggtaagatggattctgagccacctgatctacatccgagggttcagattagttcaagaagaatgggttttttgtttttaatccaatgcgactactggccatccaatggccaggatggcccgccatcctcccgttgcccagagcaatggcgcccgagcaaacgcggcggaagtacgacggcttgcccgaatccccagccctgaagctcgaatcccacattcgctaggaaatatacaaggtaggtaccatgggcaaaccgagaggcacacaattacgacggattacgacgtcaagagccctacccatgtagagcagcggctcgacagcggtgcgaaggcaacggtgaataattccc

SEQ ID NO: 101289 - DNA, 749 bp, Zea Mays
atcctcgaattttatcagctctcatatgttggatcatgtatatagctttgttcattatgtttgtgtgaggtatgtttgaattacgaagggactaggagtctaggaagtgtatttttcttgagctagcttgtaaatacgtggattgtgtctttgttcattacataacgtgttctgagcaacacagaaaactagatgttgatcttcctccacatggtttttggtggagcactaataatgtagtatttgttattcaagctgtctgtttctgggctatttacttttattcgttagtttcttggttgatagttttgtagtaggtgcaatggttgctttttctaatggacgcaaatgattaaacaagtaccccaattgcgttgttctttgggtttggtgtgcatgctcaaatgtcatagtgcactgtatcatcgttatagtatgacttgtcctattgatgctgtttggcccaagcagtggagctttcaatgtctgatctggaagaatgtgaaaaatggaatacctgtcactttcaagtgctcatacagttgtgccttatcactgttttgcggttccattaggtttaaacctcctccccttcttcaaaatgagtgaattgatgagtgggcgtgtgcatatgttgtttgatgtgataaggtgatcaaattgtttatctgcccaactcctaatgtgctgcagctgcctgtattactttcttatggagtgttcttaatgcctcaactagtggtgcatgg

SEQ ID NO: 101290 - DNA, 407 bp, Zea Mays
ctgtagataattactcaaataaaatttctgctatgtgtaaatttgtgcaaaatagagcagcaaaagtaaattactaaattatatgacaggtgaattaataatcatatatagatccgaaaaataatcactacaaatcagtcaaaagcacatcaaggtgcaagatttgaaaaattggaagcgaaatcctcggatcaaattcccctaatagcagtgcaaatgggagaaaaaattgcatcagatgggcacatcaacaaacaaggggaaagaaatacaaggtgcaaaattaattgaggatctaaatagagaaaaatcgatgggaaagaaatctaaatctaaatcggaaaagagaagaggtagcatagtgtggtggtagagagcgcagctgcttgaggtgtggaagtgttgtt

SEQ ID NO: 101291 - DNA, 492 bp, Zea Mays
agtttacacattcttttggagttgctctaagacgagaaaaatgatgagtaaactagtagatctaatcttagcggcccctttaaacccgtctagttagtcgggctttgttgggatagcccgcgtagcagcggcttgtcagactattaaccgtgtcagaccgaggtgttaatttgatattttcattatgatataatgtgaataaattacgaaaatagccacaaaataagtgagtgaataggactcaaaactgttgttggtttgagaaagaaatacagccgcactcttctaaccggtgtaactcaagtttaattatgttatacgaaggatataccccctcgcgccaatgtattgtccaagagactagctagatgtattgctactgagtactcaactgacataacagaaaaaggttggaggaggaattagcggaaaaataaagagcagagtgtgaaacaatggcgaggcaacgaactccagcagccaaaaccagct

SEQ ID NO: 101292 - DNA, 827 bp, Zea Mays
aattcgcgaagttccctccaccgttcccaaaattgacagtgcatggtgaaactatagtcctttacggacgtgtagccttaatctcgcctcccaattccacccgagaccgttgcggcttcgtttttacccttttctgttacccgcgagccaggatcctccgcgccccgtggtcagctcgtcctaggtctgctcctgcttgttttaatcatgttccagtatctatatgcgctagtgatgctcatcggccctgccctttttgcttagtcacaatcaatcacccggaacacatgaactcgcttcggtattttccgccaccgtggtcagtctaaaccagggtcgtaactacgtaactgaaacccgttctagggtagtctcatgcccgtaacacccacctagtaattaaattgggcagccactaccgatcttggccggtccgcgcagcaggatcatcgttgatgagcgcgccgtcgatttggacctcttcggagaagaaatagaattagaggggtatgattgcataatgtcagtgactcgggaaatagtcccgggagcgttttctgaattatttgaagtagcgagggcctttccgcaagactaccagagcagtgcggacgcgcgcgtttccacgtggacatgggccgcttgaaccagattcggcccagtactattcacaagtttctctttttctttttattccagagctaaaacaattatagaaaattgtagaaaaatcctaaaattgtcaaaccaattttcctagacttcctattttccctagtatttaataaaaatagtttcattatttttagattaaataaggaattttg

SEQ ID NO: 101293 - DNA, 701 bp, Zea Mays
aaaatttccccacaaggtactggcagggcctctcagttgttgggcggtgaataatggcttatgtatttctgtgcaacggactaacccgaacttctactccattacccttatccactcatcagcttcgagagggtcttcggctttaacaaagagcggaggatgcgtctcgaagaaatccagatatgaggtttcacgtggtccttggggaggaattctcctgccatgttgctagaattgattacacgccatctcacgcaaaaagcgggtattatctacagtcgaattgaccaaggcagcgatagcctcggccagtgttggtggtacaggtggcggattaggagtatcttctcgaccacgggaagtcctcgcaccgtcgtgcgcacgagttcgcgatggcatctgaggcaaagaaacatttgggaaaaatatgacatgccaacacataccatcacgttacattaccaaaatgtaattatatagactcacacgtacaacatgacttcattacttattttacataagcattatatctaaactatactattctagtcttcatcaccctttgctactccatttcctgccgcaggagaccgttcgtcagctaagttcatggaaggaggaggctgaaaaaggtccaactcctcgtcaagtccttcatttgctgttcctgacagtctgagtcccatagcagtgtcgcaagc

SEQ ID NO: 101294 - DNA, 332 bp, Zea Mays
gatcaatagctctccacatgaaaaatggagaatggagcttcttaatctgctctatcaggcgcactaaagggaattcacatggtacagtaacctgacgaagatcgccaggttcagtgcaccgccgccggtgatcccgcgccgtgatcctggtcgccattgcgattcgtgcccgatggcgtgcagataactacgtagggtaaaagatctcgcgcaggggatgaagtcggggcactgttactgcccagtcgttgtacccacttgcgccgcgacgtggccagacgaccatcaccgtggagatcgccgttcaccgcgattactccatgccatagtcg

SEQ ID NO: 101295 - DNA, 788 bp, Zea Mays
ttaactgccaagtgagcgtgttgctgggtcaacgactgaagaatggatgccaaggctgggtcaatcgacggaggagcagcagagggagtatccctagaaccacatgccttgtgatcatgtgagcgaggattcacaggaggtggtggtggtggaatcccgagatcatcattagaatctgaagaagtatcagcaccaaggggttccataccctgatcctcaatctatcggatcgcctcgtcctcaacctgacgcttggaggccaaagaatcccgaggtcttgtgcccagagcacgagcactggtgagagcctcatcctcaggtgttgagcagtagaagcaaatatgagcctggtagagtcaagagtggcctggaactaagaaggtcgaatcagatacgcaaatatgtgactgaggtagtgggcatatgggagctaacgacgagcacaaagtctatccaacacaatgttctaaatctcacatatcaggaaatccataatgtcaaatacagagtgagaaaccagggcacctaggagccagagctggatatgagtattggcctctctgtagcccatctgtggtagcaaggtcagtctcattagctcatataggaacttggccgctgtggtaaagtctataggagtgcgcctcgagtcgtctatgaaaggtggccttaatagagctgagatgtgagatgtgcctggagcaactccatcgtgagggcgacgaggtggtcgtgaagaaccataacacagactgtgaagccttgtcgttgacttaggaaatccaaac

SEQ ID NO: 101296 - DNA, 283 bp, Zea Mays
ctttggagtatatggattacaaatgagatgcgatggtgctcagagatcatggatgagtgctagtgtgtgatgggatgagatgtgatgttttcgtaggggtacccccttggacttatatagatgactagaggggtatccctttacaagttgtgatcactatctactctacttatctcctttatcacgacatgtcgtcctgtttatccggagttcaaacgcttcctcagccgagttaatgctgattgtatagctcttcaggtgcgtgcaacttctttatccaaga

SEQ ID NO: 101297 - DNA, 311 bp, Zea Mays
cgggatttctgggttggatgagatgaggaggcgctgcagctggctctcgtctttgttccgccctcgccgggctgaccgctcgctcccgcaaccagatccacagggtcccgattccgagcccaaggtataccagtggccgctgcattcgtctcttgctgtggatgtttgtttgattgtttcggtaggccttgcagtatataggattttggtgatttcattagcatagccaatcagctgttgatttggtttcccactgaacaaagattcaaggtgcgtgtgttgcaatcggttgtacatatttcacctttgct

SEQ ID NO: 101298 - DNA, 398 bp, Zea Mays
gggcaggccttcatggtgttgatggaggcaatgtctggcctctgtctcaacaattctgaatgccaccatctcgtaccattgaggctgaggaatagcatgttcctctccaagcctgatcatatcagtactatcaatataatccagcctcttcatcacctcaatgtgtcctttctttattgatgatttttgaagcatacgtggcttggctttgatggccaaatattgttgtcatcttcaaactcaaattcttaactatcctctctagactcctcttatgcaaggtcaacctaaatatcttcaatgttaccttcttcaactagagcatgagcttaaattatgctgaccaggacgccacccttaatggctgggacttcttccgtcttcccagcgacttctga

SEQ ID NO: 101299 - DNA, 655 bp, Zea Mays
aaagaaagaccaaaaaataataatgaactctacattatccattttgttgatcatgttcatagacatttccactctagcgtaaacatatcgaacaaccactcttccatcatcaacaaattattcaaaattcaaaaacctagtttaacacacctaaagtgagatccatattcacacggtaaaaggaatgctgattgtgcagagcaccaaaacaaggtgatcgccaggccctaaaatatctctcttgcactcgatcaaaaacaaacaaatgctttcacatccacgaaaagtgaagtcctcttatgaacaacacctatgattacccctaacgactacagcttcaagattacatcaaccaaaggaaaggtcaaagtaaatcttaaaactaccttagcatcagagaaaacaaaacaaaattactcgtactacaaaactgcaaccataccatgatctgatttactgaaatcctatctgtaatctaatttgagaaacaatgtagctatctgtgttcatgtccgtagttatccaaccatttgcaccttagtcatggtagtattttcttagtttactgatgaagtgaaaacaactattgaggggaaatagttaagggccaatagacataccaacattccccaacaacaggagaaggaaaggcgag

SEQ ID NO: 101300 - DNA, 911 bp, Zea Mays
cccgatttaagtaggcagctgaagcgcacctatacagtgaatctaaagttttaaaccttcgtaaacaaagtcttaagcccggaccctggatataagtcaatagcctgtgcctatgagcccatcaaccaaactaggcagaataacttaggttcaaccagcaggctacaacccagtgtctgtgtgtgtaactatttataattactgtcaccaaagctcagaaaatcatggttttaatctgtcaacaggtttgctaagattagatgggtaattcgatgaaaccaaactcaaccttatttgggtgcaagatatacatattacatagaaaaagtacatggagaagtagaagggaccataccaagaaggcataaaaccacacatcgctttggaaatttgtttacagtcgaggcaatataggtgttgacctctataacttgctgttgtacctgtttcaattaaaatggcattacttccatagcaaaggaaaattccactcaacaaaacaaatagttaccaaaacagtaagaacctgaacattcttttcgctccatccaggcacagcacacaacaaacgaatcagaagttcagcagacttatcaagttccgtaagattttccacctcttgtttgagtacgccaatagctgccacaaagagtaatgttatattctcattgtagatatttcttctttcttaaaacttcacagcagaaaatatgagcgatatttatcgtacaaataaaactgccacaatcacaataagttttgttccttcttttggtctcaaccaagtgtgagaattgtgagttattctaataagctaatgaaaataattgccaggcacagaacggtacaaagaaaacaaatgcatgcacactaccacccttgataggataatggctgcacacgcatgctat

SEQ ID NO: 101301 - DNA, 574 bp, Zea Mays
ggagaatactaaattctgggatgatgggtggattaatggttctacagttgctgagctagcccctaatctcattcagtttatccctaaaagggctagggggcagcgcactgtttcgcaagctctaaataatagaagatggatttcttatatccagggagctctcacagtgcaggtgttagtggagtatctacggatttggggtttggtggacgagattattttgcagccctcactgcctgatcagcacatttggaagctttccaattctgggcagtactcagccaagtctgcttataattccttctctattggatctattaagttcccaccttggaaatggatttggaagtcttgggcccccttatgtgcaagttcttatggttggcaatcaagaacaggtgctgggctacggagagattacttaaacatgggctaccacaccagtgtttgccccctgtgtgatcaagagcaagagaccattcagcatattatgttgaactgtattttctccagggaaacttggacatgaatcctgatatgtgttggtctggtggatttggcacctaaccatgac

SEQ ID NO: 101302 - DNA, 647 bp, Zea Mays
atggctcctccgtcgctactgtccggcaaaccatcacattctgtgacgcgggacgtcgagcaactcctgacttggggcactccggtcccatgtgacgaaatcccccattcccattcagccattcctatcgtgcaagccatcacacactctggacgttgggcccacattgcagactacgggcgcccacgtgatagccaccctaagttttgcacacaccggacccacgtctgctcgcacaaaaagttgcctcaatttgacaccgggaggagcatttgaccacgattgctttctctgaagaaggaaggcttataagccggtagaagctatgttggctggccggtatggtcataaaaatgtgcaagccgtgacgatgacataggtcgcgtgggctgtgtttctttggtgcggcccaagtagctgccaggaggccgcacgcttcttaccctgacccagcttaggctttagggtcagtctcccttgctttctctgcccagcgagccctcgccctctagctcttcctgctagcgccgtctccatcccgtgctctcctcttcatcgtcaatctcagccatctcaggagcacccgctcactcccagacgcccgcgcaaaggaatcccccacgatctccctccaaacttcccactcc

SEQ ID NO: 101303 - DNA, 687 bp, Zea Mays
gtagcggagtgcggggttggacgttcgccggcgagtacaccgccgggcgagctctgtttctcgcgcggggtgttccgtcgatggcgtggggcgtatcctccgtcgatcagtgaacgaacggacgcgattagttcatcttactggtgcgagggggacgaagtttggtcgttggatcgtagatgaaggagtggaatcggatctcgcgcgtattaaatcgggggccttggatctagatctaatgatccctggcacatacagattcctcaatggcaggatctaatcctggccgcaggacttagatcgtgtggctcaagttatcccataccccttcggccgacgactttgcaaaagaatccctgaaccttgcataattaaacccgcagtccaccgcgggtaggttctgagtctgtggaacctttgcgttttaaccccgaactctctgcaaattatgcacgccatccaggactcgaaagaaagaaataaatgaatatagaaaatgaattcctagtgtaaaaataatcctaaaacttgtttaattcatacaaaactcattttaactcctttttagtccattcaagttctcataattttgtattaatattgcctactacttggtaacactgttttgacatgaaacctatactagaattgattactcaataaattttgtagcaagcacataaaatc

SEQ ID NO: 101304 - DNA, 790 bp, Zea Mays
atgaaattctcttcaaaagaatatgcacccaccttggcaaagctagttttcaatttccttacgcaatccaaggatttttcaaagcaactctccttggattcgcgaaactcctcaacattttctctagcctagtgttcgaccattcacttatttcctatttcgcttttgccagttcaaaattttcattagcttcggcaagttttttccgaaggtcgtcaacttcggctttatgagcttcagattgagcgttaaattttgcttcgccttgcttcactttgtccaccaatgaaagcaggattttatctttttccacggcttcatttctcaacttgataacttctgaccgaaggttgccgagggctatccgacagctttcatcttcagcattcttctgtgccctcaaagcgttgctaagaattaagccctgcaaaaatatagaatcagcacgagaatacaagacaagataatctatttttaagttcatcacttccgtaccttcagactgttgtacgcaaggctgtctgcgagatcatcttttgacatggcggagaggccagcttcaagcttcggaaatcccatatttttggccatctcccgacagacggatatttccttgttgtctaggagacagtataggaaatcatcttcatccgtgccattgtacaccaatgcccccttcaggtatttcagttctcgggcgtagtgtttggcttccacgatttctttttcagataacttttttcccgaagcatgtcgaataataaaatcaagatcttcggacggtgcttcg

SEQ ID NO: 101305 - DNA, 416 bp, Zea Mays
attttggattaccttcgctatttttggtaagtcaatggggttaggccacttagtttctccattttggtgcttaatgccaaaggggagaaattagaggccaaagcaactggatcgactaccacttgaatttcaaaatgtttttgagctttaaacttgtcatggaaaagatccctagttcctaggacccgccagtcagagagtgcgatgagggaagggcccctggtcgctagggcccgttagtcagttagagaggtggacacgtcaaccctgaaagagcccgcgcccggtaaaaccacatggcgacaccgagctcggggttgggcgtggcggaacctaacgggggacgtgtcgtaagggaaccactcgagtggatctcacattcggccctagtctgacccgccataaatactcgatca

SEQ ID NO: 101306 - DNA, 565 bp, Zea Mays
gagccataccgctaaccctagctcttaaaggatgagatcgagaagcaatgtgaggacatgctgcagcaaggaattataagggaatgcacatcctcattctcttccccagtacttctagtgaagaaatcagatggaacatgtcgattctgtgtggactaccgggagctcaatgggaagactgtgaaggaccgttaccccataccagtagtggatgagttgctagatgagctccaaggttccagattcttcaccaagatggacctttggagtgggtaccaccaggtgataatgcactccgaagatgttgacaaaacaacattcagaacacaccgaggccactttgagttcctcatcatgccattcagtctcaccaacgccccgtcaacattccagagcttgatgaatgatatcctcaacccattcatatgcaagtttgtgctggtattttttgatgacatcctaatttatagcaagacgtgggcggctcaccttcaacaggtcaaacaagtgttccaaacactaagagcacataagttggcattgaagcactccaagtgttttttgg

SEQ ID NO: 101307 - DNA, 280 bp, Zea Mays
tggaaacgaagtacatgcatgtttgatggccttcaacacagtgtgtacttactttggcaccagagatttggtttaggagcacattgcttataaggtatggccacatgttaatgattgggagatgtcgaaggagaccgctgatggctccaacgaaggtggcctggtctatctgagatacacctgtcgctacagaagttagtttgacgagccgaatgatggctggcttgaagccgttgaggcaaccaatgatgagctgttgtgggcttatacaaaggcagag

SEQ ID NO: 101308 - DNA, 456 bp, Zea Mays
tgcctcttgcgccttgtgtgcaacgtttctttctttcgaggaacaggactaagcacatgagatggcacaaatgaactagaggacactcatgtgatgacacacccgtctaacaatgatgcgtggaaggctctagatgactttgatccagaatttgctagtgaagcgaggaatattcgaattaggttagcgacatatggtttcccacctttcaatacgaacgcgacatcatattcttgttggcctgtgtttgcaattccatagaaccttcaacctcacctttgcatgaaatatgattacatgtttctttgtctaattattcctaatccggaccattctaggaaagggctcaatgtgatgctgcaacccttgattgatgatctcaaaaagttatggcaagcgagtggcactagagcttgttaagtgttaacagggagtggcactagagcttgtcaaatt

SEQ ID NO: 101309 - DNA, 315 bp, Zea Mays
actgaccctatccataaaatagatcctatccctaaaaccgaccctatccacaaaacagatcctatctctaaaaccgaccctatccacaaaacagatcatgtatctaaaccgaccatatccacaaaacaaatcctatctctaaaaccgaccctatccacaaaatagatcctatctctacaaccgaccctatccataaaatagatcctatatctaaaaccgactctatccacaaaaccgaacccctcactcttccaacacctcgccagaaaccctgattcggagtccaaacttaaaacgaccgtaactttcacctcg

SEQ ID NO: 101310 - DNA, 466 bp, Zea Mays
ccaatatatcctttgcaactcaagcaacctgaattcaagagatcctagtagtttgtgagttttctgatgtttttcctaaagatttgccggtatttccacctaagcgagatgtggagtttgctatagagcttaaaccaggcacaataccaatgtcccgaagaccctataagatgccaccaaatgagctggtagaattgaaaattcaactgaagggtctattggacaaaggtttgattagacctagcacctccgaatggggcagttccgctctatttgtgaagaagaaggatcaatccttgcgaatgtgtatagattatcgtcctctcaatgtggtaaccatcaaaaataagtagcctctaccccgaatagacattttatttgatcagctgtctaaggctaaggtattttcaaagattgatcttagatcagggtatcatcatatcagaattcgcccccaggatattcc

SEQ ID NO: 101311 - DNA, 629 bp, Zea Mays
gaccagtatagtcgtccctcgacgaagggggcgagggaagcgttccactcaaattcgtcgagccacgataatacatatcttttaagcaacataagtttaagctcttcgcctttaaaaagcgccctaaaatcccactctttgaagcccctttcgatcgtcggtgctagaacaattcggcgaggtccctcttccgaccgtgccctctccctttcttgaggacgcgagggtgacatgcgaagcacctcgcagagcgagacccgcgggcgaggcccgcccagtcccatatgagaacgtctttgggagccctcgccacctcctgtcagcgcatcggcactgcccaaccttctcttcggtacaccaactcttttcattttgttcttcatgataggtatcagggccctatacgaagattcctcgcccattctagattccaccgctgacacatctaacgcaacaaaaaaatccaaatcctcataagactcctgtccatctttgtgaatgggctcaaccacccttcgctacccgacgaccattagccatattcagagtcctcgtcgctacactcaatcggacttcgttgtgacaatggtgtgacgcattcagcaaccccaacaatttctttccctctg

SEQ ID NO: 101312 - DNA, 563 bp, Zea Mays
aacagcctccgattgtaccatcctttgcttgtattttgtcagacacttgtaagatcttggtaagatacattagaacgtgttcctgtgttccacctgagaggagcgtgtagtgaaattattagggataactgtcaccgtttgtttcctatttttgtgtttcgatggcaggcgacgaagaagaagcaaggatccctacagacttcgatgaatgtgttagccgccaagatcttgaggcaaacaacaagctcctgaaggagcaaatggaggagacggtccacaagtcagtgcatgatgccttcattgacatgaaccttggcaagacttacgagaggctggatcgacgattgtcccagatcgtcgacagacttgctgtgttggagacgcaacaacaagcaccgccaccaccacctcctcgttcacgtcttcccgatgatgcggtgtttgatgaagaaggtaattatgatgaagtagccaccggagatttgcgcctacgtcgtcgtcttcatcaaaacacagaaggtatgccacaccgccagcaaggtaataacaatcgtgctcctgac

SEQ ID NO: 101313 - DNA, 475 bp, Zea Mays
ctcttttgctctattgattaatatagctagcatgtcagcaactatattaaatagaactggggataagggatctccctgccgcaagcctttgtgagttaggaaattcgctccaacttgatcatttacctttatgcctacatgaccccctgtcattatagacgtaatccagttgcaccattccaaggagaagcccttcatacgaagggtctgctggacaaaagaccatttgaccttatcatacgctttctcaaaatcaattttgagaatgactccgcttgcttttttctatgcaactcatgaattgtttcatgcaaaataacagcgccttccataatattcctacctggtataaaagctgactgggtgggacctatcaccttgtcagccactcctgagaccctatttgtaagtgtttttgtaaagattttaaagcttacattaagtaaacaaataggtctatattgttggatggtag

SEQ ID NO: 101314 - DNA, 1088 bp, Zea Mays
tttttattttagtctaattaagtccctaaatttccacacgttgggactgaggggtatgagacaaagtgactttttgtctcctatgacttttattataattatggatgtgcttaccagccattttaaagaagttgagcgttgagagttgctgcagaatctcgatggtggaaaaatgaaatccatgattttagtttacgctgatgatgtggttgtatttattaagccacaagaattggacttgaggtgtactaagatcatcatagactgttttggagaggcatcgaggttggttaccaacctgcagaagagttgtttcaatcttaatgcttgtgatgatcaggatgtcttgccgcaatgtactgctgcaacctttccctgcacctatttggggctgtccatttccaacaaaaaactgtcaaagaatgcactcatgacttgggttgaaaagatagtggatcgtttacctttttgaaagcctcccttcttagcctggcgtgtagaactgcaatggttcgtcttgtgctctctgccattctggtgtatctccttaatgccatgagtgttccgaaatgggtgatcaaagcaattgataaagttagaaaggggtttcctttggaagggaagaaaagatgtgaagggtggcagttgtttggtgctttgggatgtggtaacaaggcctctaaacctcggagggcttggcatacctaacctgaaattgcagggatgggcgctgcaagctaggtggctttggttgcagaagattgatgctggtaagccatggaggggtttggaccttcccatacaggcgcaggtcagaaagtttatttacatcttagtagttacaacagtggagacggtgcaaacatgatgttttggtctgattgctggttagagggttgcttcgtttctgaggtcgctccagaagtttatcgaaaggtgcgtaagaaagtcatgtgcaataggatagtggctcgggctcttaattagaactcttaggtgagggtatcaaacctctcatatctttggttggtttacattggttaatgaggtggttctgaagattgaggatgatattcactcttggaggc

SEQ ID NO: 101315 - DNA, 989 bp, Zea Mays
aatctagaacctccccctatgcttgatggacttagcacgagtgtggatcgagaactaaggcctgggtgtatccaaaatagggccaccctcgaggaaatctttgttgaaaatttctagaacacatacgtacacccggacaacccatgggacctcaagaactgccggcagaagccagacaagaccatgagagactacatcagacgcttctcatgacagtgcaacaagctaactaacctcgtcgacactcacgttatcggggtcttcatctcgagaaccacaagcgagactctagttcataagttgggcataaaagcccgcgaaccatgaaggaactccacgacatcgcgactagccacgtgtcgggggaagatgtggtgggggctatctttgaccaccataagcagaaggccaaacgtgacaaagagccccacagagcttccatcgggcaacccaataagagaaataagaaggacatgggcggcacgatgaaatgctagtggtcgcatcaggccagaaaggaaggaagccttcgaccaaggaggccatcaaccatttcgaaaaactattggaggccccatgcccaaaccaccgctacccggtctgataagcctgcaaggactgtgggtgcttaggaaattcctgagcaaataggtgcaatccagaaaggggtctgaaccctagagggatggcgagcaggagagaaggggcctcactttccccgacgaaactagatgcatgctaatcttcggtgagcccgactactacacataaaagaggcactagaagcttgaacgacgtgaggtattccaagttcggcaagcggctccggccctcctcgactggttcgaccacgccattaccttcgatcgcttcgaccatcccgagcacatcccctggtctagacgatacctgcttattgtcaatcccatcatcggatcggtgtgactatcaaaagtgctaatgcattggggcagtgggctcaatattct

SEQ ID NO: 101316 - DNA, 558 bp, Zea Mays
agaacgctggcgcattggtcaaaccaaaagacatcactgtgaactcgtacaaaccatacttggaaatgaatgccgtcttcggaatgtccgaaggtcggatcctgagctgatgataacctgacctcagatcaatcttggagaacacactggctcctctcaactggtcgaacagatcttcaatcctgggcaaaggatacttgttcttgatcgtgacctcattcaaagctcgataatcgatacacatccttttggtgccatctttcttttccacgaataagacaggggcggcccaaggcgaggtgcttggccgaatgtaacctttctctgacagctcatcaatctgcttcttaagttcatccaactctggtccggatattctgtaagctctcttaaagataggggcggttccaggaagaagctctatggcaaactcaactttccgctctggtggcatacccggtaaatcctttggaaacacatctgggaattcggacacaaccttgatactctcgattaggtctgctccactgctatcaacagctatctgataacaacttc

SEQ ID NO: 101317 - DNA, 798 bp, Zea Mays
ccatgcccttccattactttgacaaattcgttaatttccttctccacaaaatcgagggatttggaatatcttcgtcagaataattcttttccccccaccacttccccaactgagttgaaaatttcgtgcaagcgagtggcttcgttccatgaagcttgagcatgtttcccaaagcgacgttaaagctttagataatttggaactcatttttgctttggcttcgaccttatttttcaagattctaacctcgtcttcgtaatgatctttagcttcctttaattttgaatgtgctatttcaagctctttatcctgatcacatatgcgagtagcttgatccgtgatacgaagttcagcttcggccaagtttgtttcagcatttttaaccttcaaatcctcctctaccagacatttttcaagctcttttactcttttctccaggttgctgacaacaagttgattcttctgatcttcagcttcttgctgaagcttcaaagccttactcagtaatcaactttgccaagaaataaaagttagccgcaaaatctaaaagtttaaaagttaaaaaattcaaaggggcggacataagagtttgtaccttaaagtttgagtagaataagctcccaataatgtgttgtcttctataattactaagggcccgctcaaacttcggaaatccaatggtctttgatagagtattaacaattttttctctagcccgatcagggatacaccccaaaatttcttcgtccacaccaccgaaaagcacggatccgagtttgtatccaccagcaagggcaa

SEQ ID NO: 101318 - DNA, 427 bp, Zea Mays
ctatctctttaagatatatccgggcaagggtggctccttcgaaggtagttttcactgggatgaagtgggccaccttggtaagacggtctattatcacccagatagagtcgttccctttttgggtccggggcagtccggttacaaaatccatgcctatttcttcccacttccattcgggcactagaaggggttgcagtagacctgcagtcttctgatgctcgaccttagttcgttgccaagtgtcgcaccgggccacatattgtgctatctctttcttcattcctctccaccagtatctggttttgaggtctaggtacatcttggtggtccctgggtggatggagtaggctgagttgtgagcttcctcgagcaggacttctcatgcctctccttttggtacacacagacggttcttgaaccaaaggac

SEQ ID NO: 101319 - DNA, 336 bp, Zea Mays
acgaaatgttctagctctctgcttgaaaggtctgaaaccagatttaataggcagccgatgctctacgatctctcggcttaatccaggcatctcagtgtaattccaagcaaagcaatctgaatattccttcaatagacctatcatctcatctctagaatcggtctccagggtcttgtttacaaaagtcggccttggagttttaccatctcctatgtcaatctcctccaaaggatcgaccgatgtaaacccctgtcctagtttatcaagatctctaaattcctctatcatgttccccacagaggaattagatgatctttgtgtgacggcggactttcc

SEQ ID NO: 101320 - DNA, 325 bp, Zea Mays
caggggctagagccaaacgcgaagtgcttctgcagtaagcacgaactcttatatgagaggaaggctgctggcaaagaacagtactacaacaacttcgattgttatggatttattgctcgccccaacgcaagccatccggtctcaacgtttcggaagagatggcccagagcctggatggaaggaaaccatcactaattctggtgagggtaatttagtccgattgaagtataccttcaggtttggggataaatttgacgagccaaacgatgactggctgaagtgcattgaagctactagcgacgagctacttggggcatactccaag

SEQ ID NO: 101321 - DNA, 591 bp, Zea Mays
atccaacactcttagacagggtgcatataattttagcactggtgcggtcgcggatgcatcccacaacttcttcatcgacccctccaaagagcattgaccccgactggtaccataggagattgcaaattctttcagctctgtatgtcctcttcggagagctgttggccgcacaagtgtcgtatgtcgaaattcactccttccgaagaggtttcttcaatcttctttcgcttgtctgaaaattctacggccacctgcttctccgcaaccacgtatgatataagtctgtcaatttcggacagagtggttgtgagatttttgtcttcagctacaacggtagcttcggcatcagtcggtttagcagctttgtctgtcgaagctaggggttaggtttgctcaatggcttgcagtatattcatcatgcgttgtttcttctggcccccgtctctcccattagcagccgaagaaatttcctttttctataagaggctcgtcagttccaatcccagaggacttagcggtgtgaatgggaagcactcggtcattaccttcaatattgctgagacctctgtagcagaagatgaagggcttgca

SEQ ID NO: 101322 - DNA, 281 bp, Zea Mays
gccaaagcttttgaagaaatcttaagtgatcgaggggatgtatgtgcattttctggtgcacgcgggatttcagcaatcttggagaatgcggggtgcaatcacatcaaaaccatggcccaggccaaagctaccttgtccacggacgtcacgaaggacccttcagctgaagcaaccttaatgggcggaaaattttataatgatgtgtgggagaatggtggctgagaaatggctcatgaaattatgaagaaaagtgaaaaagacatccatgaagcccgagccga

SEQ ID NO: 101323 - DNA, 365 bp, Zea Mays
gtcacgctggaacatttgataaacccatttgcttggctgttcaaggtgcattcagatacctctggcctgagtgatcttgtttccttcagatgctctgcctggtgcattgatacatccatgattctggagtcatgggagctctagatcattgagcctctgcaggcgcctactagagattcacaaggagttatttctttgggttattttgtgaagatcagatggtctatcccttcttcagttgatgctgctcctttggtctcagcctcactgtcgtcgcctcatgatcatgatgatgtccctaggtcacaccggcgacctcaatcacactcaccacgaggcggaccacgtgaagacatcaacgcttc

SEQ ID NO: 101324 - DNA, 910 bp, Zea Mays
ggagacagcacatacaatggatgaacagaagtcttcccggtgatctagggcagtctagctcaattgaatgggtcgagcagcattaggagaacctaaggacactaaaccggaagagcagagagtatgaacagacctggaacaagctagccacgacgaggactctttcacggtggcggaaaccaatttgggggaaaagagcaattcatgggctctggtgagtaattgagggcacaagcggttggattggatgccggattacctaacagagccgagggtgtgctcaatttatagcatgcttgagcggtggctagtgaatttgatggagacgcgcggcggtcggagaggaggaggggcactggcgcaaacgattagtggctttcaccgtggcggacttacctgcgatgagccagtgatatagagcggcttacggcgacgtggtgaagccataaggcacatggcatccgatcgacgggcggccaactccgatgaacttatctgagccactcgcaaagcaaaaggagtacggcggccagcctccggtgttatcctgtggcgaagagctttttcccataagcgttatctggtcaccggtgagcacgaatcacaacggcggcgtgaatccgggcgcacggttcaccggcggcgaggttctctgaacctgaccctatccattcactgtaccattggaaacgttcaacagagcgcctgacagagcaacttgtaacgcctagatctcggatttttgtgccagaacatgccaatccgtctgcagcaaacttgtagcccattatttcaactataattctgctatagcaactaccctcaatcgagcaatgaatctaactctaaatcgagctctaagttcatcctactttactgctagtgacgattcagacttaggctgtctgac

SEQ ID NO: 101325 - DNA, 538 bp, Zea Mays
tcaagtggatttcacatgcctgcttgttggtcattctttgacccttcactttcttgaagtacacggtaacagctttgacccgtgcatctaacattgaaccatttataacttttctagcagcattgtggaatacacgttttgcatgttcttcgttcgctatttcgtccaatctaaattgttcctgcaaaatgaagaagcaattaaattcatttatatacacccacggtaagtaaatttaaaagacataataaactcacccaaaacgatgaccacactgcgtcttggtgagtacggtcgggtccatatggtttgaggccccaatgagcccagtgatacgcccctatctctgccccatttaattgtaccacccctggatattgaaaacgagctatagatcccagcactgtgttaactggtgtccggtgacctttgccactccatgccacctccgcccagctcctctctcctgcagggtttatgaccctatgttggtccaagggttgtgtcggtggaactctaagggaccgccgaaacctac

SEQ ID NO: 101326 - DNA, 355 bp, Zea Mays
tgggatatatggagagtagcacgaagcagtatggaggacctgcttcggctgattttgtcgtgcctcggcttcagcgatttccttttgattttggatcgtgacctgacacgtcctcgttgtgtgacccttgtcctcgccatagaaaaggcaaaacaacttcctgggctgattactgaaccttcctccactaaagcttcttcctcctcagcctctcagagctggtggtctgtaagaagtttgttgcatgcccgaagaccgtgagctgtgatgactgctctgagcattgttggccctttcattgttggcattggaattgtggattgacctaacatgcctgggatgaagtcttcctccg

SEQ ID NO: 101327 - DNA, 966 bp, Zea Mays
ttttgcgcaatttaagtggaggtaaaaacttcttgtggcactgtaaggagccagatggtcgatcaggaggtattttgttgggtgttgatttgaatgtgtttgatattggagggattgacgagggagagttttatgttaagtttactctgtgtaataagagtgatgcttttaaatgggtgttggcagcggtttatggacctgcacaagtggataagaaggagcttttttggctgagttggtgcagtttactagtcatgcgactctgcccctcgccataggcggtgattttaatattcttaggaatcaaaacgagaaaaataaacctttgactgaccaacgttggcctttcctttttaatgtcgttattgatgggcttaacttaaaagagatagagatgtcgggtcgccagtttacttgggcaaataaccttccgaatcccacatacgagaaattagatcgggtccttgtttcaacggaatgggatcagaaatttccattatcttcggttgttgccctcaaccatgatatatctgaccatacaccgctgttactgaactcaggggaagccacatcttgtccctgccaacaaccttttaaatttgaattaggttggttgcttagggatggttttcatgatatggttcatgacatctggacaaatgaagtcagtggtcaaacacctatggagaagtggcaaaacaaaataagaagattacgtcaacatcttcgtggttgggcaaaaaacacctgtggtgcttataaaaaggaaaagaagaatattttaaataagctggatttgttagataagaaggcggagtatgacaacttgttggcacacgagttagatttaaagcagtgccttcaaaatagattagctgagttgttgagggaggaagagattaagtggtatcaacgagcaaaatcgactcatttgcttcagggtgatgccaacacaagatattttca

SEQ ID NO: 101328 - DNA, 1142 bp, Zea Mays
ggggaggaagatagttctagtgatgacaatccttttcctcctatatctccaaggaagaaaaaaacttcagatgagcttgatgccgactatattcccaacgatgaagaggtaaatagaaatatgcctaataacttaaatgttatagcatctaaattttaatgttcatatatgaaagatcattaattgtttcaatatatagatttcaaatgaagagaagaaagaggatgcatgttctacacgaaacacgaggatgctccgatgcctggatcatccgtttcacagaagcgaaaacgagggtgacgaggtcccaatcagttgaaagaaggtgcagttatgtacgtaacaaaactcaatgcagatgagtttcctgaagaaccacttgacgtggttacaaagtttcgaaattcctgcgagtctattgttagagatatagtgtcaatcacacttcagaaatggaaggatttagatgaagacacccgcaataagctatgggctaagatgttcgagtcattcaaggtcccaaaaggcatagaggatgcagtaaggaagtcgatgctctctgctatggccaagatgtttcgtgggtggaagaccgagatgaatagggattttgttaagaagaatagggttcttccgcctaagaaaatggggaaaatcaatcaagctcagtgggaggaatttgttcgtcagaagaccgaactgaagaccaaagaacttggcaaaactaattctcagagagcgaagatgaacaaacacccccatcgcctggggtcaaccggatatcaccataaagttgtgcagtggaacaggataatcgaggaagctatagctaacggcactttggacccaatattaaaagatatcgatgagcgagctattcgttggatcttagatctggcaggtttgaccgaggacggcaaacttttgcatccagaattggtaggcaaagtttcgacaaaaaatcaagaatatgcagaaaagagaaagaagggcgaatttaagcctcggagggagaatgacatactaatcgcggcactaggcaattctgaacacactggacaggctcggggaatcttttctaagattacctggagagaggtgtttccagagtatgcggcgtcatataggaaacacgagaagtc

SEQ ID NO: 101329 - DNA, 465 bp, Zea Mays
ataagcagttcaatacagagttcaggcttatatatccaaatcaggcccaggcccatttaccacaactattacaacggcccatggccaatataaacctgtacatggcatactcccgccaaccagctagtcctcactcctcagtcgccaccgtcgttacactatttcgcttggggaggtaggatggatacgctgcatgaatagcctcaactatcgaccaatgcgccacaacatggacgcgatgctcctggtcaaggacgtgatcgagggtgtggtggccgtggtagagtcttccaaaagaccaaaacagctctagaggatggggcacagcaggaaggcgatctgacagacctcaggttacatgtcaggtttgtgataggataggtcattcagccttggactgctagtacagattcgatgaagattactcctccaactccaattttgagggataactggagacaaccc

SEQ ID NO: 101330 - DNA, 418 bp, Zea Mays
agaccaccttctcagcagatgtttcatcgaacactgaataaccagaacctccaaagcaccttggaagggcaatgacctcctcactgtagtagggggcatttcatcgaacacagaaggggccatacctccaagcagaactgggatgttccgcactgctgcttccacgttgcacgtatgatcgtgcagacccttctacttcacctccatcgcctccaacctactgtcgaggcgatctaggacccgcatcaccttgtcccatcgttcctcgcccttctgctctgatgtcggcatcgcagcaagcaggatgcttgtctgagcggacggcatcaccaacgatgttgtagcgaggaaacaccgcagatcatcgatggagaacgaagcctgcatcgatgacccaaccgagtgaacgacacccagg

SEQ ID NO: 101331 - DNA, 576 bp, Zea Mays
ctctaggagactttcaaaaacacccacaccaattgaagtgctgaaacaccaaaaacaagtgaaaacatgggtaccaaaaggtaaagagcaattaaactcagcaaaaacaacaagatcttgaactaccatgaacctatgaggtaagggtacccattccgacaagattcggagtggttggatcacactccttatttataaggatatttcacattttagacaatacaacaagatgaaaagagcagctaccaaagtaatggtgtccattttgatgcccatgataaaacaataatgtgcaaatgatgtattatggtttcatagaggagatattagagatagactatggtgcattgaaagtaccttttttttgttgccagtgggtctggcttagacctgttcaaacgtcgggtcaggtttaggtcgggccgtgggtcgtttggcacgacccatacctgacacatgcctagtgtcaggttgggttgggttggcccgtgcttccccattgggcgtgttgggtcagagttttatcgggttgggacgggttttggataaaaaatcatggtccgtacccgacacgtg

SEQ ID NO: 101332 - DNA, 310 bp, Zea Mays
ggggaacaggatctggcgtagaccgtatcctgagacgaagcctcataagtaggggaaactcccgacgagcgagtgcaccaagaaaggcgaaactctcgccgccacgatcgtcgacaagctcaggaccgagagcgagagcaagccgagcaaggcgctaggctacgccgagagatccctctctttgctcggaacctgtaccctgactttgctcgtgcaatgatcacgccgagtgaggtcggaggggtactggcccagatagctgacggtctcccgcgaaccccagacgtggaaggctataggcggctgctta

SEQ ID NO: 101333 - DNA, 401 bp, Zea Mays
agtttgtagagcagctctttttaaagttcccctccaagctgacaccccatccaccatcatcatcggcgcatcgtgccttgttcgctgcttgtgacgatcaccgttctcttcaatcgcttcgacgacggtgagttggagaaattgttctgtaacccaaacttgttatgtattggttaatcatgctttgaagtagtgtgttgaatcatatactcggttcaaattctttatgaacactgaaaacatacatatgtaagaaaactggaagtgaacatgtggtaggataaaattctttaacaggggtgctgatctaacatagtactgtgtgtttgtggttaaattatgcaagttttctctttcttgctaatccagggaacaactctaatcactgattggtaaactga

SEQ ID NO: 101334 - DNA, 506 bp, Zea Mays
caacaaaggacagcaaaaaaaggcaaggtacaaaaaaatatttaaaaaataagaagaaagaaggaaagtgaaagaaggcaaccagaaattagtgcgccccatttccttaatcagcattgttgtgtttggcaagccgaagctgcaatcagatttgggcgcctaccatctttgtttttggcaagcagcccactttccctaacacgccccctccttctttccttattcagggatttgggtgtgcccatttccttgtccagcagtttttgtttttggcaagcggcacctccatatttggtgcgccaaagctttccaattcaggctattcgattttggaaagcaaaccttgtttcctcattgagggatttgttgcgcccatacattttgggaagctagcttgggcgccactttttccagccggggttttggtacgccttctccatcttttgcacacctcccttacacgccccatccttgccttgttctgttcggttttacttggttccagc

SEQ ID NO: 101335 - DNA, 281 bp, Zea Mays
agtacatgtatccagctgctagagcttataggagagaagtcttcgaccactattttagcagcatccaagaaatcccaagggtaagtagttggataaatgagcatcatgactgtctttggtaccggagtggcttcaatacggatatcaagtgcgattacgtgactaacaacattggtgaggttttcaacaactggattaaggattggaaggatctgcctgtatgtgatttggctgacaggataagggaggaaattatggagatgtttcacaggaggaggagg

SEQ ID NO: 101336 - DNA, 428 bp, Zea Mays
gtgtgatggatgcagtattctcctcgtcctccttcgccagactgatttgatgatacctagagtagcagtttaggaaggagagcatagagcagccagcggtcgaatcaaccacctgatctatcctagggattccgaagggatcctttgtgcagtgcttattgagatcagtatagtcgacgcacatgtgtcaatcaactttattctttttagtacaagaacggggtttgccagccactcagggtgtagtacttctctaatgaatcctgccgacactaggcgagctaactctgcatgaataacttctctcttatcaggcgtgaaacgacgcaacttctgtcggatcggtctctcctgaggatacactttaagtttgtgctcggccagttctctcgggactcccggcatgtccggaggttgccatgcgaata

SEQ ID NO: 101337 - DNA, 466 bp, Zea Mays
ccaatgtgggtcgcaaatcacgtgcttatcaataagaagaacgggagctggaggaggtgcgttgactacactaggctcaataaggaatgccccaaggacccctttcctctctcgtgcattgaccaggtcgtggactcgatcatcaggtgcaatctcctttccttccttgacgcatactccggttatcaccaaatcgccatgaaggaaaccgaccagcatgccaccactttcatcactcccttcggtacattctgttacatctcgatgccattcggtctgaagaacgtaggagctacgtaccaaaggtgcatgcttcattgcttctcataccaagtcgggagaaacctagaggtcaacgtggacaacatcgtcgtaaaaaccaaaaagatcgacgacttcatcacggacctagaagagatgtttgccaacctccggaagttccgaatcaaactcaaccacaagaaat

SEQ ID NO: 101338 - DNA, 854 bp, Zea Mays
cacagcttcatcagataaatgagctactgctatcttgctgcttaagaggggagccaaaaggatgacaacttgtgctgatgagttgctaattctttgtcccatgtacctcatgccaatagtctataccaacactaaaaatgaaaattaaaccttctgaacttgctaggcggtgcagacacagacaacagaacaacatttcatatatgctaaacacataccttctatagcgaggagggtgagcttcttcagtgggcgatctacttggagttggcaaacagcagcagaaaatagggcttcttcataggctctgttgctgcattaaaataaacaaacaacagtagaaagcaatggcaaggagttcatctgtctagcgctaggaggcagaaaattcacataacttccgacacagagcaggacgaccaatccgttttaggccctgtcatcgcctccgccacatcgtcacgccagaaaagtagcaaaactatgaactccaggaccacatactatatggctgattacctggaaaccaaacaaaagtcacagattgtttacatcacaagtgtaatgccccaacattctcatatgaattaggcatgcataaacctgaaagggcgtccacaaaaacacagacattttttctctggtcagagcgaagttgttggaccaactaacataaacagctcctgaaatgtgttcatggtcttatccaacataaaagtcacagattggcacattttgctggtcattaattccctatttggcacattttactggtcttgggaacctggtagtattggtatcttttcaggaccaaatgtcatctagatatttggggactggccccagcagaatcg

SEQ ID NO: 101339 - DNA, 274 bp, Zea Mays
tccttgcttcttcttctacttcctcttcgttttctaaatatagccaaatataataatgaatgctcatgtaatgctcatgaagatgcaaaaacagtaaaagtttgttatctaaagtcttgagtacaactttccttcacagttctccgagaacctagggtttccggagtcaatagtggagttcacagggcaggggctagggttttcggttctaagtaccaaacatggtccaaatcataccaaattctacccaaggcttctaaatattatttagaga

SEQ ID NO: 101340 - DNA, 535 bp, Zea Mays
aaggatcgagttctctggtgccggtcttgctgctgagctcggaggacttggaatttcctcttgaggtgacctttttcttcatcccttgccctttccacttgtatggctttgtttgagaggtgcaagaagctgaggaaatcttggctggctaggatggtcttgagttctggtctgagccccttcaaaaagtgggccatcttcttgacttcggtgctgacgtcatccggcacgtagcgggcccattctgtgaatttgtgcacgtattcactgacagatcttccatcttgagttagttcccggaattcatcttccttgagctgaacgatcccttggggcacatggtgctctcggaaagcagtttcaaactctgtccaagtagcatctctgatggcagcgttgaaggtatcccaccaagctaaggccattccggaaagttgatgagcagccagttgaacacgctgattctccgggcatccgatggcttctagcttccttttaatcgtgcgcagccaatcgtcagcatcgaggggtttgc

SEQ ID NO: 101341 - DNA, 496 bp, Zea Mays
ccacagtaacaacgcaagcagcacccccattgggatcagcaacagatggagcacccccattgggatcagcagcagtttgggcacacccattggggtcagcgtcggtaaggccagttgcaggcacttcttcagcagcaagagctaaggtaccggcgtcctcatcaaaactggatactcgccggaggcatcttcttttcttcttttgctcatcagcagaaggctcaggctgactggttcggctagggcgcctcgggcgagtactgacaggtttcgggacatccaaagttgtatcaacctctggaaggggcaccactaccaacgtaccaacaggagcagcgtcggatgaatcctcagctaacagatcaagcatgtcatttatgtccgcatcactagggttcaggggcacttcaaaataaacctgccgttcatcatcaggaatctccccaagcgaagcaaccaaagtactgacttcttcagcagagggtcgcactctaag

SEQ ID NO: 101342 - DNA, 535 bp, Zea Mays
gtcgttgtcgtggactgtggtgactcggtcgtggtgtggtcactcttctctagagagactcgcgattgtgttgattctcagttggggatttgtcgtttggtatgcttgagccctctggaacctgatcatccatgttttaggttcatgacttcgtgtttgtgcgtggtcgtggtcgtggtgtggtaactcttatctagagagatttaccattgtgttggttctcagttgcggatttgtggtttagtgtgtttgagccctcttgaacctgatcatccatgtttcaggtccatgacttcgtgtttgtgcgtggtcgtggtgcgggtgcggtaactcttatctagagaggttcgcgattgtgttggttctcagttggggatttgtggtttagtatgcttgagccctctggaacctgatcatccatgttttaggcccatgacttcgtgtttgtgcgtggttgtggtcgtggtgtggtaactcttatctagagagatttgccattgtgttggttctcagttgcggatttgtggtttagtgt

SEQ ID NO: 101343 - DNA, 542 bp, Zea Mays
cccacctgtgggagttcggacttatggtaggagttcctgaacattttcacctttgggacatgtggcggcaccggacctgttctcgagaggggagcgagttccgaggccaatggccccgtcatacgggtttggacccatgggtccggctgctctgatccttagtacgtggttacagataaccacgcggatatctggccttgacacagtaggagagggtatcccagttacgggtaccgacgagtatatgttttaatttcattccaattggaggcgtaatattaagagctattttagcaaatcgggtgatatatttgcatacatgctagagatgaagtgctaggcaaattaatgagatgttcttttactttcttgttagcttaccctcaatcattttctgtagttagcgcagtgataggcaacacatacaaatgattgtatccccgtacctacctcctgccagcacaaatctcaaagtaaaatgagtcatgcttttataaatcgattcaaggcatgaagtaacgacttttttcgctctacaaaag

SEQ ID NO: 101344 - DNA, 411 bp, Zea Mays
gtcgatctcgggttggtcggccatgattagttgagagcggggaatgttagtaaccgttggatggccatccaacgccaaaggttagatcgagaggaaaggaggggtaaccgtagatctgtgaatgggcggttctgatgagttcgcgcatgatccagacgtctagttgatccaagccgtcgatcgtggatcctctggtcctgggcgcttggtgattattaatgctcctgattaaatctaagccgtcgggctctaatccaacgaatttgatgcagccataccccttcggctgggcgttttactaaagaaccccctatagttttacggaattaacccgccatccacgccagggactctctgagtcttagaaatatttgcaccgtagcccctgcacttctcagtatttgatgcccg

SEQ ID NO: 101345 - DNA, 551 bp, Zea Mays
ctctcctggcgatcacccccctatgctcaccggtggtgatcgtcggcgacgtgctcccgtgaccctctcctacgtaggctcctctgcctcctcctctcggtgagcacctccctccattgtcttccctctctctctctctatttctctggtcagtgagcctgaattccacctctttgatccaatctcaaattcttgtgaattcctgtgaatccatgtggttggaggtgttactatgtgtcccttgagtatccttgtaggtttctagctccctttgggagggtttcaatcctcaaaaagccttttcaccaaaaccctaatccaccgcacgccacatgctcggtgaaatgcccaaaccagccaaaaatgctctaattgaacccaaacttttcaggcaccttcataatacctccagtaacatattcgcccaatttcacgccaatccgatattccaggcttcaatttcacacaattccctgtttcgagcgatcaattccgagtcgagtgcctaaatttcattttctctgcctaaattcaaaccaagcacatacttc

SEQ ID NO: 101346 - DNA, 491 bp, Zea Mays
gggcattcacaaacctagtcatcttatggtatgctgataaacttgtacaacgggcaaccacaacctcctccaccaatttgggacaaactagcagtcctacccatggttggactgtccgagcctgagcctggatagttcacgaccatgaccgatggtcctgtcctttatgacagaccacacagaatcacgccagggccactgtcgcaaggcctaactgacatgctcggactatctggctacacacacaaacagtccgagtatccccaagccatccgcatttaacactagacagtctgcatatcacatcgtaccatccctgttccacatcggacaatccagagtgagtacatagaataggatgtggattattacccgcacttaccacaacaaaacttctccctaccacctacagtccctcaaagtcgtattatggctccacctacatacgagagtgagtacgttttggcccctagaaggtcggaaaaattact

SEQ ID NO: 101347 - DNA, 932 bp, Zea Mays
tctgcaagccattgggaccatgacctcggatcattgccctctagttttgcaaggttgctcggattttggtttctatagggggtttcgatttgaggctttttggacaaaaattgatgggttcaatgaggtggttcagcaagcgtggacgtctagtgttagttcctcagatgccatccttcggctgcatgtgaaaatggctcgaacggctaaagctctaaagatttggagtcgaaagactgtaggcaattttaaagtgcaactagcaatcattcagaccgtccttaccttccttgagaaagcgcaggaatccagacaactctctagggatgagctagaattcaggagaagtctaaaattgaaaatcctcggaatagtgtcagttcaaaaggcaagagctaaacaacattcaagactcgtctggatgcgcctgggtgatgcaaacacaaaaaattttcacttgatggcaaataacagaagaagaaaaaactttattagatcgctggttcgagacggcagactgctcactagtcaggaagataaattgcacgaggcccataatcatttcactcaagttattggcaggacgggtgctagacaatgtgctgttcgttgggacaacttaggctatagcccctttgagttatcagatctggactctacgatcaacgatgatgagattaaaaatgtggttatggggatgcactctgaaaaggcgctgggtccagatggtttcatagggttattttttaagtgttgttttgagctgattaaggatgatctattcattgctattcatgatttctataatcatagatgcaaaagcctgcatcttgttaatgaggcaaatatcactcttttgcaaaagagggagggggctgacaggattgacatgtttagaccaataagtctcatcaacagtttcatgaaaattc

SEQ ID NO: 101348 - DNA, 364 bp, Zea Mays
cggaggcgatcccgcatgaacgtccatggaagtacaggagggagaccccgctcggacaccctcgggggctgggtcatagtttgcactgcccacttgagccggatcatccccggcagcaccctcaggggctgggcagtggcttacacttcccacccgaaccaagttatccccggtgacatcctcgggggctgggcatgtgtcaacaccatccttggggtccaagttctctgtggtagccacttctaaggctgatggaccctcagttacttccatgggaccaggacgatctaagtcagtctcctgaccctcgagatcgcgatctaaggtcgacgaggcatgggatgacctcaacccagcatcaagc

SEQ ID NO: 101349 - DNA, 792 bp, Zea Mays
gggctcagaatttctggcattttcattatttcttcaatctgtggctcttcggccttatcatctttagctttggttggcccaactgtaggcgtctttagcattacggacgacttttcagcactctatgtaatcggagcagtttgggttgcttcggctgctgaagtggaccctgcgccaagttttggcactacggccggttcaatatagtgcggccggtgggtcagaaccttcaccttcttgctctttggctcaggctcagctggagtgaccaaagcggcaatcttcctctttttctcttgccctcgtagcgggtagcagtaatcagggtatacgaagccaatagcatcaaataccctgtttaatcttttcttgcctcgacctccaaaggctgcggacagagcattatcttcgaccttggaatatgctccaagtagctcatcactagtagcttcgatacacttcagctagtcatcgtttggctcatcaaacttttccctaaacctgaaggtatacttcagtcggaccaaaccaccctcactagaatcggcggtggtctccttcgacatatcccagctttccacaagtggccataccctaaaggatatatgctcttgaatcaaatcccttgtgccaatgaaggcacacacagtgctgaaagccctctgacatgcttcgacattgccatcaatttccaccttcggccttcgaaggccgaagcgagaccagatgggtcgctgaatgatttctttgatgtcctcccttgcctttaaatcatttttaacgtaaaaccac

SEQ ID NO: 101350 - DNA, 818 bp, Zea Mays
ctcgtgaatcttcttgaccaccagtggatcccccgaatgagggtatggtcgaggcgcgacgttggtagcttcgcttctttctctccctctctcacgtggcgctctctttctctctcaaccctagggcttgacggcgttcaaggtgatggctgaggggggtgtggcaggtcttggtttatatagccgcaagggcacgtgctagggtcgcaatggcctaacaaccgtgtgtcaaccccgacaccacgatggtggagttcggtgcaaagcttcgagaagattgtggtgaagaaaacgctactaggagggtcccacatgttggttactatggttatgggcgcgctcgactgagagagtcgttcagcggtccccactggtcagtgagatggcgcgggggtgggctaccagctcttggcttagccggccaacgagtggaggatgttgggctagggtgaggtggtttcggccgaacactggaaggcttcccttttctatttcttttattttttgtgctctatttttaattttttagatttgagttcaaatttgctttgaaattcaaacaccagtaaatgtggcaaacaaagaacaccagcatgtgttgtatatcttcattttaatttaatatttattaatggttttaaacatgttaacttgcacatgcatgctaaataataacaaaacccatataaggtacaaccatatcttcactcttatttactagaatctaggtattacaaatcctaccccttaataataatgtggacctcgagattacgatgaacaagaaaaaaggtggggaaactctacttgcaactcat

SEQ ID NO: 101351 - DNA, 362 bp, Zea Mays
gagcgacatgacctcgcaacccgccgcagaatcgacagtcttgtcgattttggggaggggagttgtccttggggcaggctttattgagggtagtgaaattgatgcacatcctccatttatcgttcttcttcctcactattaccatgttggtgaaccaggttggggtaatcgatgggctcaatgaattttgcttctaacagtctgtgcactttagcctttgttgcctctatttttgtctaacattttgcagagtttttgcttcttgggatggatcgaagggtcaatgctcaggctgtgttcgacgatgatgtgactgactcctaccaggtcaaaggctaaccaagcaaagacaccttgttgtt

SEQ ID NO: 101352 - DNA, 309 bp, Zea Mays
ctattgtgtacatctatctctttgggctttagttgtttagactctcacattctagtgctctctagtttttgtctctagttttgtaatagtccttagcccggagatccataggcgatttgtaactccatatctatgaacctatgattttgagaggaagggtggccgtaaccatcagcggtccagcatttgtcaaatcatgcggtcagtttgtggttggtgcagtttttttatttgattttgtcattgctatcttcccttctcttccttctttgggttttgggagatcgatcgatttttttgagttgttgt

SEQ ID NO: 101353 - DNA, 493 bp, Zea Mays
cccgtactttttttctcttttgctaataatagaagcacaacatgcatgcatttgggcgcgattattatttagcgttagaggggagaggaagagagatgttttcgacgatggatggacagatattatgttgcatgcacacggtagtatacggagcgtaacgagatgcatggaatcagctgtgaggcggtaattcgggagtacatacagttgtttggaacgtttccttcgcgcatgcaaagactacgatgatctatcgatggacgaccgcgaacgacccatacatatatatacgattataattaggagctagccgtatgtccgcttcaggaccaataagctagctaggcttttcgatgacgtgtctgcgcgcctttgatttgctgcgaagtacgttctcatatgtttccctctctcccgtcgacttttcaaaccgcaccgcgcatcacatacacatcacgcgctttggaagtatcgtacactccacgtctcaacg

SEQ ID NO: 101354 - DNA, 467 bp, Zea Mays
cattggccttagggataagccgcgacccacattcatcagcaagaggttggatctagagttacgagagccaatgacaagcctactgaaggaatatttagatttctttgtgtgggattaaacggaaatgtctgggcttgataggagcattgttgaacaccggctctgcctaaagaaagggtttcgaccttttcggcaatgagcacagttgatgaaagatgaagtactacaagaggtcaagaaagaggtagagaagatgctagaggcgtgattcatcaggccatgccggtacgctgaatggatttctagtgtagtgcctattcaaaagaaggatggtcagtggcgggtatgggtggatttcagagacctcaacagagccacactaaaggatgaataccccatgcctgtcatagaagtattaatcaacacgaccgccgaccacatgatcttgagcttcatggacagaaatg

SEQ ID NO: 101355 - DNA, 2157 bp, Zea Mays
gtctatgtgaggtgctcctatcatttcaagtgtatgcgcatgatgagatgatctaagggtggagttttagggagaaaataaaataagagggggggttaggaggttagggttccaaaccttgggttgggattttgggatgttacaaacctaccccacttaaaggaatctcgccctcgagatttagactggatttgggaaaagataatggtattccctcctcaaggagtcctcactctcccaggtagcttcctcttctccttctctgctccactgaactttacagagcttcacttctgaggtgcgggtctttccgatagctgaatcaagaatcttaactggcttctctcggtactgaagatctttctgaatctgtactgcctcttcttcgatgtgactttctggtgcttgtaggcatttgcggagctgggatacgtgaaacacattgtggatgtacggtatgctgcgggtcccactctgccaatgatgggatagggaccgacgaatcgcgatgctagttttcctttcacttggaacctcctgacaccacgcatcggggagaccttgaggtagacgaagtctccttcttcaaatctgagctctctccgcctattgtccgcataactcttctgccgactctgagcttcaagtaatctcctgcggatcagggcaactttttcttctgcctctttgacaaaggcaggtccttctagtgctttttccctacgttggaccacatgagaggtgtctggcactttcgtccatacaatgcttcgaatggtgacatcttgatgctggcctgatagctgttgttgtatgagaactctgcgtagggtagactggattcccaacttctatcgaatgctagcacacatgctcttaatagatcttcgaggactttgttaactctttctgtctgcccgtctgtctgagggtgataagcggtgctgaaatctagcttggtgcccatcgctttctaaaggcttgtccagaatttggagttgaactgggttcccctgtctgacactatcttccttgggatgccatggagtctgactatctctttgagataaattcgggcaagggtggctcctccaaaggtagttttcactggaatgaaatgggctaccttggtgaggcgatctattattacccagagagagtcattccctttttgcgtctggggtagtccggttacaaaatccatacctatttcttcccacttccattcaggcacggggaggggttgtaataggcctgcaggtttttggtgctcgaccttcgtcctttggcaggtgtcacaccgggccacatactgagctatctctttcttcatccctctccacaagtatctggttttgaggtcaaggtacatcttggtagttcttgggtggatggagtaggctgagttgtgagcttcctcgagcaggacctctcgtgcttccccttttggtacacaaagacgatttttgaaccaaagggctccttgttaatctgccatgaggtccgggagttgttccttgcgggctttttccacaagtcttgctgtctctgggtctaggcgttgagctttgtatatgaggtcttccagcattggcttgacttcgagactaccgctgtttcctagacatgtattcagttgagctgattctttcttccaatcttctaaaaacttggttccctttattccgaatggttttcgactgagggcgtctgttaccacgttggccttcccggggtgataatgaatctcaaggtcataatccttgatcatctccaaccatcttcgttgacggaggttgagatctagttgagtgaagatatacctcagactcttgtgatcggtgaaaatgtgacacttgttcccgattaggtaatgcctccatatctttaaagcgtgtattatggctgccaattccaaatcgtgggtggggtaattctgctcatgcggcttaagtaggcgtgacacataagcaatgactttttcgttttgcatcagcacacaccctaagccttgcctcgaggcatcacagaaaacgacaaaatcctgatggatatctggtagtgtcaaaacgggtgcggttgtgagtttctcctttatgatctggaaacttccttcacattttggggtccacacaaatttatggtctttcttgagaa

SEQ ID NO: 101356 - DNA, 536 bp, Zea Mays
agaaaacttcattgaagatttgcagctggtcttcaacagcttgaggcgataccggtggaagctcaatccagaaaagtgtgtctttggagtaccgacaggaaagttactcggattcattgtcagccaccggcgaattgaagtcgacccagaaaaaatcgaggccatcatgagaatggaagcgccgcgatcacagaaaaaggtacagaggcttactggatgcatggcagccctgagcaggtccatatcaaggctaggcgagaaaggcatgccattctacaaattgctcaaaaagatggacatgtttcagtggaccacagaggcacaggaagctctagaagcactaaaaaagttcctgactacaccaccactactcaagccaccacgtcgagccacgccaaatcagctggcagaagatctgttgttatacatctcctgcatgactcacgtagtaagcatcgcgttagtagtcgagcgggtggaagaaggacatacatacctggtgcagcatccggtctacttcatcagcgaagttctcg

SEQ ID NO: 101357 - DNA, 385 bp, Zea Mays
atttgaatgtgccctacgggctactctaataatggatggagatttctctatccctctaggttgatgtgaggtcgcttaggatgaacatgcatgcatcattttattctaactacttagtaagtggccaagaaagtttaaaagctatgaggcacggtaataaaagattaagtgtatctccaagatctccacctaaccctgggaaagccaagccctagttcccttttagtttcttaattctttttctttttcgcttacgcttacctctacacagatgacttctcacgaatcctcgaatggagggaatgcacattcccacacggacggacttgcgcgagagggttttccccgcattttgtgggaggtgctgcagggagccggttatacg

SEQ ID NO: 101358 - DNA, 547 bp, Zea Mays
cggtcagctaaagtagacatgtagcgtctaccatagaggaactcgccctcggacaagccccatggcaccgagcgcgaggtcgagagtggcggagtctaacatggggccgggcataccgaaagaaaaaccactcgagtggatccctcgcttggtccgagatcgacccgtcataagtgatcggccgcattaactgcggctggcgccgagccacatcggaggtgtcgctccacctcctactaatagtctacgagctcctcggaccacatagctctcatgacctaccaacctctcagactacgacgcatttatgacccgcacacccccgacctatggagcactcattacctatcgagactaggtccaagtgcgcagacctttggcaaggcacaacatgacgaaccgcgtcgatccccaggccacgaatgcaaaagggtcggcatagcccacatgatggtgctcaggccccacactgctcacgacaaccaccataaagaatacgagacaaccaaacgaccctgggcccctcgaggaagtgtggccttacccc

SEQ ID NO: 101359 - DNA, 373 bp, Zea Mays
cgacaagtttaccaagtttgcccatttccttccattatcccatccttacaccgctgcttctgtcgcacagttattcctgtctcaagtgtaccgtcttcatgggttccctatggctgttatatcagatcgtgacccagtctttactagccagttttggcagtcactgttcaagttagcaggtgctgagcttcgcatgagttcatcttatcacccccaatccgatggtcaaacggaacgagtcaatcagtgcctcgaaacattcctacgctgctttgtaagtgcctgtcctaaaaagtggtctgcgtggcttccctcggctgaattctggtacaatacaagcttccactcatccctgggctcttcaccctttgaa

SEQ ID NO: 101360 - DNA, 461 bp, Zea Mays
catcaagagaaaccacatcaccaaaaatactataatttttcctacttatggcatcaacccaaaacactcgcattagtcttccatgatcatccacttcaaagtcataaaaaatgcagaattgacttcctttttcctctcgagctgagacacacaaatatctgggcatctacatccttgatttttgtccttaggtcacggtaatagtttttgagatcactcagtgtacacccaacattttgaaatcccccatcactaacatgcatcaatctgaatgcaagggatgtgccaatactagatttatggcaattgtacaaagtactcttcgccctctctgtaacatgacggttggatcgaagaaaatgtcggtggaacggcgatacaagaccatgattatgctgctcaaccattgaagcaatcttgtacttcttgtcggtaccaaggttcacatagatgtgtgccgc

SEQ ID NO: 101361 - DNA, 460 bp, Zea Mays
tagaaggctttttcggtctaagatggcctccacttttctgaatattatttagatttttattaaaactctgctctttttccctggtacataattactgtgataattattttcaaagataccctgctttctgttgtggtagtttttttttgcagtgaactataaactatgtttggcagcacgggcttcgttatcttctacaaatatgagaacattgttgcttgatcaaggttccttttattacacctttctctataacttcctaacacgatgctttgctcctaatacatacctttggagcagcttactataaatattaatttaccatgatactctgtttattgttctgattgtttttgtagtgggctctaaacttgagtttagcaacacgagcttcattattttctatatatatgctcataattttgctatttgatcaaggttctttttactacaccttttt

SEQ ID NO: 101362 - DNA, 455 bp, Zea Mays
ctttgccatggccaaaaatttattagaaagagacacttacaaacaccggaaaggaaagacaacactaggggagagggggggcaaagaaaaaaaaagaagcactagcaaaacagtccactataaacccagcacgccacacaaacaaaacgctaaaactaactagaagctctttgcgggttgaaatcttctttgacgaaattggccacttctcgctcgctcttctcaagaccatgaaagattcttcgatttctttctttacaaatctcccaccaaaagtaaatacagagaccatcgaattccttgtgagccgcagttttctctacttttagtctgcacttcctccaccatccatagaccgacgagcactggtccaactttggcagagaggagaggttgtaccacgagctgagccaactccaacacgattttgtgaatatgcaatcttttgctagatg

SEQ ID NO: 101363 - DNA, 1177 bp, Zea Mays
gcttgtctaaagcatgtttgaatacacataaagctgtttgaatggcgtactaactaaaggatctccgcttgcaggagagactttttccaccatcttcgctcaagaagccaccaagtttggagcaacaacacaattgtttcagtttgggacaaatccaccagttgtagtgatcaattacgaaggcaagacgtactaccacatcaccaaagatccagtcaaacctgacaatggaaagcatgcatccatgaaggcgaagaaacagagatacgaggcaatcactaaagctcgtgatcttctcaagagcaatgaaaggcttcatgccaagcaatttgagcagatttttaacgaccttcacaatgtgacctacaagctttccatatccatgcacaaagcttggtctagtggcaacgctaatactgcacgcaactacagaaggaagagaagccaagttaaggggttgtgtgcagccctaacgaatcgtatcgttcgggacacgagaagcgaagaggaaccacatggctctgtttatttagatcctgtggagacaccctacgtattgtctgtaaaggcagaacgtcctcatgagctgaagcaactcattagagatacaatcatgaatgagttctggacacgcaccatgaaacgtccgactcattttcctggttgcaaaccactaccacttttacaatctacaatgctagtctcagttaatcacattacaaccgatgataataccaaaaataggtttgcaccactgcctaacgaggttccggcacctcattctgatgatcttcaacgccagttccaacagttacaagctcagatgatgcagcttcaacaacaattacaagggcgtgaagaaggcacacatgctgggggcaggcctagttgttctcatgcgaatgaacatgcgaggagcagacctattcattttcatgaaaatgaacattatatacataccgggggcaggcctagccgtccttatgagaattacacacgagccggaggcgggtctatgcaccgaactcaggaccgctatcatgaagagccagagtcatctcgccaaactaatacgaggcaacatatctcgggttatcgtcctcaatatgatcaaagaactttggctccaagaagaggttctcatcaatacttcaagactaggcatgcatcatcgtcg

SEQ ID NO: 101364 - DNA, 537 bp, Zea Mays
tgtaactgtcccaagctctatcgcatcaataggaaataaggatcgatatccagttgatgacatcacaaggcttttggtctgcaccctagttataagatatggtattaacaatcttcatacgaaaaaagtagccacaagccttgagatcgcaggacgccggttccatggaatcaaaattccataagattattgcggggtagaagtgacaacgatcgtccaaggatccgaggatgacatgctagacatccctgggcccaaaggtattgagacacctgtacatgctatcaagaatttcatcctttagccacgacgggatgtccaattggctgatccaccaatgtcatcgtcccatgcccaaaacccctaacgcaagagtcatcacatgcagatcctattgcgaaattgtcatcacctccttaaacttcacatgttgcccagtctattccttttcaacaaccgtggccagctcctcatctgttttctgacccatagtctccgccataagcatcgccattaagggctccacaaccttcaccc

SEQ ID NO: 101365 - DNA, 404 bp, Zea Mays
ctttcagttagtttcgaacagtcattcagatgggagtacagtctctgaaaagcggcatgctagctagcgcctcccaaactttattattctggctgacaatgttgaggccgggccgggttaatgatcagctagctaggaacagtgtaaaggtccatgcactgtgtgtgctagcttgttcaatgtaatcagtagcatgattgtttgatttggtggcatatgcatgactatatccaagattgattctggcgccctataatattgctcctctgattcatgaatggcagagctcctacgtacatgattcataaaaacaggagagtgtggtgcactgaactatatatgtgtggtgttgtacatcaagtgtggtacaggtgctattttttaggaaaattcgagataatctc

SEQ ID NO: 101366 - DNA, 407 bp, Zea Mays
gaaggcatcaaacagaaacgaagacataatgctatgcctaggccaacctttgtcgtcgaggcaacccacataaaaccagttctcagtccactccccatttgttctttgcacaaggaaccaactctataaccttatctttcgttttccctatcttccaagtgaacatacaactctcaaactgatcaacaagccctcgagcggcccttttctggcaatgcaaatagtagtgtttcgaagacctcaactgacaggcctccaccgaaagtagtcgtcacctagaaaatttactcgaagctaccatagcgtttagggtcaattgatggatttacaccttatatctctcgagcacatcaaccaacaataaatggcaaggtagacgaaggccagtagcaaacaggctctcgaag

SEQ ID NO: 101367 - DNA, 1389 bp, Zea Mays
caaaaagccacatttgggctccatgggctaagtctgaattgtagtggtatagggccaactttgaaaccctatattttccaaattatgaagatttttccctagatcaacacatcaagtttgtaaagctatgtaaggagaacaacttttcaataggaattaaaccatggtcacatgaaaaatttggagaaaaatgtgcccaaagtcgagctgtcagactgccttaagtctgaattcagactgacagtggaattgcacgaacttagggcttaattctaagctggatcctgtgactttttgtgggtgcacaatgtagcaaagttgtagctagtttatcaggctataactttgatacagagagttgattcagtcattacacaaaatctggagcaaatcgatgccaaacatgctctgacaggtcgactgaatgagcttgcgatggtacagtgaccggattggatcgccagctcagaaaccttgccgccaatgatcttgcgctcagatccgcgtcggcgtcgcgattcacgcccgaccgaactcagataagcgctcctcgataagaaatatcgcgcgggagataaactccggccactattctactccggccaccgtacacgagcatgtcacggccgatgtggatatgttcacaggagttagccatgtgccgctcggatgacacgtgcctagacgcagtacttcatcgtagtgactcgctctagcacgtctggtcatcgccgttgaggttgccacggtaaatgccactgatcgcgagggccagtaacccctttcatctccgaccgccaccacgccaactcaaattcacgagccactgccccaagtcctataaattgagcacaccgtcaggtctgtagggtagtcacgcatccagccaccaagtcgtgccctcaattgatcaccagagctcactaatttctcatttcccccaaacctactttccgccaccgtgaaagaagcctcgccgtggccagctcgattcaggtccgatcttgccctctgctttcttgtttcagcatccttgggttctcctgatactccccgaccctgccaattggactaggacctcttaaatagccgggaacgcgttagtttggccgttgatcacatggtcactgtggatagggcgtgttagtgcaccattagtgaaattagctgaggggaaactctcgttaggacttgagttcggtctctgccaaagaagaacgctggtcatcgagtaaatcggccgatacaagctcaccggagctcggccccgcgctgttcaccgtcgtggacttcgggctgtaaagaaatagaacgtgggggaggtttttgtaaactgtcagtgactcaaggaatagtactgtgaccctggttcaggttattcaaaacgac

SEQ ID NO: 101368 - DNA, 432 bp, Zea Mays
tatctaggtggtattgtaattgttcaaccctttttgccaaaaaaagtgttgtctgttctgctcatgaaaaagccccctccaaacaatcttgagtttaggaagtgaaaccttttaacaaaattcatgcttgtgttggtattctctaacccttatgtgttttacccttgaagttacacctgcacagtttgtagacccccatagcttgaccgctagaccaacccaagtctcattatgcacttgttgtgtcaaatttttttgtttggtatctagttgcacaaaccctatcaaggccatgtttctttccatagatcctgtcccgaatcttcatagcatttctgctgctcatcctaacagatgttgttttcctacctctcctttgtccgaatctggtaatcattttccttgaggatcatgttgtgaccatatccatcg

SEQ ID NO: 101369 - DNA, 725 bp, Zea Mays
gttccaacaagttgacgatggattgtatggatgtgcgccatagtcaaggatagtatggacatttgtttacccagcatgtcacttctctatatctccatgatgtatgacacaagagtgtgtaacccttttatctgggacatgtgccacgatattcaaggacagctataacatcatggaaagcacacttcctcgtctgtcgcatctctagatttctctgtacagactgtgcgagcctgatcattctttgaaaatagaaggtacaactacaagacttcaagctagcatcagcaaattgtaggacagggggagttaaggcttggcccacatctaattggtgtaccctccttttcccttggtttataaaagggaagggtcgactttggtaaggggaaatggacacacacagccaagctaattaagtaggaaaagaaagacttagccattcccaagcaataaaactcaaagaggacatagggcattccactcttgcgacctaaatctttctaaaaatccatcttctcaagtgccatctccaatggagtctagctggtagtcatgccggtctctagtccaaaaactaatggattagaaagcttgcataccaaagtcccccaaccaaaccctactggtggcacattaccgtacccccagctgacaacccacaattagaccctaatccacatttatgcttgcccttagaggtagcatgtgtgctcgaatggagt

SEQ ID NO: 101370 - DNA, 629 bp, Zea Mays
gaccatcacacataacatgtatggtacatacatgtgatgcatagcggtctgaaacgggtgacacatagttttcaaaaccctaaccatgtaatgattcgattaaagtaagtactatagacatagttgcaacaataatataatagaataaaaacttacataagatggcattcatcaattaacaatattcacggcatcaaattatataataacataagttacccctaacaaaaattcacaacataagttaaccctaacataataaaattaaattaaccctaagataccattatgcaacaataagataactaatatcatcaaactaatcaattcaaactaataagataagttaaccctaacaataaataacatcaaattaatcaattcaaattcaaaacttggagctacaataactaatatcatgcataaattcacattgattaaaatgaccctatcaaatggcaaacttacgctaattccaatcaaatgagagttaactctcgtcggctataacaaaatcgatgaaaattaataacagttcctacatgcataaattaactcacgtgggtgcggaagttggggcagggacacgacacgacgagcaagtgacgaacgtcaaggcgaggtgcagc

SEQ ID NO: 101371 - DNA, 566 bp, Zea Mays
aaatgtacctagacctcaaagccagatactggtggagagggatgaagaaggagatagcacagtatgtggcccggtgtgacacctgccagcgaacaaaggccgaacaccaaaagcttgcaggcctactgcaacccctcccagtgcctgaatggaagtgggaggaaataggcatggattttgtaaccggactgccccagacgcaaaaagggaataactccatctgggtaataatcaaccgtctcaccaaggtagcccacttcattccagtaaaaaccacttttggaggagccacccttgcccggatatatcttaaagagatagtcaggctccatggtattcctcggaagatagtgtcagatagagggacgcagttcacctcaaaattttggaagagccttcagcaagctatgggcaccaagttagatttcagcaccgcttatcacccccagtcagatggtcaaacaaaaagagtcaacaaggtcctcgaagatttactaagagcctgtgtgttgacattcgacaggaattgggagtccagtttgccgtatgccgaattctcatataac

SEQ ID NO: 101372 - DNA, 721 bp, Zea Mays
ccactaggcaaaaacttcaaaacaagtgtgatgtggtgacttgaagtgttcttaaccctagaatagggtacttaaccatgggtttggggtatatgggtgaatgtgaggccaaattgagtattacctcaaaagttattggaaattgtcacaagggactaagtttgatgaatttgggtggcacacaaaccctagagtactcaaaaccctaaagagaatcctggaaaccctaatttgtgccgtatatggtgattttgatttctaggcacttttggaccaaaatgcatatatcaaagtggtaaagtatcaaaaactaaaaacttttgcattggaggattttcaagtactgtggaacaatttggacttaattgcaaaagcctcaagagcatccatgtggcttaactctacaaaatcagtgtgcttaggccaagtttggggccttgtatttcttaatccataaagattttgccctaggtcactacaacaagtttgtagaggtactatagggtacaagtttgattaagagactaagcattggtgttgtatgaaaatgggagataaatggacttaaagtcaggatgtcaatcaaccctgaagctgaattttgactggcagtgaaatgggacaaactttgagagcaattttgagtaagatccaatggatgtgttgattaaggttgctataacaaaatcaaagctagtttgtaggagatcaactttgctac

SEQ ID NO: 101373 - DNA, 537 bp, Zea Mays
agtcggcccactacaccctcatagggggcacactgtatagaaggggtgcaacaggagtcttcatgaagtgcatttcctcgactactgggaaacaactattggatgaaatcacgcgggacaatgcggaatacacgcagcgtccagaactctggttgggaaagtcttcaggtctggtttctattggccaacagcaaagagtgacgccactgagttagtccagagatgtgaagcttgccaattcttgtcaaaaaaaacaacatttaccggcacaacagctgcagaccatacctgtaacatggccatttgcatgctggggattggacatgattggacccttcaagaaagctcagggaggctatacccacgtgctggttgccattgacaagttcaccaaatggatagagtacaagcctattggttctttaacttcaaccaaggcagtggagttcatacaagacataatattcaggtttgggataccgaatagcatcataaccgacctgggatccaacttcactagctctaaattctttgatt

SEQ ID NO: 101374 - DNA, 879 bp, Zea Mays
tccaagaaagcagaagtttggattaagtcgacctagctctaagaatacttctcttcaatgtcagagcaccgccgagccaaatctgataaagcagcagaagaagagcgcatgacttagattaaactgagtggtgaaagcgaataaggaaactgtgggctcactaaccaatatttgacgccttcaggtcatctatttgtttttgaagcagcagagggttccactgcatcagagacgaagcttggtcggggacaggagcaccgcaggatctcagttgggcagtacaccaccaagaaaatcctatgatcatggaaagataagcaaaaaagatagtttgccagtaagaatagtaaaaaacaaaagttgactcacctggagattggagaggaataggggaagacccaaagcagcaagagttggtgcattgcttgatgaggggagatcagggggaataatatcaaaggcatgactcggaggaattttgaccccatcagcagacggcaggctcctggcgtctggctcactggcttctaaactgaccagaccagcgagagccatagaaagatgcgtcactgtagcctccttggaccggactgggggcgatccaacgtggacgtccatagaagcagcagagagggaacctgtccaacaccctcggaggctgggtcgttaccagcaccaccctcgggggctgggccttccgcaatagccacctctagggctgaagattcctcagccatgttgataggagctggatgactcggatcagcgctttcgcaagaccgccctctaaggtcgatgaggcacgagaaaccacccgggttacctcttgcccggcagagtcatgcggtagaagaccatcgtctgggacctctgaataga

SEQ ID NO: 101375 - DNA, 525 bp, Zea Mays
ttttggtcataagcatgttgtgggtcctttagcattttttatcagacctaatcaactttaagagaaaaaatgtagaggtgacatacatgagatcttgtccatccatcattgatggtcacttctcatgcttgccataaaatacatcaggttgaacaaaatataattgtatattcgatctcacgcatccactactgatagggcaccatttaaactatatgtggttggagtctcaagaaaaattgagttgacattatgtttcgagcatatttctcaagtttgtacaagtcatatgtactatgttaaccatggtgttggctttatttgagtatcatagtcaactcaacattgtaattctttgcactattagtataaaagtgttgtggcccaaacttatatgtagaacatagttgtttcccaattttgaaatcgggttgttattctgttggtctttgagtacgggtcgatgagaattgggtcaccaagcacgagcacctatgattgcttccttatgggtgttagatttag

SEQ ID NO: 101376 - DNA, 535 bp, Zea Mays
atcaacacaccgggaatggtcagagggagttggggcacggaggcgctggagcgctggaaggaacatagtggcattagtattgatagcaagttccttggttctgagctccaagaggggatcatcatctggcacattgccactgacgtcttcctcgccagaaggcaggccgagatcgagggccgagataaagtgaaggaagtgcaggtactgtccaactacatgatgttcctcctcgtcaagcgacctgacatgctaccgggccttgctcagaacaagctgtaccagtggaccaagacgagcttggccaccaacgtggctaattctgacgacgtcaatcctgccagcgccctatacaagatggagatcactggacatcatgtccagaagtttcgactattgctggcaatcgagttggctaaaacactggtacacaccaagaacgcgctggagctggtctacgaggtctgggccgattttataatctacactgccaaccggtgcagcagggagtcccatgccaagaagctcaacagtg

SEQ ID NO: 101377 - DNA, 400 bp, Zea Mays
aatttaaataagatttcaacgataccttgagaccggttgagcttatcttctctgccagctgatcaacagcaacattacttggggcacatacaagaacctacaaatttgacaaaattagaggtcagacaattctccctaaaccatgtcaaacaagtgaacaacatacttctaataatcccatacctgtccttgaccttgtttggccatgtgatacacaattgcaccagatgtgacagtttttccagtgccaggtggaccttgaatcaaactaactggcttctgcaggacacttttaactgctaaaacctgaatacacaataaataatacagaagacaacatcagatcaaacaatcaataacaacatacacaggccataacagcagcaaatttgcaaagctg

SEQ ID NO: 101378 - DNA, 413 bp, Zea Mays
catcgtattctatacgttctctcccataatcctctctgttgctctattctcccatgcacacaccttccaaaaagaccagaacacatcattagggtagaaaacagaaaacacacatctacttaattgacaaagattcagtataacatgctgagccttatgtccatattgacagaagtaaccgctatccatgacatgtcaacaacaaactgttctcagagagccactggtaataaccagctctacaactataattaacttgctgacataaatcgataaaagatgtggatttcatttttgaatggcaatagcacatattcccctactaaaaaaataaaggctttgtttagaggaaaatggcaatctggcaagaataccaggtggagccttctccacaatcagcgctcaagagcccc

SEQ ID NO: 101379 - DNA, 695 bp, Zea Mays
cttgagttagtgcacaaaaatcaatatggctttatcagaggaaaaagtattcatgattgtttggcctagtgtttcaaattccgctatcaatgtcataaatctagaaaggagattgttgttttaaagcttgaattgacttaagcttttgacatgatggagcattcggtattcctttaagtcatagaggctttgggctccccatcagtttgcaaatgactaatattctttcatcggccacatcatttattttgttcaatggagtccctgggaaacaatttcaatgtaaaagatgggttaggcaaggcagtccctcttatttgttcttgctacaaaagtcctacagtatgctattaataaatcccttgatctcggcatcatccagctacccctcccgcaaagaaattggccttttccaataatccaatatgcagatgataggtcatgtctgttaatgctagacatcttttctatctaaaaggccttcttcatatgttctctaaatccattagcctaagggtgaactttgctaaatccttcctagttctaaatccttacctttcacctaccttggatttcccctcggaaatacaaagaccaggattgatgactttacccccctcatggatagggtggtgaagagattttcttgttgctcctccttcctatcttactccgaaagattagaaattgtcaac

SEQ ID NO: 101380 - DNA, 683 bp, Zea Mays
agtgcttttggcctgttagtagcagccatggtaataactttcatgtccgagtcaaaaccatccatttcagcaattagctggtttagagtttggtccctctcatggttaaaacttctacctctatttccacccacaacatcaaggtcatcaataaaaatgatggatggagcagcttctttggcttccttgaacaattccctgacacgggcaacacctcttccaacgaaagcttcaacaaactcactagcagaaacatagaaaaatggaattctagcctttcctgcaactgcccttgctagaagagtgtttctagttcctggagggccaacaagcaggacacccctaggcaattttgttccaagtttcttggagttcagtgaaccatgcagacagctcactatctcaacaagctcctcctttgcttcatctacaccacgaacatcgccaaagtcaggaatggcagccaagcacttatctcccactcccatgtcctggcaaacatcatttacttggctctcacgaacctgaaggaactgaaatggaatcagaacctcatactcctccatgtagccccaactgagaaacaatactctcttgcttgatactgccacagagccaccaaaaattttgacaaactgactgatgaattcagggtgaaaattagaggacgcagtagtgacaag

SEQ ID NO: 101381 - DNA, 338 bp, Zea Mays
acctatctttcctctctagattgtaaacggatccaaaacaaagtcctaggcatgagtgctttaagctctcttatcgggtcattgataaatgcaaccgaggctgaaccaagaattgcaaagtgaaattcacgagcttgaagttcggacattatgggcactattgaaataatgtgtggtgaatgcgatggttcaagtggtcttgtgagagacccatcccacatatgtgttgaataaacattgtttcgctatgtaatatatttggcaaatggcatgaattaaaacatacagttaataggattatgaagatccgtcatgagatcctaggaggacttatatct

SEQ ID NO: 101382 - DNA, 689 bp, Zea Mays
cggcctgataggtatttattcactgcatctgatttgggtcacggttcagtgttgttgcaccaacttgagcgccctggcttgatcaatccgtgagtatttttgacatagtcattatatcaaaatgaaagaacattgatcaaggtacaattttgatacagattcgtctgcgagcaaccacatgaaattaggagcagtagccacttgaattcgagctggtaggcgcagtgttcaccatggttcagtgaacctcgctggggataagaacgccaccacggctgaggatcggacttgtggccgcagtaaaaatcttccgcgacgtggcgtataaaccatgaggtggcactgtccagttaatcggtgttcactggacgctcgctgcggccctgcccgcgtgggtgagctcaccagcgcaatggaagatctttgaatctcgtccacctccggccatccccatataaattaagcccgagcgctgcttcttcatcgcatcacacacacgagtgcttgcgcaaaccacccaatttcaccgagggactcagttaggccataatctcctcaccgttcttagcaccgcagtgaaggaccccttcatgggcagccctcctcgggtcagtactcacccaattgtctcttgttttagcttgtatttagcctcctattgctctcggtgccggccaattgaattttac

SEQ ID NO: 101383 - DNA, 538 bp, Zea Mays
cagaagcctacgggagcggcttgatcaactaaagcgtgcagcttcatcacacaaaagtatggttacatacatacagcgagggcatcacacattacattggctcaaccttcgggatgatacccatctccctatagttgaacaacattatcctcaattcctcacccgcaaatagacttcgtagctccccctcacccacactcgccccagccagcgaggacaacaattcccgtttgccagtccctttcacacgaagacaaccaccctccatctcaccacgatgacgcctatcacttcacgacaactcacccactctccgtttcgtcaccgcccttcgccgcctacgtccagcactcgcacctggaagatcctcagcacccatcacatgcggagaagtctccgccatagccacatccaatgctgcaaaataattcaagtcctcttccgaagactcctctgtccacacaatcgaactcccagaatcatcagactcaaaacacttagacacagaatcatcagaatcgtcttcagcaaccacgat

SEQ ID NO: 101384 - DNA, 305 bp, Zea Mays
aacggatgccgccagccaccatccgttcgcctgctcgcctcccctaccctcacccgttcaattgctgcaagcactaccgtgacgccgccccatgtctgttctcctcccgtcccactaattaggacgtttcttctcccctccttatctccattaacaagcagttttctccattaatggtgtttgaagtcttccttctctcaatccacatcaattcggcggcgattccctccatcctcgccccctcgcctgcctgtcgtagatacgtccggccgtccctctctctccccactgctgcgacgtcttct

SEQ ID NO: 101385 - DNA, 449 bp, Zea Mays
tgatttgattctttgtaatgattgttgttgtattgtgtgacttttgtccacaatgacaacagtcacctaggttaaaccttagatagttgggttctctctactctttatagtctgtcttagctcaatctcttcgtcccctccttccttgctatatccatatagatgtcagaacttggaatgtcaactacaagcgatgtcactaagtacaaagaatgcattgtgttggcaactcctccagctaagtctcagatggaacaattcaagaaggcgcatgcataatttctgcaagcaacatctcaagtggtagctagactccaataagttgatttagcagaatttatggcacatgagcagactaccgataaccatatgacatcaattacaacatcaccctcaatagttgacttagagaagctattacatgcacaagatatgataatacagaaagc

SEQ ID NO: 101386 - DNA, 404 bp, Zea Mays
aaacattacaggaaccatggggtttactatttttgcttgatagtttatatttcacaaagtctagaaaaattggtttgactaaatttggatgagcatttatcaagttatgtatttatcaagttctctgtagtatttaaaagaaaagtaaattcgaaataggaaaagaaaagcaaatttgcgctgaagtccctgggttttcttcccccttttctctcacaaatcagccctcggtctactattcgcatgagtcactgaccttacgcataaccccctgaacttatcctatatctaacccgcgatccttggctagctgcaacagtaaccggggcaaagatcacggcggtgaggcttaccggcggcagtagagctccggtggggtggtcggtgacgtcggggaggtcacg

SEQ ID NO: 101387 - DNA, 608 bp, Zea Mays
ttgattttgattcctatgctaagtctgaaaacagggttgtaggcccaactttggggctgtgtagctttcaaaatagtgggaattcatggtaggtgaccacatcaaagttaaagaccaatcataggagaacaactttgcttaagaaggaaagcatagttgttaagagaaatattgagataattaagcttgaagttggactgtcaggttattaggtctgaattttcagacagacagtgtaatcactacgactttgagcataaattcaactaggatcaagcaggaatctgttcatggcagctatgacaaacttgtagctggttagtagctctataactttgctgcagagtttggtatgtgttgccatacagatttggaagaaaatcatgttcaaaaaatggtctgtcaggtcaactgcatacactccgatggtacagtagctgaaatggatgagatcgccagcgcactgtcctcaccgccgacgactccctccgctgtaattcgtgctgtcgccgtcagaattcacgctcggggtggatggataacctctcgggtaaaataatctctgccgccggtgagctggaggtcactccggtgactcaccgtcgtct

SEQ ID NO: 101388 - DNA, 546 bp, Zea Mays
gtccaaacctggctagaggaaatggggcgtgggaccatatcaagcctaagtttcctcaaaatcccttcccaaatttctctggacagcacacaggagactaggatgtgatttatggtttcctccgcctggtcacaaaatgggaatgctgcttgatgtggtaaccctcgcctagccaaccgggctgaggactgaaggttagccaagaaagaatgttacctgcttgctagggcggggcagatgaatgctagctgagtgttatgtgtgggttaaggtcgtgtatccctctgtttatagaggtgtaaattggtagttttaggctacgctttaggcttctttcggtttttctgtaacctttagtcctcttcttcttaatataattatacgcacctgcgtgttcgagaaaaaaaatcttgatatactaattggctaaaaaggtgttccaaaatttgtacattgccaatagaagtccaatggatactgatcaattgaactgcaaacatgtgccttgatttgctcatagacattttaacaaaatgtaggttacag

SEQ ID NO: 101389 - DNA, 407 bp, Zea Mays
tggatgggctttactgctatgtcgtaatgccttacggtctgaaaaacgccttgccaacatttgtgcgggtgatgagtaagactttcgaggacctgatcaaggacaaggtggaagtatacgtcgatgacatcatagtcaagaccaagagagggtcgaccctagtggaagacttggccctggtcttcgacaggctgcgggcaacccgcacaaagctgaaccccaacaagtgcgtctttggtgtctccgcaaggaacttgctggggttcctagtttcgtaccggggcattgaggcaaacccggagaaaatcaaggcgattgaagcaatgcgtcctccggcccgtatcaaggacatccagaaacttgcagggtcattagccgcccttagccgcttcatttcgaggctggct

SEQ ID NO: 101390 - DNA, 626 bp, Zea Mays
gccttgtccataacagccccaaaacgtttttgtctctgctaccatggaccaagtctttggagtcatgtcctgactggaccacgtgaacacatgatactgggaccgcgtgaacgcaagaacactaaaattgacatagaaaaattgattatgtcatactccctctattccaaaaaatagggcgcataatttttttcacaaatattaatgcagctctttacgatacttttcttttctctaatgcccctatgctagattaatggacatggtgtatggaatggaaattaattgagaggagggcctgtaatcgttcctggcctgccttaacggacaaaggacaaagcatgcatgagtggaaagaatattgcgtcacgttgtgtgttcagccacataaggaaacatgcatgcacggtaggaaaataatcatacatgcaattaggctcccaccacttactaaaataatgcaaggcgcccagcatccaggtagaagggtaagtgcgtctagaataggatacaaatactaatacgccttgttttttgagacaaaatccaaaactttatacgccctattttttgggatggagggagtatatattataaccccaatatttccccttcatataggtgag

SEQ ID NO: 101391 - DNA, 344 bp, Zea Mays
ctcttcatcagttcgacactcaggctacaacagttgatgatgatgatgatgatgatgattttggggttcctcctccgcctcctatgcctccatgctcacatgatcatgaggctgggagttctagtgctgcctctgctacccctcagcctatggaccctgctcttgcttcgattctccagtctatcactcagcagtaggctcacctggcagccgagcaggcccggttatccgagaggatgctctcgatgtttcagaacatgcaggacaggcaggatgcgcttcagcagcagctacttcaggatcgggctgagagtagggcattcatggctcttatgctacagcag

SEQ ID NO: 101392 - DNA, 534 bp, Zea Mays
ataaaggcatgatgcctgcgcagctacccttaaccgcgcagagaacaaccccaggggtatctcgtgagcagttaaggtggcgttcccggaggcaacgtcgtcggacccagaaggcacgggacccctgtacgcacaacccggacccccgaagtaaagcagcccggagcccttcggatagggttcgaaccccaccaagtaagctccggaccacccgtaacaaagaacccgggaggggaagtgtcgtgacctaggcatgggttcggtattgacgcgtgtctaggctctatccagagcacctccactccccactcggccaagggtctaatactgccacatggcttattgtccgtgacgtaggccggcgggtggtgcatgatgtgagggctctgggccgcgcgatctccgcatttattgcggagaggacgcgccgcctatccgcccttctaacgggcgatgtgcccccacaacatttattgtgtcctgtccattccactggcagacggcgccagggccacctgcagacagtgcacctgt

SEQ ID NO: 101393 - DNA, 449 bp, Zea Mays
aaggaaaattgctaagtatatatctgaatgtgacacctgctagagagtcaaggccagccatttgaaggtagcaggccctttgcaaccccttcccataccatcttggaaatgggaggacatttgcatggattttatcgtgggattgcccaatacctcccgacaccatgattccatttgggtcattgtggacagattgaccaagacagctcatttcttgccagtacacaccacccataggatggagaagtatgcagaaatctacattgaccagatagttcgcttgcatgggataccacgaactatagtgtcggacagaggagcaccattcgtggcacgattttgggagcaattgcaggagtcacttggaacccatgtaatcagaagctcagcgtaccatccgcaaacagatggccaaacagaaagagtaaatcagattttggaagacatgt

SEQ ID NO: 101394 - DNA, 613 bp, Zea Mays
tgccaatctttccaagtctgcaaccatagtccgagataactcttttgcacaaagctgatggaagaaatagctcaactctgaaagcgctagccagacatgctcagggacataacctcgaaccatcacaggaagaatccgttcaatccatatgtggaagtcatgactcttcatccctaagactcgcagagtagataagttcaccccctacccaggttagctacatacccatcaaggaacatcaacatcttgatccactgaagtacttccttcctctgggccctgcttaggacaaaattggccttaggccttctccatgtctttccaccacttggcggcttcatctcttggtttggtctatcacataacgctgccagatccactcttgcctttatgttatcctttgacttatcaggaatgtccataattgttgcccaaagtgcctcggcaacattctttttagtgtgcatcgcgtcaatgttgtgtggaaggagcaggtcgtcataataggggagccgagtcaagcccgacttatgtgtccacatatgctgctcaccatatcccataaaaccaccttctgtattggccacgagcccatctatctgttgatgaattt

SEQ ID NO: 101395 - DNA, 523 bp, Zea Mays
gcaaaatttccattgtccctagtaattccttagaccatcaagtcaacgttggccaacaacagccacaaagttgacaataggtagctccacctccacatctctcgccttctcgtggggcatcgacaactccatctgcacacctccatggcatgtcggcgacatcgcagtggctccattgctataccgcccctacacatgagtatacgttcacgtccacacacctagtcccccactgccacccgtcaccaccgccaacaattaggggcggatttaggccttgggccatagctcggggcctggtccatgtaactaaagtaggcataccatctttattgggccttttctcttatttgctggcagctggcgccctcccgctctcccacagtcttcattcctcgccttaagccccgccgccactcgccaatttgctagacgccaagtatctcatcgtcggcctatcgcaggacggttgcctcaccacgactcccatcgctgctccctccactgctctctccgagctccg

SEQ ID NO: 101396 - DNA, 643 bp, Zea Mays
tttcgaaatggcgaatgcggcccaaaaattacggggtaaaaatctcgcgcgtcccatcatgatcggattctgactcggacagaatttagcgtaaaacatgaaccaaaacagcgtaaatgattacgaattttagcgtaaatcgtagatctgtatcgaaacggcgaatgcggcccgaaaattacggcgtaaaaatctcacgcgtcccatcgtgatcgggttctgactcggacagattttagcgtaaaacatgaaccaaaacagcgtaaatgattacgaattttagcgtaaatcgtatatctatttcgtaacggcgaatgggtctcggaaattacggcgtgaaaatctcgcacgtcgtacacaggttctgactcgggtagatttcagcgtaaaacatgaaacaaaatagcataaatcatcgatctgtttcgtaacgacgaatggggcctaaattactgtgtgaaaatcgcacgcgtacgatcatgcgcaagttttggcttgggtggatttaagcataaaatgtgaactgaaatagcgtaaatgaatacgaaatttacgtaaattatcgatctgctttgtaacggcgaatgtgacacttgctttttagtggaagcgtaaaacacaacaaaaagtatcgtaaaatttt

SEQ ID NO: 101397 - DNA, 535 bp, Zea Mays
gagcccaaacatgggaaaacttcaaaactcataagaaatggtcataaaatatcaccattaatgaacttgagtaacatccaaaccctagaagtgccaaaaaaccctaaagagaccattggaaaaccctggactgaaaccctagggggttatctgtaaattttgcacacttttggacctaagtgcaaaaaccatggaattagggtaccttaagtcatatggttcacatgtttgaggatttgcaaatcaaaccatgagatttggacttatttgcaaaatgcaccacttaaaccctattgggttaagtctgaaattcagtgaacttagggcatctttggagccttatatcttgtaatccatgaataattttccctaggtcaatacatcaagattatagagctactataggagcctaactttgtttaagtgattaagcattgttgttacacaaaaagtgaagataattagccctaaagctaggatgtcagactaaaactccctgatattcagtaaagacagtagattggatcaactttgg

SEQ ID NO: 101398 - DNA, 297 bp, Zea Mays
gtcacatatcatatattcagttttagttccactgaatctaaaacctttggattccagagtattccgccataatttcattttattatttactcatgcccgactttcatcgactagcactacatcgtccataaaaagcatgcaccaagggatgtcctattgtatgtcccttgtgaagtgtgaactcatccatcaccaaggcaaaaaaggtaaaagtaaaggctcaaagctgacttttgatgtagtcctattctaacgaagaagtcatttgtgtctctgtcacttgttcgaacactagtt

SEQ ID NO: 101399 - DNA, 306 bp, Zea Mays
gccgatactctttgatagagtaccgacaaccttcgcaccggtttgatctcgtatgcagcctaacccttcatcatcaataccaccgaagagaagtgcccccggccggtacccgcaagatatagcatactcttttaattcttctttttcagcttccattagcttctggacaactaagtttcggaagtcaaaagtttcatcttccgaagtatcttcggttattccttctttctcgggttttgcggccgtggtctcttcggtggctgcagcagtttcttcagcggccatgtttagcagcattttatctat

SEQ ID NO: 101400 - DNA, 295 bp, Zea Mays
tccatgaatacactgttcatcaagttcatgaagaaggctgatgcattggttagaccgaaagacatcaccgtgaactcatacaacccatacttggtaatgaatgccgtcttcataatgtctgaaggtcggatcctgagctgatgataacctgacctcagatctatcttggagaacacgctggctcctctcaactggtcgaacaagtcttttattttgggcaaggggtacttgttcttgatggtgacctcattcagagctcgataatcgatacacatccttctggtgccatctttct

SEQ ID NO: 101401 - DNA, 299 bp, Zea Mays
agaattgtttgaagacttttttaacaacatagtttgagctatatcatatcataaagattcaatcaagagagaatttagtatattccttaggttttttatagattttataaaataatttcagttacatagtttgagttgtattgatattgagaaatgatgtgaaataatgtctacctgaatagatatttctacaagatacctctcgaaatgaattcaaatttaggatctaaatggaccctaatttatgtgtgatcttattgggaacaacaacacgaggtacaacaggtacgactaaaacc

SEQ ID NO: 101402 - DNA, 682 bp, Zea Mays
ctcatctagcatgttaagcaataaacgggccacctctgggtccggacgatcatggacgtcaacctcattctcaaacatgcccaacctattttatacctcgtgttcagtgtcgtatatgtaaagctgcgcaaactgtggtcgcaatccatggctgggtagcagcgagccaatgcgatggtgtacgacaccattgattttgaaaacataaggtgttgtaccgttatttatcgatctatcaatgacggcacccagtgaggtaaacgcgaaaagggaattgtatgagcgaatttgcctaaggaaccttctggcacgattatcaccatcgaatcgcaataggtcacataagggaggcggtggacatttgtaaggctccagaacaatcttacctcctccacaacaaagattgtacacaagcctgcgctgcgcaacagcagacacgcttttgacccgttcctgaaactagaaaacggcgccacaatgtgggcactcgtctgatgggccaccatagtatgagctatctttgtaggtctctacatgcaaagatgggtccaggctgcatggattactttaggaatacgtacataaaataatctaggcaggtggaacataagcacctttaagcaactcgacatatgattgttcaagaggcggcaaggctgcatccgtgctaactataagcagc

SEQ ID NO: 101403 - DNA, 628 bp, Zea Mays
tgatcgtagtattgctttggagcgtgttacaattggtgtgcttgtgtgtgagaaagggggagggccttcccttttatatttcaagggaggaaccttacagaggagtcctgcttttgacaagaaagaggagagagagggagatctgcttccctaggtcggcgtggtcggtcttctataaggtcgtgtgtggtcgtacccctagtttgccgccatccatcatgctggtaccagtagcaagtccattgttgatgtcctagcggtggtgcgtggcgtggcagatctcgcgagtcagtctcatggcacggctgtacgaggcgtggcttcgcttgtcgtcatgagcctcgtgtcaccttccactgtacgcggacacatacgcttggtatgttgcgttgtcccatattttccgatatacaaatcactattgagactccggtgctgaggtcttccatgactgaggttggccgaccccacatggtagtgtgggttcacctgaactgtttgcaagggtgtacagtcatgctagcagtgacgccttggtgcccattttgtatgttgtgcgtgtgtccggatgcggcctggtgatgaagcatcttgtcacaactaacgtgagctcatagcactggatttg

SEQ ID NO: 101404 - DNA, 900 bp, Zea Mays
cgagtttcgatgaactcgttcatttccaaggaccattcacgcaaagttgcaaatattacaataaccagtcaagaacataaactttaaaaacaagagtggagcggaagtctttacaataagataatatacattaacaagctaataagtttacaaaccacgaagtatttcgctttataagccacagctccacaccgtgctagtatttcaaaagggccaacataacgtggtgccaattttcccttaatgccaaaacgatttactcctttcataggtgaaaccttcagatacacaaaatcgcccacttggaaaaataagggtcgtcttcgttggtccgcataacgtttgtgatggtgttgtgcaacctttaaacggtgttgaataagtttcactttttctcccacctcttttactaattctagcccaaagaaaagccgttcaccgggccctgaccagttgattggagttctacaccgctgcccataaagagcctcaaaaggtgcaatctggatactctcttggtaactattattgtaggagaatttagccaacgacaagcactcatcccatttttccgaataaactaatacacatgctcgcaacatatcttccaagatctgatttaccctttcggtttgcccactagtttggggatgataagccaaactatgaattagcatagtaccaagagacttgtggaattcctcccaaaatcttgaaacgaactgaggtcctcgatcagacactatggtcttaggcacaccatgcaaactcataatccgagcaatatatagttcaacataagtctttgttggatacaaagttctcaccggcaagaaatgtgcgaccttagtaaaacagtccacaattacccaaatagagtcataaccctttgatgttttg

SEQ ID NO: 101405 - DNA, 282 bp, Zea Mays
gttgaagttggactgctgaaagagaggggtctgactgctaaagccgtggttactgattttgtttttaagaatattcagccgttgaaggacagggcatacccagcttatatgtatcgaggcctagccgactcaactcgggttaccaacagaaaaattccctctgcagacttggtgagccgacttgagatgatccttagaggcaaagtgtcaaatgttggtgctccagtggcatactcggcctggaacctgcctcctcccaaagctttcaccctttttgtgtca

SEQ ID NO: 101406 - DNA, 372 bp, Zea Mays
catcctatcgagccaacttattagtaacatgtgttaacacagaagttctgcaacattatcatgaggttgtacaaacattacaacttccttctaagttctatttacatctcaacaattttacttccatgataaaaataataaagacgacggcatcaggttaacaataattcagggggaaaaaacactactagcacaaaaatgagtatttcataaaacaacagtgaaaggtgtaatatgtagcaaattaaaaattcagaaacaccagacattggacacgttaaatttcttgccatctaacgagacaggtctccgtatctaagctctgatactggcatgtagatcaatcttcacaaacctaaaaatggctacaag

SEQ ID NO: 101407 - DNA, 793 bp, Zea Mays
gtgcaacaagaaaacaggcttggggcaaaataatcatagaggtgcacagaacactggcgtttctgtttatgtgctactctttttttcttcttctttctttttttttcttgcgattttttttcaatttttttttatatttttctcttttgcagcagcacataagaagaaaacacaccaagtttcagattttttgtgcaatgatgcgtcctctggaatttctacaagtttgccctaaaatcggaataaatgtttggaaaatgagaagtcctatttccaagccgaatttgggaattttaaaattagcgaattcggcaaagccggaaagaatcaactgcaaaatttaattctgtgcgatttggaaaaatgggctcgattcgagttctgaggcgaaagttacggctgttttaagtttggacttcaaatcagggtttctggcgaggtgttggaagggtgggggttcggttttgtggatagggttggttttagagataggatttattttgtggatagggtcggttgtagagataagatctattttgtggatagggttggttttagagataggatttgttttgtggatatggtcggttttagagataggatctgttttgtggatagggtcggttttagagataggatctgttttgtggataaggtcggttttagagataggatctgttttgtagatagggttggttttgtaggatggaagcggatggatagaatcaaactgaaccaaaacaaatctaaaccagcaaccaaactcaactagaacacgaactcagaactgcag

SEQ ID NO: 101408 - DNA, 498 bp, Zea Mays
atttatgtataaaaataattagaaggactcatattttaaattttgttctaggcctataaaatatcaggaccgctactggacccatggtgtcatcaacttaggagtagtatgtatggtttattgttagcttccaacttttcttggatttaacactccaaagttgtgtcaaaccttagccaaaactcgacaaatggcaatttctattggatgaaacgattagaaattcaatttacactctctgagcatgatgtagtccaaaaagtgcccacaaaaggtatgttcataaattatgctggaatccatgatcatcatgtagggagctcacaaacacccctcatgtctttctaccactctcatcctttaaaggtggatgttaaattgttaattactaatcttcatatggtaaccctagttgctgaggtctaataaatagaatataatcaactatagcttttgagtatttcataaagttgtgttatacttgttgagtatgttggt

SEQ ID NO: 101409 - DNA, 488 bp, Zea Mays
aaaatgagaggcataaacataagatttgaatgtgacatggaatattgaattaaatagaactcgaagtagggatattgcactaaattaaaaatttacaggtggggaacacctgtagtaaaatattctccctcttcacttcttctatctgagaaagaatattttgctgagcttcttgatccttggatgataaatctagctgatgttggagcgaggaaattttcttgcaactatttttattttcttcatttgatgcctctaattctgatttcacggattccaatattttgagaagcttggatatctccaatgccttcgactcttcagcagcaagctgtgtacacacacacacacacacacataattactggtactgtaacaaacatcaattaatatacaaaaaaattgagtgctcaactgggatgttgagaagtatggagaaaacatatcgatgatgttaaactactttagatgcattgctgctaattgtt

SEQ ID NO: 101410 - DNA, 1180 bp, Zea Mays
gacgacaagaatgcagctgagcacatcgcaaggcaatcggctcactatacactcattggggaaacactatacagaaggggtgcatcgggagtcctcatgaaatgcattctctcagctactggaaagcaacttctggacgaggtccatgctgggcagtgtggagtgcacgcagcatccagaaccctggttgggaaggtcttcaggtcaggtttctattggccaacagcgaagagtgacgcagccgagttagtccagaggtgcgaagcctgccagtacctgtcaaaacagcagcatctaacagcatagcaactgcaaacgatacccataacttggccgttcgcatgttggggactggatatgattggacctttcaagaaagctcagggaggatacactcatgtgctggtggctatcgacaaattcactaaatggatagagttcaaacccattgcttccttaacttcagccaaggtagtgttcatacaagacaaaatattcagattcagaataccgaatagtatcataactgacttgggatccaacttcacaagttcagagttctttgatttctgtgagcagaaaagcattcagatcaaatatgcttcggtggcacacccaagagccaacgggcaggttgaaagagctaacagggtgatattggaggccctcaggaaaaaagtcttcgataaaaatgaaaagtttgcagggaaatggataagggagttgccctatgtcgtttggagcttaagaactcaacccagtcgagctctgcatggaaatacccctttcttcatggtctatggttcagaggccgtgctacctgctgatcttaagtttggggcgccaaggttgatctttgaaaacatagcagaagccgaggctactaggctggaggatgttgatatactcgaagaagaacggctgaacacggtaattcaatcagcacggtaccagcaaaccctgaggcgctatcacgataagaccatgaaacatcgatccttcgcagtaggagatctcgtcctctgccgaattctaacgggagaggggcggcacaagttgtcacctctatgggaaggaccattcatagtagcagaaatcactcggccgggatcatatcgtctcactcagatggatggcacagaaatcgagaactcatggaacatagaacacctcaggaagt

SEQ ID NO: 101411 - DNA, 325 bp, Zea Mays
tattgagcttgggagcttgtatgaacttgtgagtctgagagtctgagtgtgtctgccttgtattgttgcgtacctccccttttatagctcaagggggcacgtacaggagtgctgagccccgacatgcgggcccaggaacataacagatgtaatacttggagcaactaatgccagtcgccggtgcaatctccttgtgccctgatatccgtggcctgcgtagcattggtgtgcaacggaagcttccctggctacgtacgagtgatgatgagcacagcgtatgccgcagcacgggcgtactgcatgccaccggaacggacgggcacgc

SEQ ID NO: 101412 - DNA, 658 bp, Zea Mays
cgtgcatgtgcgcaggccatctgtttgcattagcgcaacagaaagggggggggggggggggggggggggggtaaaataacagtattacgcaccaaaaggacgaaagaaaagatcaaaggtcgtcccagaacagatcagagcctcaagtaaagcgagggcctgtttcggatgcatggccagcccaggttgcttgggatggctaatcaggctgtgatcattcttttggctgcaaaagtaacggaacgcaacgcagtctgtgctgtgttcattgtcttccaaccggccagcgtgctgctccactctgctttcatgtttgcctccattaagagcgactgaatatctgtataagttgcgcgtacatccagctgcctggagaggaaagcgaagcctacactaacgagtaagtctcacgtgtttgcactttgcaggatgtaattggatacctttatctggaggacgcccattggatgtctcgtttggcatgtgaatgtggggtttaaagcttcaaaacttgtaccagatctcatgaaaaatattgcagagtttagatatataataataataaagtacaaaagtcgaacaaacatgcctctttttgcaaatgaaaatgcggttggtagcctgatctcaactactgccacaggcactaccaaaagcc

SEQ ID NO: 101413 - DNA, 356 bp, Zea Mays
gtcaaatcgtttggcattgtcgactattaattcgaaggggactccaaatcgacaaacaatattctgcgagaagaacttttgtgttgtcttcgatgttattgttgacacaactctggcttcgatccacttggtgaaatattcgactactgaaaggatcacgatgcccaagagggggtgaattgggcttttcaaaaaatcaacaataattaaaccctaagcaagagcccaaattcacccccaataactagcaataagagaataatactagaaattcaacaatgctaagacaatacttcaactacttgctaaacaaatgcacaaggtaaagtacttgaattaagtgcggaatgtgaagc

SEQ ID NO: 101414 - DNA, 1701 bp, Zea Mays
ccagatgacttccatggagccgggatcctcgtctgccaccatcgatgccgtcgtgactccccagccgccaaggtgatgcgtacttcattcgcatttgcaggtttcgagagcaatttgttatgtcacgtgctagcagatcgcaaacgtgctgaattcagaggttactgctgcgtggatcactagtatagttgctgcaaattagtgtgtgcattgtctaggaattgcattgttttgcacatgggctgttgaagggagcaattggagagtagctgtggactgttgagcatactcaatctattggaagtatcggaagttaagattttaggttgacttccctggatgctaggaaacactgaaacttctattttgggccttgggttgcttcttcctatttaaatctgtgggcatcgggatcaagtctgtgagaccatgtctgtcacatctgttttatgggagcgcctgcagctgcaatgctaccattgttgaaaccagtagaaaacagattgtcaagcaactataggcttgttgatgtagatttgacttttgtggctagactgtttgatgccagtttgtgatacttgaaagggaatacggttttgtccatgtattgattttacttcttgtgcgtggtatggcttgccacatggcatatacccttaaccttctttgctttgaacaactttgaagaaatggctatcattgtacatgatctttaccttttcttattttttttgtccttttcttttgaaaatcataagtacaagagaatttagtagaaaacaggttgccgaggtgctagaagtatggactcacactcttttatgtttgatataggaacctgaagcctgatgctaatctaactattgatccaagtatgcgggaaggttctcctgatgatcatgttacatccagtggatctcaaggggattcaaagctagaactctttggttttgattctcttgtaaatatattgggtcttaagaggtagggtcaatcattctattttcttactgttgttaacttgactaaaactttatgtttttttttaccatgaagctgagttttaccagtgtttagcatatgcaccctgaagatcgtttgaactgttgattcgacttcatgacatcatcatcttattgaacctgagcagcatgacaggagagcaggttcaggccccttcaagtcctagggatggcgaggatgttgcaattaccattggccggcccaaggttttcttccatttcaacattttctgacacctgtttgaagattcctcactctccttttagaaaaagatgaaaattaagagttagcgactatatcgatcttaaagtttgttcggtgtatgtttctgtctctcgtgaagtttaggatgagaagttgactcgtttcaatacccttacattgttttctgcatgtgaatattcacttaatcagagatagctgggttgctcattttagttttgtttggaatgtcatttggttcatgcatgtctgatcttctgtggttgttaagttttaacttcactcattcttgttggttttagtgactagaagattctattccattttgacttatgaaattgtagaagtgatatacttatatcattgatgagtttactttattttttggacagcaaagtggacctaagttcggcaccatgatgggtgtctttgttccatgcttgcagaatatcttgg

SEQ ID NO: 101415 - DNA, 948 bp, Zea Mays
aggctattggaaaagagaagtatcacaacaactttggttgttacagtttcgtgcctcggtttgaggcgagctacccagttcccacatttcggaagaggtgaccgggctcctggatgcaggaatggttttacgtgaagaatgacctaagtcaaagggaggatgtgagagggattattcaacgccctatatggtctcgcttcggcattaagaggccagccgctgcccttaggaatgatatacaaacatgacaggcatctttcaatacggtatgtacttacataggcacaagagacttggtccaggagcacactacttacagagtgtggtcacttgcaaatgggtgggaaatgtcgaaggaggctgttgctggctctagccaaggtggtttagtctacctgaagtataccttcaggtacaggagccaattgatgaaccgaatgatgactagctaaatgccatagaagcgactagtgacgagctgcttggagcatattcaaaggccaaagatgaagccatgacaactgccttcggggcttgtggcaaaaagagattaaatagagtgttcgaagttatcgggtttgtgtactcggactactgttatccttcacagaaacaagggaaaaagaggaaagctgctacctcggcgacttctagtgcgtcggggtcaaaaaaggttaaagttttgacacgtcggccaagacgcattgaaacgcccgacgtgccgaagctaaatgagggagtcgttcctattgcagagccaagtcgctctgtgtcagtcgaagctagaacaagaccggctgaagagccgaaactggagaaggcggcaaagcagttaaaagcactgagtccaccatgcacaacagaactgccgaagccctcaagcatccccgcaataactccaaggaaaagaagaatggccagcgtgctagatgctgttatggaatctgt

SEQ ID NO: 101416 - DNA, 339 bp, Zea Mays
taggaattggacggcaattttagtggcgttagaggtttttttttcgtttttagtctgtgttgtaccggagcagcggagacaccactttgggagcacattattagttacttggcttttgctgttagcacttagaatttgtagtgttgtgcaattcaggtatggagcactttggaacctagaattcttttcaccctttaggtctctactgcccaaaacctgtattattattctattgtgactgctaaaccaagtatcccagtatgttcagtgggagcagattggattatttgtttttgggtgcatactattaattatttaagttggttgcaaggacacaat

SEQ ID NO: 101417 - DNA, 358 bp, Zea Mays
tgaaggccaaagaactgggcgaaactaattctcagagagcgaagatgaacaaacacccccatcgcctagggtcaaccggatatcaccataaagttgtgcagtggaacaggataatcgaggaagctatagctaacggcactttggacccaatattaaaagatatcgatgagcgagctattcattggatcttaggtcgggcaggtttgagtgaggacagcaaacttttgcatccagaattggtaggcaaagtttcgacaaaaattcaagaatatgcatataagagaaaaaaaggagaatttaagcctcggagggagaatgacatactaactgcagcactaggcaatcctgaacacactgg

SEQ ID NO: 101418 - DNA, 935 bp, Zea Mays
gtttcttccacctttggctcttcgaccgtatcatccttagcttcggctgacccgattgtaggcacctttggcaatacaatggactcttcaacgctctacacgatggaaacagcttgttttgcttcggcagttgaagaggtcccttcgctaaattcaggcactatggctggttcaatatatcgcggtcggtgggtcagaaccttcattttcttgcccttcggcacagcagtagtagccgaagcaacaatttttctcttcttcccttgccttcacaacgggtagtgataatcagggtatacgaagctgattgcatcgaataccctgttcaatcttttcttcccctggcccccgaaggctgcaaacaaggcatcatcttcggccttggaatatgtcccaagtagctcgtcgctggtagcttcaatgcatttcaaccagtcatcatttggttcatcaaacttctctctaaatctgaaggtatacttcaatcgaactaagccattttcactggattcggcagtagtctccttcggcatatcctagctctccacaagtggccacaccctataggctatgtgctcttggactatatctcttgtaccaatgaaggcgcaaacattgctaaatgccttctggcatgcttcaacgtcactttcaatagccaccttcggccttcgaaggctgaagcgagaccagatggggtgctggataatttccttgatgtcttcccttttaattagatcatttttaacataaaaccactcctccatctaggccccgggccaccttttctagtacgttggcaccgggtaacttgcattagagcgggcaatgaacccgtaacaaccgaagttgttgtggtattgttctttgccggtagccttcgtctcgtataaaagctcgtgcatattgcagaagcactttgcgctcagctccag

SEQ ID NO: 101419 - DNA, 761 bp, Zea Mays
ggcagtgctacctgctgatctcaacttcagggcaccgaggttaatctttgaaaacatagcagaagctgaagctactaggctggaggatgttgatgtactcgaagaagagcgactgaatacggtgattcaatcagcacggtatcagcaaactctgagacactatcatgataaggccatacggcatcaatccttcacagtgggagatctcgtcctccgccgaattctaacggtggagggatggcacaaattgtcacctctatgggaaggaccattcatagtagcagaagtcactcgactgagatcatatcgtctcactcagatggacggcacggaaattgggaactcatggaacatagaacacctcaggaagttttacttctagctacatcccagaagctattgggacgacgatgtattctgtaaattgagaaatatatcatcaataaaaaggcttcaaaggcactcaaattgttcgctgtcaattggcatacttactcaactcggggtgaccactatgccctactaacggaggaatcggcttaagtcggcgatgacttaaggcggtacgacatgctcacgcttactaaactcggggtgaccactatgccctactaacggagcaatcggcttaagtcggcaatgacttaaggcggtgcgacatgctcacgcttactaaacttggggtgaccactatgccctactaacggagcaatcggcttaagtcggcaatgacttaaggtggtgcgacatgctcacgctta

SEQ ID NO: 101420 - DNA, 647 bp, Zea Mays
aaaggtacagatcctcaagcgaactcaagaacccggcggacagacaccaagaaactggacaattcagagaggctaggtatccccgcacagccctcaaggatcaggaaaaccctaagctctagcacaagcaacatataatcgagagaagaccagccaatcattggggtcataacagcacccatgggaacgaaaaaggatcggttgcacccaccgagagaacaaaagcctagattttcaaattggtttctaagacacattttatttgtattagagaccaaaaggaagtcgaaaggagcttttgctagcttctgtgggatccaaaaagtcaatgcacaagatatcccatagaagccagtatttcaaatcaaaggcctagacaaacaggactgggtgtattttctaaaggtagacagcagtcaccatctgtctcctcacaccaactgcgtatatcggcaaaagggcacattaggttgcaaagtaatgatctggagatcgagtgttgcaaactttagccaagtctggtgaaaattaggttcagttcagagcataataggtccatggcagtacaggtgcaacataaatgtgccacatctgttttggcactgcagctaagaccgttgcaacaataggaatggaagcgtaagagt

SEQ ID NO: 101421 - DNA, 322 bp, Zea Mays
ggagttcagtgcggaaggagacggcggcacatcggcagagtggcatggcagcgcacgagtccgaatcacattttacacggccaggtcactgtccctggctcttgcttgtccgtaatgcgctcgccccggcaaccctgtcgcgttaaacccataagctaatcctgtcatgtcccgggatccccccatcactttcagaaaaggcccgattcaaacctaccttcctgccgtgttcccttggtcacgagcgcgctctatatatcggcttggtttcctctggatggccggccacttgacctgaccaccaccagcaacagcaccacgc

SEQ ID NO: 101422 - DNA, 334 bp, Zea Mays
caattgtgttgctttgttcttggtatttagcatatgagaacaagggccaacaactagtatgtttggaaccagtctaatttttataaaccagtttcttccaaacatgccctaagtagattgtgtctcttataatgaaatctagaattttgtaatctatactataaaaatattttttgttgtggcttctcccgcaaaaaaggttagagctttaccaaacaatatttattaagacgtcttctttcgaaacgcgccaacaaaagtgcaagctgttatatattatggaggaaaactacaaatcctatcttcattgactttagctccttgtctagggaac

SEQ ID NO: 101423 - DNA, 364 bp, Zea Mays
ttaagtcatcgccgacttaagccgattgctccattagcagggtatagtggtcaccctaagtcaggcaagcgtgctgattttgagtccagcccaatcgaagttagctatgagtcaagagtctgaatgcttttggagaatgaaaactttattgatgatgaaatcctcggatttacaggttacaatgttccttcaagaatgttgaggcctcgctaaggatagaattttctgaggtgttctatgttccacgagttccccacttccgtgtcgtccatctgagtaagctggtatgatgatcccgatcgtatgacctctgatacaatgaacagtccttcccatagtggtgataacttgtgctacccttccc

SEQ ID NO: 101424 - DNA, 999 bp, Zea Mays
cattagccaatggctcaaagaaattgacgaccatgtcaacatttttccaaaagccttctgatctcaccactttgttggctttcttgcccttcgcctttttcaagtaacccaactcattgagctcatctgatctaaagagccttgagatatccttcttgttatcttgtaagctttttaaattcaaatacgcagtggcaaaacgagtcactccagaatgaaccaaatctttccccaaaaatttcctcatcaaatctaacactcttgtatgagcatataagaaggcagtcacatgttttgcactagaaattgtttcctcaaacagctccaatttttgcaaggtcctcaagcactgtggacaactaaattcattacccctcgaccctttctatctgtccatgcatctgtcataattgtacaacctgtgagttgccatgactcttggtggctcttaaatctatccaacaccttttctttgcattttttcaagaatggtccgctcatctcataggaactaggacctctcaaacctctaccaaatgctccaattgcctcaaccatatgagcaaagctaggaagggtgactgtgttatgtgcaataccagcttcataaaagaattgacatatatactcacaagctctatccctcctctcctctcttttctgagttgtcaattgtgtttgaattttttggctagtgcttaatcctcttttgttcttttggacagattcttcaattgactcaggtttgtagaatttatcaatagtgccaccagttgttgctaatctagagctactgccaccttttgttgacttgaacacaataacatcattcccatgttcactctcttcttcacttgaattatcacctcctgaattatcaagatcaatttcatctctttccctttgtttttcctttctttttttctcctttgcatcacagttctttgtaagcaaagccaccatgtcttctttaacaggagttggcactttcttgcactt

SEQ ID NO: 101425 - DNA, 542 bp, Zea Mays
cacatatggttggagtttcatgtagacccagtcatcaatagcaaaggagcgttcagacctgtgtttgtccgcttggcgctgcatgcgagcctgagcacgcaagaggtgctgatggatgaggtcctgcatgtgggagcgctcctggagccagtccgaaatagactctgggatggcactgtctgaagaaatgcccaaggatcttggttgacgaccgtagagaacctcaaaaggtgaacatcctaagagtgtaggcttgtgttgtaccaatattcagccgctggtagccaatcaatccatttctttgggcaagcgttgacaaaacagcgaagaaatgtctctaagcattggtttacccgtttggtttgcccgtcggtttgcgggtgatatgaagaactcaatttcagctcagcaccaacagacttgaataggtgttgccaaaatgtgcttgtaaacaccgggcccgatctaaaatgattgccactggaaacccatggagtttgtagacatgattcataaacagcttggcaactgaactggcagtg

SEQ ID NO: 101426 - DNA, 647 bp, Zea Mays
gcctttcgggatccaaatccttacagtttgatggcctccttaatgggtgacatatttagctgttggtgcattttgggagtactaattctttcatcagtaacactttggctgctcaattacctggtcttctgcccttacctgtgccagcgaccgtcaaagttgctaatggggccatgttactgtgcacgtcttatataccagattgatcttggttggttgcttcattcacctttcaacatgatttgaaggtgttggatctacctgttgttgacattgttttaggcatggactggttggaacttcacagcccaatgaaaatcaattggggacacaagtggatgtctttccctaacaaaggtcaaatcatttccttacatggagttgatacagtacccacaagcaacgtgtttgtgaagttaattactctctatcgagcacactgttgtttccccatatgctcaatctgaacaccctcctgacattgcttccttgtctaaatttgcacacttgtttcaggggcctagtgtccttcctccttctaggccttgttaccacaccattccaatagttcctggtgcccatccagtcaatatacgttcgtaccactatccaccagccttaaaagttgaaatagagagacaagtcac

SEQ ID NO: 101427 - DNA, 434 bp, Zea Mays
tctatcgcgaagactatccgcgcagaagtcgcctaagggtgcagccggacttagcacaacaagtgcgcaagaatcgaagtctatcgcgaagactaaccgcgcagaagtcgcccaagggtgcagccggacttagctccacaagtgcgcaaaaatcaaagtctatcgcgaaggcttttcgcgcagaagtcgcctaaaaggcgcagccgacccgctaaaaccgcccaagggcgcagccgacccagtatgacaaaggcagaagcgacagcaagaccaattataatcacactggcacagcacaatcaatcacgccagtcaaagtacacagcgccctcgcaggcacaagcacgcgagggcaccccactccattttacaaacccctgaacatacacaagcgagggcaccacgccctacatcggctcaaccttaggaataat

SEQ ID NO: 101428 - DNA, 829 bp, Zea Mays
ccaaggtttggatcgttcgctccgactgaccatcagtctaagggtgaaacgcgacactaagcgaaagcttggtacccaacgcactgtgaaggctctcccaaaatttggatacaaatttggagtctcgatcagaaacaatggacttaggcaccccgtggagcctaattacttccttcatatacaagggaaccaattctgaagctgaattggtggtcttcatgggaataaagtgcgcagacttagtcaagtgatccactaccacccaaatagcattcctgccccgaggagaacgaggtaagcccaccacaaaatccatggtgatatgctcccacttccactctggaatttccaatggcttcagcaaacctgcgggcctcttatgctcggccttcacgcgctgacatacttcacaggcgaccacatacttagaaacatcaaccttcatccgcttccaccagaagttttgcttcagatctcggtacattttggtttcgccagggtgaacagtgtaaggtgttttatgagcttatctcaagatctccatcttcacctctgatttctgaggcacacaaaggcgacccctgaaacgaaccaaatcattctcatcaatggagaactctcggggtttaccatcgccaaccctctttcgagcttcctgcaataaacgatcctgctgctgagccgcacgcactctctccatgagggaggattgaataagcatccgagtctcctcactagtggtgccagcatagcacaaagcgatccccaaatggtctagatcagcgatcaaaggcaaggccacttttggaaccccggacctgctaagggc

SEQ ID NO: 101429 - DNA, 586 bp, Zea Mays
tagtggaatcttgacatacattctctaacacctctaagacagcactccacatgagttgaagacgacacaaggttttatgatgtgatccccatctagtatccccaactcttgttaaattagttgcttggtttctccctctcccccttaacatgtcatcattctctagcctttgaacaagattatcatggtgacattgggcaagttgatcacgtctcttacaagaaacattaactatgttgacaatcaaattgatatagttgaagaaatccataactgaagagcaacacttggccacaaacacaactaccaattgtaattgatgggcaaaacaatgaatataaaaggcataggggttctcatccaatatccttctctgtaacccatggaattcccctctcatatttgatgctccatcatatccttgcccacgtaagttttttatagagagactatgtttagagagcataccatctaaagcttgtttaagtgaagatgagcttgtatctgtaacatgttcaattccaagaaatctctcaattacctagccttgattgttgacaaatctacatgggaaagtaaatcagta

SEQ ID NO: 101430 - DNA, 1204 bp, Zea Mays
cggagacaataatcctacagacatcatgcgcaagcctacccgagcaaaagccctcactcaattggatgggtttgacccaaatcgatgcttgttcacggtcatggcggcacaagggctccggtgagcgtgttccgggcaacaaaacgcggtagggtctaaattgaagcttgggtgagtttcacaaattcacgagaggtcgagtatacgcactaatttggaccaagcgaggggggtggaagagtgagtcgacgtgagcatgctctcagaggtgttccgtggcgtcgagatggtgttctcgataccagaatgcggtagtgctcaatcggttaggccgatgagcaacgttaatagtcaaggatgataaaacatggtacagaaggggattaacagacctgagatcggcaggccacggcgagatgcctcacaacggcgagtttggctaatttgggggaaaaactaaattcgctgtctatggtggctaatcggaggtgagagttggtgtcctggcttcgcaacaggctaacggagcaggctgcacactcaatttataccgtttgcaagtggtggctccgaatttgggaaaggcaagcaggcggctggagcaaagatgagtcaccagagttgcttatcgtggcattcactgggcaaagggtttacgacggtcacgacttagtcttcacggcctgcgacgacatggtgaaacggcttaaggcgtgtcatgaccgaggtaaatggcaggcacgacgatgatggtcgtgcggtcacgtcgccggtcaagtgggtacgacgactaagaaggaacaatgccccaagttcatcctccgcgcaagatctttcacctcacatagatatccgcgcaccactaggcacgaatcacagcgccggcgtggatcgcaacacgggtttaccggcggtgagatgcgctgaacctggattcttgtccagttcactgtaccatcacaattccattcaatcgttctgacaaagcaagttcaagagctcttttcttaaatttttatgtaacaacccactaatccgtctatagcaaagttgttatcctacaaaccagctttgattttgttatagcaacctcgatcaaacatccactggatcctattcaaaatcgatgtcaaagttcatctcagttcactgacagtcgaatttcagcttcagtggtgactaacagcccaactttaggtccatt

SEQ ID NO: 101431 - DNA, 421 bp, Zea Mays
aaaaaggccgtgtaatagcatatgcttcgcggcagctaaagagacatgaagaacattatcctactcatgctctagagcttgctgcagttgttcatgctttgaagatctggcgtcattatcttttgggcaatacttgccatatttatacagatcacaaaagtctcaagtacatcttcactcaagctaaattaaatatgagacaacgaatgtggcttgaactaatcaaggattatgatctagaagcacactatcatcctgggaaggctaatgtggtcgcagatgcgcttagtcgcaaggagcatttgttatcttgcagctaatccttctgaaaccacattgtgtccagaaatggaacaactaaatttgagcatgttccaaccagcctcactagccaacctacacttggaatcaactttagtta

SEQ ID NO: 101432 - DNA, 427 bp, Zea Mays
ttggctgattggatgccaaatttcctgccttgtggggaggctgggcgccaacctcttcctctctatttaaccaggggctgcaccccctcctagagttgggttttctttgatagttttagccatcgtgcaaacttcttgtactgtagttgtgctcaacggccacctgtggacaacctagtgaacccaaactcatgagtgattgatattcagttttacctacatcttgttcttgcttgtttctttgattgctcgtaggaatagaactttgtgttaagttgattttgccaccagcaaagtcaataaccatttggagttggttctgcgattgctaaggtgccacgacctgttcgttcgtagtcggatcacgagagtcacctcctccaccaaatcgaaattatccacctcaccaaaagatagggcactctag

SEQ ID NO: 101433 - DNA, 419 bp, Zea Mays
cctcgccagagttcaccgctctttgtagccatgccacgtgcttacgatcgttatcatgtcgcaagacgtcgcagtggacagcccatttaccaccagagtctttacctcaccgagcgccacgatcgtatactccggtgactcacctcccctccggccacaagttcatctcatcccaaattcgcaaaacactcgtgtgatcactataaattgagtgttcgacctgctctgctatcttgttacgaagccagtgcaccgctcctcactgtcgattagcctccagagcccccaaattcttattttcccccaaatcgagtcactcgcgccgccgtgaggcctccagtcgtgatcagtcattcccaagtctgttcatccccctctgttccatgttttagcatccttgaatgttaacgttgcttgtc

SEQ ID NO: 101434 - DNA, 363 bp, Zea Mays
accgttcatgggttcttatgatgttgaagcttacttagactaggagatgacagtagaacaaaaatttaattcccatcttgttcctgagcagcatagggttagacaagccactagtgaatttagagattttgctatcatttggtggaatgaacttgttaacacacgtgctgcaccacaaacatggaatgcgttaaaagaggagatgtgagctcgctttgctctcccttcttatagacgtgatcttcgaaaaaattgcaacgcttagattagggagacatgtcggtacaggaatactaccaagagcttcagaaaggtatgctacgatgtcggggtagttgagtatccggaggatcaaatggttag

SEQ ID NO: 101435 - DNA, 410 bp, Zea Mays
gttatctttcatgcgtgtgtgaggacatgcttccacaggcataaagcattatgggtagacatggggactgtttaatttaatccactggccaggtcacctaaaattagctctttttctattatggtctgttgttgtgcaggtaatatccttgtgcagtttagtcatcatgaaaatgaaacaaaacgcctacgcctcattttgacatagtggagctatatgtttgttttactgcgtatacacaaccttttgatagaatgctctggttttggatgtgcctatcagggctctgactattttgagttttttttgtgattaatgtccctcagagatttcttccaaattgttgccagcaggcctgaaggaaacttatttattcgacttcattttgactctatgtatgcccatatctg

SEQ ID NO: 101436 - DNA, 845 bp, Zea Mays
caatgcccaccacatgagattcctagatatttttattataggcattttccaagtcgataaaaaccatgtgcaagtccttcttctgctccttattaatgactagccttattaggaaaaatgcttccatggttgaccttccaggcatgaatctaaattggttcgtggtgatatgcgtcattcctctcaggcgatgctcaataactctcttccatagcttcatagtgtggcttatgagcttaatccttccatagttggtacaactttgaatatctcccttattcttgaagattggtactaatatactcctcctccactcatcgggcatcctgtttgatcgaaaaatatggttgaacaacttggttagccaaacggtagcaatatccccaaggcatttccgcacctctattgggataccatctgatcccctcgccttgccccctttcatcctctttaaagcttctttgacctctgattcttagatcctgcgtacaaagcatctatttaaatcatcgaaggagtcatccaattggatgtccatagtctcattctcaccattgaaaagattgccaaaatacctctgccacctctgtttgatgtcctgtcctttcaccaagagttgatccatctcatccttaatgcatttaacttggttgaggtccctcatcttcctttcccgaatcctagctatcttatagaagtctttgtccccttcctttgtacttagtcttcggtaaagatcatcataggctcgagcctttgcctcactcacagctcgctttgcagaattctttgccaccttatacctctctatgttgaccgcgctcctgtcatggaacaagctcctg

SEQ ID NO: 101437 - DNA, 619 bp, Zea Mays
attggaagatttgcatgtctgtgtttcttcagagtattagatatcgagtttgggagatttgcctcaatgttgtgttcaattcaattctagaagtgaatgaatcactccaattcaagtagagttccatgattcgaacaacaaagctcgcaacactttgttcttgtgcttcttgctgggtgagtttgagtgagttagacatttgcctatggctcacgagatctggtccaccctcgagatattccatgaggataacgattatgtgaaaactagactctttgagacgtactgacgagagtacgagaactttgttcagttggctagagagaccataagcactatgttttctcggttctagtccatcgtgaacaagatgtgtgccaagaaggcacatttaccctatgatgattatgagagagcgctcaagctacttcttgctctggatcagagggtttgggaggtgaaggtctcggcgatcattgagtcacccgactacaagaccatcaccgtggatgagctattcaacaagctcaagtccaccaagattgaccactagacctaggccaagtttgagaaccctggtgcaccccccatggccctggtctctggaggtggtgcttcc

SEQ ID NO: 101438 - DNA, 1258 bp, Zea Mays
ccgaagcagtaccagatcacctgcttgaaacactctgtccactctgtgtttatcagcctgaagcttagtgcgattctgagcagtagccaatagctcccggagcatagcattatgactgagatgctgctggatccattgttgcactgaaggagggaccgaagaggcagactctggcatggctgttaacgggggttcgtaaccatacatctcattgaacggagactcggagagcagccaatagatgagtggaatgatgagttgtaccagaattgtgccatcggcaaccattgtcgccattgctttggcaattggtgaactgcacaccttaaatatgtttccaaacattgattaacgcgttcactttgaccatcggtatgaggatggtagcttgaactgaagagcagttagtgtcccagaaccgcagcaaatccttccaaaacaggctagtaaacactttatccctgtcggagacaatagagtatggaaggccatgttgtttaaccacatgttctaaaacagcacgcgccatgactgaagtagtaaaagggcgcttgagtgggatgaagtgggaatatttagtaaaacgatccaccactactagaatagaatcaaatccttcagaccgtggaaggccctcaatgaaattcatagtggtctccttccatgccccagctgggatgggcagggattgtaaaagccctgcaggtcggtgcctcttggttttagcttgttgacagatcaggcattgttggacaaagtcagccacatcttgtttcatgcccttctagacaaacatgtgcttaaccttttgatacgtcccttgaataccagaatggccccaaccgcactggcgtgaaatgcatcaataagtttgatgcgtaaagatgagttgttgccaatcgatacttgtgtgccacaccctgatggaccgaataccccctggcatcaggactactaatcgccaactgctgcagcaaggattgtgcctccggatcagtaacatatgagttgagaacctcctgtagccactgaggttgaatgatagacaaagcatgaagatgaagtggagagtgcagacgagatagagcgtcggcgacgacattatcgtgccccttatacacaatctggaattggagccccatgagcttggtcattgctttcttttgaagatcggactgcaggtgttgatcctccaagtaacagagactacagtgattagttttaatggtaatctggtgccgttgtaaatataaccgcc

SEQ ID NO: 101439 - DNA, 2256 bp, Zea Mays
tagaaaaggtgggggggaggggggaagctttgttaagctggcttttattcgcacattagtcgattatggtaaaaattatattctatctttactttatgcgttttctcaggattagctcctcctttagcttactgaatttgtggacactttgtttggagaccatcttttcctgtattaagtttgttaggcgcagacactttttttttaacgcaatgcacatacacttttcgtgtatggtctggtggcaatgatttaaatggagcgggatagacattaggtttgttaatcagtggacagtctgttgctgttcatgacaggtgggaaagttgagcgaagctgaaaccgtgtcccttattttgcaagggtggtgctcataaggaaccacccccctcttctttgctggtgggagaacaccaaatggcccagctgttgcaccatcaggattctgcattctacagcaaggaattgcacgggtgccggtggggtattcttcaattctttgggtttcgccgtcgcctacggtccacaaagatgctctctgacaagagacatggtcaggagaaaaacagccgtggtaagttattgagtccttagttctctgtttttctttttgtgaaacggacttaaatactagcataggtattgaaaattcatgtgtctaaaactatttttgtttgactaccaagacaactggcgaatctaatgattcaaagtagataaactgtttatagtttgacttttacagtgtactgatcttgatttgtccttaagtgtaacttaactaaaactttgctttgtgttcgtatgcatgaataaaacaatgcatataatgctcagaatctaatgctatttatcttacgatacaggaagtagacgccgaagcagctcctatgctccattgaagaacgaagacagtgcaattctggatgatgaggaaaacactgaggtatatcaggtaacgtatccttgaatttcagattgactttcttttttcttgaatagtacttattgttattactctattgatcccctatattcacttcctacatgttgcttgatggttaagcacttgaatttaatgcattaccatgctctatgcttatctgtttccctttagttcaaaccagtactaacttgtctgaactgtgtccgccttctgcgaattagctactacttgtatgcatttattgtgtttttttagctgtggagttagtatatctgatacttatttggatatagtgttcaatacaaagcagtttatagaagttacttcttccaaaccctacatacagttgtacacgcacagctaattcatctgaagatcaatcccccttattcctttaatttcttctaactcaggttacaaaaaaacagaaggcctcaaaaaggaattctggcaagtctagtttgaggtccttgattctaacgaagttatatggaaaggaaggccagaaagagaagatgcttccggttgcaccaaagctactccgcactatttcgatacactatctggaaagcaatgaatacgttcttgacggcgaatccacttcgagcggcgatggttcttcaaacagtactaagccgccgatgcaaaatgctggcgatatgatgaatctgcaccatgctacatctagcgtcccagatggctgtggtgtcgattcaagctcctcacttctcctaaagatagacgacgtccgtacgaagcgaaagaagagccaccgtagcatttcgatggacgggattcttcacaaggtcccctatgggaagaaggtgtccggagatgtgatcagtgaaggtctcccccgatcagcctctgccacgtacgatagggacggcgcgaaaccttactttggtggtgctgctgcaaagaggcatgcaaaccaagggtttcggcgttcacgttccctcagtgaatcctgggaaaactactcgcgcctacttgattccatctcgagtggtgagtccaaaagaacactggccagctctaagtctaccagggatcattccctagatggccctgtcgcgagtacttcattgcaaagaacttctgaagccttgaggtctcaaggtctgggtaaacgtgatgagaacctcgtgactgcagaagatgcgttggcgccacatgttcaagagaaaactggtgaagttgctaagggtcagagctccagcgatacgatggtcgctggtggctctgaaaatcctgctttacctgacgagcacgttgacgacaaagctgaagaaaacacatgcgctgct

SEQ ID NO: 101440 - DNA, 390 bp, Zea Mays
atatggcatggaactcctcagaagcccaatactcgcacatccacgcccaagcatccgaatggtggctcaaccaatccacctcataatctttgtactgctcagccgtcaggtggatttcctttaccatatccacgtcacaatagttcccctgacgcttttggtacaccgtgacggccctcaaccgtgctttatacatcatgccctttacagctctatctgttgagccattgaatacctcacacacatatggatcatccaaggtataggggtcacacacgcgaaattgtccctgcaaatttgaagatcaccagagacttacaaatgcaaaatctgaattcaatttgaatatcacaagagacttacccaaaacaaatcccacactttgcttgt

SEQ ID NO: 101441 - DNA, 672 bp, Zea Mays
aaaggtgagacaaggtttggaataagaaagatattataaaaatcaaggagttgggtaagaattatcaaggagttagacaagacatatttgttggtggccaagagtgaaataagataaccatgaattattaaagtgaggataaatgatgcaaccaaggatatgaagtgagttagggagaaaactttatcaaggagacaaaatagagaggcataggtttaatatatcaaggtagatattgcgcaagagtggcaatacaatggcacgaaagcaaaagtataagaattcaatagggagaaagcattatcaaggagaaaagtaaagaggcaaagggttcaatatatcaaggtagatattgtccaaggatgacaatacaatggcaagaaaacaagagtagaagaaatcaagggttatatagcaatattagggattagaaaaccacttataatataatataatataatatcgcaattaccgatctagtcgaaaatcttaatactaaagaacaatcctatcacttaaccaagaagtcaaataatagatccaggggatccataacaaaacttcttgcggagtggggataagacaaagaatagggcatcgtcgatagcctcgaaagggtttcttctggcaaacttcgcttcaagttccgcaatcctagcttgatcgtcttgc

SEQ ID NO: 101442 - DNA, 436 bp, Zea Mays
tttggagagatgagcctcatccaatattttcttcttgagatccttatttttaggaaccaccaatctggcttcaaaccataatatcccctttttatcttggcgaaaacacttgtacttctttgtcttctgatggaggttctccttaatgatttgcactcccttgtcattgagttgggacatgattatctggtctcgcatagttggctcaacggaaatatgagacaaagcactagaaggaatcacttcaatcttcattttcctcaactcatcacacagggtgttgatgcgagaatccatcatcacacagttgcattgtgacttctgactcaaggcatcaactacgacattggctttccctgggtggtagtgtacctccaggtcgtagtccttgatcaactctagccatcttctctgcctcatgttaagatcagcctga

SEQ ID NO: 101443 - DNA, 429 bp, Zea Mays
ctttggaactcgagcatcggttttcctctccgtatgtgccccagcagaatggtattgttgaacacaaaaatcggacccttattgagatggcctggacgatgcttgatgagcataggactgctaggcgtttttgggccaaagcaataacactgcttgcatgtgtccaatcgcatctttcttcgggcttttctgaacaaaacttcttatgagttgcgatttggacagccacccaaggtcattcatttcagagtatttagctgcagatgctttgtgctaaaacagggtaatctggacaagtttgagtcctggtcttctgatggggtttttctgggttatgcattacattctcatgtttatcgtgttcttaacctagaggctaaccgcattatggagacttatgaggttacattctatgagactgcaccttgt

SEQ ID NO: 101444 - DNA, 273 bp, Zea Mays
gaaggaaggtcaggtttccaacagaggagctgatttggccagccaagttttggccggtgaggttgagctccgtgactcgatatggtcgcgtggaactgcagttcacaccatgccaatggcagaagtggatgctggggttccaattgctcaaggctccgtgcggatcactggtgatgcccttcttgaactctagcagagaatgaaaatcttggctgttgttatggtgcgtcgagcaatggactttgtccactgcatgacatagcagcagcagca

SEQ ID NO: 101445 - DNA, 1070 bp, Zea Mays
gcaggagaagtacaaggacgttcaaatggagcatggttgtgtgtgcttgatgatatgtgagcaaatggagctggtgttgaaccgtgtacctctccatgtcgattccatatagtatatccttgcagaatgccgttgcaactcaaatgggttctaatttcttcataacattttgttgacttgtttttacactgaacacatggacaattaaccttgccacccggtcgaacattatgaaatgcgaaagtaagaaattgggtcacaccaatcttatagtcatcacttgttcttggtttgctcatctaactcttgtccatcacagatgctgaaataagtacagggacatacaaatatcactattgtagtaaacacttagtgtaccatatcacacataggtctgttagttgttaagtaatgcagtaacaagtaaattaagagaataccaatctaacaatgaaatacagaaccaactcatatacaggggcggagccaggtcattttggtgctgtcagtggatagccataattttaggcgaattatatataaaacagtgctaagaggtgattatgagatagatagtacccattaaataataaattgatagcattggtcagctccgctactgctcatatatgaaagtgcttatacaaatcaactaattatcatactgcagcggctaatcctctattgcacttacaaatctgaatagaagggaagagtgagaggctgagataagagtaacctgctgtagaaaatgtgtgaaagcctgaagccctccctgtccctgctgattgttgaatctaaggatgaacaaccaaagagaacactgtagcagattagggaggcgagatccataatatcagacggccgacgagagctagcgtagggtcagagtaggaggaaggccacaacagcttcatacggcgacggggcgatgggcggatctatagagacaatagaccactggcggcgacacatctacagaaagaagatgaagcggtgttttgatgtgttcgcgattgttcagtacatttatgtattttgatcccactactaacaaaacgtgcatgtgc

SEQ ID NO: 101446 - DNA, 792 bp, Zea Mays
atgattgacacataaaaaaataccgaacaatgtccaaatgtttcttctcctttgcgtatcttgcccttgtcagctcttgtcagggcttgaataatattcctatcaaagtatttgattcgtggtgttccacgtttgttctggggtgccgttgagtcatgaagatgatccaaataatacaactgcaaaaatcataacatgagtcattatgagacataacaaaagcataatctacgtgtatatggattttgcatacaagattatgggtacatataacagacaaaaaaggataggcttacaagaataacgatggaacatccatagatggttgtagaaacgttcgtaacgctcctagtatgccacttcttggcagcttggcataaatcattgaaaataagctggcaccagtccatctggtggaaacaatccatctcctcggttaaaagaacctcatggttggttattccccagctggcagtagggaacaacaacctattgaacaatatcaagaaaaagcatctgatgcttaaatcatcgtcagaccctttcctcagacgatcttgaagagctataaccccaaaatcttctttcgatagaccaagttcagctcttaaattgttggcagcaatagcttcatcgatgcccaatgcagttcctccaccagcattcggtaaccccaaaattaggtgcaccgtatccttggtaattttcagctccttccctgggccggctcgaattgtcatgtcattgtggtcgagcttttccatcagccaagctaaatgtgatctgctgccg

SEQ ID NO: 101447 - DNA, 414 bp, Zea Mays
agtcactgaaagatactaacgactgcatcaggttttctgtacctgataattcaaattattgtctgaggtcaatacacaagaattttcagaacatacacagtttcaagaaattgataagaggaatagctgcacatgaagcaaacgacaatcattatggttggttctgcaagagaaattatataatcaatcccaaaggattaactcattagcactatgcactggacatcacctccatgatacattgtagcataagagaaatagattgggcaacaatcactgatttggccattgcaaatcatccctaactacagttctaaggtaaaaagaactgtatatgccaataggaaaggtacaaggcacaaaaaacaacctaccttgtgaaggttgtgtgtttagaccaattgaacaagctac

SEQ ID NO: 101448 - DNA, 396 bp, Zea Mays
aaaaaatttgacattcgaataagtatccagatctatcgctactcctaggcccacctatcgaggtacaactccctttgtaacgttcctcccttggactatcaaatggagggcacttgcgatacgagggaaggacacactcagacccacgacactcaagctctcaagcaatacaactcacaatggttacagggtattacgctccgcgcggcctgaaccacttctaagtccttgtgttctcgtgttcatctttccggtcaggcaaacctctagaccccctcctcatcttagaatcagagcaggtgcactctgccagccgcccgaaggattttccctccgacagtatcgaagttgggactctaccttggattcatattagaacagggagtggaagattat

SEQ ID NO: 101449 - DNA, 325 bp, Zea Mays
gaaaactcgaatagcttgacaaagattaggtgctgataagtgtcgcacaagaggcacaacggtcgtcgatgcacataggatgacgaggtagatgtagctttgagtgccacgtggacaaaggcatgcctgtctttgtcgatggcaaccacgggcaacgatgctatggcttaaggaggctcacaacaaccattgcttggagaagatgcctgtagtacttgatgatggatgtcacgggggagccgggtggatcgcacacaccggttggtcaaaccgagtatgcgtgaggtgggtccacgatggaagaagtcagtggaggcgtctcgat

SEQ ID NO: 101450 - DNA, 627 bp, Zea Mays
ttcatcttcaccgtggtggctccattgcactttgcacatctttataaccttattcctcgtaactcgagtcaatgtatcaagaatcttgatggggtactcagcataagtcaaatcctcttgaacactaaggtcttccattggtaactgttcttcaggcaccctgagacatttcttcagctgagatacatgaaagacatcatgaacatccgcaaggtgatccggtaactccaattgatatgcaacctcacccactcgctttaagattaagaagggtccaataaagcgaggggacaactttcctttgactttaaatcttctcatacccctgagtggtgacaccttcaaatagacataatctccctccttaaactcgagctgtctccttcgagtatcagcatagcttttctgcctggattgtgcagttctcaaattctcccttatttgctgaacttgttcctctgcttcttgtataatctcaggtccaaataactacctttcaccagtttgatcccaatacagtggagtcctgcactttctgccacacaaagcctcaaacggtgacatcttcaaactggcctgatagctattattataagagaacttcgcataaggcaaactcttatccca

SEQ ID NO: 101451 - DNA, 420 bp, Zea Mays
acttgctcaactgtatgtagaagatcagaggcaaaagcgcaaagcaagtcaagcggcagtgttgcgtagagggccggcagtgccgcgccagcaaaaatgcgcagaatctgttcaaacatcacaggaagtttgtgcagagggaaagaacatgattcctaaagtttcaaccatagcaaaacaaaactctatgcgcagaccagatttctcgaaaagagtggggttttgttggggttatctcaaactaactcaaaaatgagatcaactcgtatcatgaccacaaattgctcaaactaggtatatgcagtgatccaaagagtatatctcacccccacaacactccccaacatcaatcacaacacaagaatccagaaatccaaaggagaggggaggaaacgagaacgaatacaaactcgaatcaaa

SEQ ID NO: 101452 - DNA, 390 bp, Zea Mays
gaatcaacaaaactcacccataatgaaaagttcgggatatttctgccgcatcagctcctcaagttcccaagtagcctcacgctcatacggattagtccacaagaccttaacatacttaattgatctccttctcataacacgctccgagggctctaagatatgcaccggacgacactctagagtcagatcctgctgcacagcaatcggttccaacttgatttgatggtccggatcccacaaaaacttcctcaacatagagacatgaaataccgggtgcacccctaccatggaatccggcaatcgcaagcgataagccaagctacccactcgggcaaagatagtgaatggtccgatgtatctcgggctaagctttccggagacgtcgaaccg

SEQ ID NO: 101453 - DNA, 821 bp, Zea Mays
agagccaaaattgagaagggtggcccaaaagcaatgcatgactctaaaacagtgatcacgcttaattaatcacaaccgccaaacctaccactttgcgacatctataccactgttacatcagattttatttctttgctgacaaatatacacattttgtttgcggggtcatggcttagagcctatttagatccatggtgctaatgttttgcacctaagagcagtttacaagaaacaagaaagtaagaggtattgagcgtagagggttgtcaactccaagtagggtgtgttgtcaagtgagaaagactgacaatacttttttaagaaaagatcgcagctgatcaaccaaagaaattttaactttcttataatctaaagttatttttccatgatctatatttgtaataaattttcattaaatagatccttaactaaggtgtaatgttggatcttttcagttttagcagtggtggtgcatgggttgttatttcagcagggcaaaacaggtaggagacatggatgcacatgtagtcatgtactcacgaatttttgtaaaactaataatttcgaccaaattttcaatatatatacaccatttataatttattactatgcacccttgagtatttgcaccttactcttgattcgcttagctttgccactgtatttcattattacaaaaaaaatctccatataatagatacgctgccacctgccagtaaaaatcttgacctacaatctattttactcagaacatatgcacaaataataaaaattgccgcgccttttgtagttttgtgctcggcactgaataccgacatttt

SEQ ID NO: 101454 - DNA, 400 bp, Zea Mays
taacacttcccctcggtcagaattacccatgccgaggttgtactaaaattttcttaatcttcttacttgtaacactttgtaaagctagcagctatctggtctcttgatgaaactatcttgatttgtaacaacttgttggctactctcttgcacaaaatgatagtcaatctcaatgtgcttagtatgagagtgaaaattcagattgtatgacatgtaggtcacacctaagttgtcataccacaaactcgatacttcatgttgaactattccacgttcctttataattgtttctaccctaattacttctatggcaacatttgctaactatttgcaccccaccttagtgctagatcaaaacattgtcaactacttcttagcactcttggaaactagattctcg

SEQ ID NO: 101455 - DNA, 777 bp, Zea Mays
cgttttaacacctatggctcgatcgatcgaggctgcaccactgacgctacgaaccccttgtccatgtcacccactcgggcatggactcagatcacccgggaaagagaagtgtgtgcccctgagacttgcataaccgtgggggaacgaccaatgaccactccgccctgaaaggagatggtaggagcacaaagcatcacaccaagctacttcttcctagatatcttcttcatcccaggaagagtggaggacacacctgtttctgacgacaagcccaccatactaggggaggatcccccagcgtgacgcacgccaacgccgtaataggcgccacaacatacgacatcacaatgaagccagggaacaggatcctatgcaacccgtctctcatgacgaagcctctaaagtagggaaaacccctgacgacagagcgctctgcgagcgccgcaactcctatcgccgcaatcatcgccacgcctaggaatacgaacgacagcaagctgagtaggacgccaagctccgacacgagaactcgcttctcctctttgaacctgctgcctgactttgctcgaccattgaatacgtcgagttaagtcgggggagtcctggctcaaatcaccaacggcttaccgcgcaccccagacgcggaaggctattggcagatcctaacctacgcagcgaaccatcttcttcccctcgcccatccatcgaacgatctacaccacaccatcaacagtcggcaagacacacggagcaatatcaactcttcgcgcaatctcc

SEQ ID NO: 101456 - DNA, 573 bp, Zea Mays
caagccgccgcgaatccgcctctcgtcgtgagcagcttcaaccagcgcctagtcaccagtgagatagcttccaactggctcgctttatccttacgaacgtgtaggaccttttaattagggtttagtgcagtagcgggcccgattggccatcaccggcgtcacgtgttcgtcgacggtgggggtgtcgtcaggggaggtgagtcgctgggagagggaagaagaagaacgactgtggaccgttgatctgcttgtgttcggtcgcgattagatgttaggataccggttcggcgggagcaatccggtccgtccgtctctaatcgggcgcataagattcaccgtgggcagtattagatccgggcggttgatttcggatccaatggacacggcagcgtaccggttcagatttataaccctctaaactgggccgtgtggttttgatccaacggcctgggttcaccgatacctcttcgcttgacttaattgctaaagagaccttggcaattgtttgaattaacctgcagtccattgctactgtgctctgtgcctcggatttcttgcgctggggtccctgtt

SEQ ID NO: 101457 - DNA, 458 bp, Zea Mays
gttgttttgatggaggatgcatcagacaaggaggaagctaccttggttgcacaaactacttttgaggatcccatctttcttaccaccaacgaagatggtccttctcattctatgattgaggacaatatagaacatgttttggtggaggacgcattagatgatgtggaagcaaccttggttgcgcaaatgacatttgaggatccaatctttcttactaccatcaaagatggtccttctctttctatggttgaggataatacagaacctcgactgctagaggatccttcgatagagacaatgtcttcttcatccaccaaagctagagaggatgaggatcttgcatgccctcctttagctcccccctcaccatcgactacaacagttaggcatcaatgtaagtcctataatagttcttcgcttcgtcgaagtgcccgtcttgcacaatgtagtgtgtttaa

SEQ ID NO: 101458 - DNA, 592 bp, Zea Mays
gagtggagaccggagttcaatacttgtcgaacaacatgcgataagcctaccaattcttttgaaattcatatgaattactttccccccatacaagttttggaggaataaaacaaaagggccaacctctctattcttgagtttacaaggggctcctgataacttatggcctacgcaatattgtttggctactaatcggtggacatgtataacactgatttatattgtattttttacggagtaaagtttaaaatagagagtgagatagaaagtagaatatgggggccgctggagataatctaagggttacattataatgatccatttactatcatgtttcctaatcggttataagaaataaataataaaacaaccatcttatctttatggaagtcggaaccaaaactccttctgcgagctggtccacctcgtctccactattatgaagcactcgtttcaacagttgtcctggatcacccacgaagcatacaggtgtatttccctcaccctaccagtagactgttaccgcatatagaataccgtgaaaatcacctaaggccctattagtggaccgttaccttacagatgggtcgtc

SEQ ID NO: 101459 - DNA, 607 bp, Zea Mays
gaacggttccagcggcggagataattcagctgaaataggaaaaagttaatcattccgaagccataaaaaccaatgccgaagctaaaagccaagaaacaatacctatacgtttttcgcgctctgcagcttcttcagcttgtctcacttctatccgggcgtcatgggtgccttttcacttttctttataattttatgagccatctctcggccaccattcacccagacatcattatagaattttccgcccatcaaggttgcttcagctgaaggatccttcgtgtcgtctgcggagaaggcagcttcggcttgggccatggtcttgatgtgatcacatctcgccttctccaagatagctgaaatctcccgtgcaccagaaaatgcacagacatccccgtgatcacttaagatttcttcgaagctctcggcctccccacttatccattcaataacgccttcggggtcacctcgtatgaagttttcttcagtagagtaggcgcccacgttggcgaaactggtttttattttcttcacacagtccaaggatttttcaaagcatctttccttggatgtgcgaagttcttcaacgtttttctctaaatgatttttc

SEQ ID NO: 101460 - DNA, 377 bp, Zea Mays
gttgtccagtccttccctttagattttacgtgatatatcaatatgaaattgatgggcctaagaaattctgagaattcagagagagtgttgaattgttgccggacacatcactcaaccattgaattgttgtcgtgctgctagctcaaattaatacatcataaacatgccaatagtacgcttgtttttgtatctaaataaggcatgaactttttgtttgacaaggcaacattgccatcaataaacgatcaacccagatgtgagagatgctagatttgttttacaatgtattctggtagactgcttcaattctcaataaaccatgtgagcatgttctttggttatagaccgcgccccagcgagcgggccgcctcaccggc

SEQ ID NO: 101461 - DNA, 348 bp, Zea Mays
ttctctaaaattcctgcaaaatattaaaccctaatcaagagaccaacttcacccaactaaatagctaaatcacaaaagctaggaaacgataagcaaccctaagtcatcatggcaaataccaggaatataaaaagacaaaataaattgctcaaagtaaatgcagaacgtaaagtagtgacaagaagactcctccaagtttttcctaaggtatcggagaatcgacactctccactagtcctcattggagcacccgctcaagggtatcactcccctttcctcgcaagggcccagtgttcactatgagatgatcctttgccaatccggcgtggtggatccctcacgaccgca

SEQ ID NO: 101462 - DNA, 390 bp, Zea Mays
agtttagacggtgagggtggttggcgaggaggagtggtcagaatagcccgagatcagaagtcccctgaagatagcgaaggatgcgcttcacggtagtgagatgcggctcctaaggattgtgcaagtggaggcaaacttattgaacagcgtaggtgatgtcagggcgagtgaacgtcaagtactgaagagcaccaaccagactacattaaagagtaggatcggccaaatgctcgctagacgaagacagcttggattatgtatccatggcggtggtgcgggttttgcaaccagtcatgttggcgcgctccaatatctcaagcgtgtactgacaccgagggaggaacatgccagtggcggaacgagtcacgccaatccctaggaaatgctgaa

SEQ ID NO: 101463 - DNA, 414 bp, Zea Mays
cgaataggaactttagcgcgcgaatcacgtttgggctgctcgtcggcgatggcgctgccacggtcctcggtgtggtcgccggagtttagctgagagtgaggagaacgcgtcgtagcggttgagatcggattgaacggatgcgatttgatcttagttaacccttcacaatattaaatccggtgcgtcgattcagaatcgggtggctgggacttgatcgcccccttgccgttgttgctcgatcggcggtcacgggggtgagacgttaggcgatacgtgtgatctaatcatggccttcggttccgatctaatggtcgagagtcactcataccccttcggccgaaagaacttacataagagaccctgaaaaatcaagtaataaacctgcagtccactcgggtgcaccaccgagtcttg

SEQ ID NO: 101464 - DNA, 419 bp, Zea Mays
ctcaaagaagatcccaaaagaacaagaacacaactcggaaggaggtaactcttgagatattattttccgattgttctaactatgattcatggtctactagtgtactaaatgattttagaactatagatccacgattagaacaaattgtagacaagagtatcataccctctgattatgatgcttccgaggaagatcaaagatgtatacacttaaaccatctagctcttgacatcttaggtaattctcttagcgaagaagattatcatgccttcattacaaattataatgaacatattcctgatgcgcatgagatttggactaggatcaaaagtaaatttgatgagttcaaacatgatcgttcatatgatgcttctacttcctttagttcttgtgatactaaccccttgaaggaagaagaa

SEQ ID NO: 101465 - DNA, 490 bp, Zea Mays
gtaggggcaaaagacgtgtcagtttatgactatttggctgagggtttggttagcaatgagcctccatctcttaggctagttggcgctggtaattttatgcttcgtttgcgtgtacattattattgtgtttggttgcgctcctctcattttttgtgtggagatggagggatgagcttggggcaaaaccacgtggcaaggccccaaaagcgtttgttggggcagcgaaggatccatgggcgaagtttgctcggttgttgagattggaggggacccgaggggtgttgcattgagtgtagtcgctggcacggccgccgcgacattgcgaatggctatggaagacatgctagcagttgctgaggtagcgaaggctacaggggagcagctacgctatgtgagttttaatcttttgcgccattggcttgcataggccgccactgatgtttttttattgcacacaagccctagcttttttgctaactatgttgcggcg

SEQ ID NO: 101466 - DNA, 380 bp, Zea Mays
tataatactttatgaatagggatggaatatgaatatctatacgtatcttgtttgtttgctgatatggccatctaacaatatttcccacaggcctgtactagtattcaagaggttcatttccttccatttaatcctatcgacaaaagaactgccttgacatacattgatagtgatgggaagatgtgctgtgttagtaaaagtgtgctagagcaggtcttaaaaaaattggattgcaacatagcttcaaaagcatgacatgatttttctgtttacatcaaaatcttattgataaaaaagtgacatgctgattctcaacctcgcctacaataagtcagggatagaacaaagagttcatgttctaattgacaagtttgctgagt

SEQ ID NO: 101467 - DNA, 926 bp, Zea Mays
ataaattctgaatatccccaggcttctggactgcggacacaattttaacaaagcccagggggttctgcataaattccaggactaaacggtaatggtcttaacactttggtggattgcgggttggttatgggattttgcgggggctcctttgcatataataccagccgaagggggtacgggtcattctgagtcgcacgatcaaatatcgagggctgggattagatctagtgttttatataccagtatttgaccagggccatcggatcgcgagcgaacgccccagattagatcgctcatttaagtgaaccggtacgcgctactggccgccagatcttggatcaacagtcagtatttaatgtaacgtgatccaatatgagccatccgatctgcccaacggttcggatcaaatcaccgaaagggtacctcctcatctaatcaccaccgtctagccgagatccaacgacccagagacgtcttccccaaccgagaaccagcatcggcggtgagccgcccaccacggtggcgatgctcgccggagactgcaattcagcgccccgatgcccccggtactcccgtaaacggttctacagggagagtggtcagctgcgaacgacaaggggagcatattacctgtagtggcgcgacaggaacaccagtccacggcgacatgcggtccacgatggtcgtggttttccgttgagcaattccttagtgacaggcgctcatccaccagtgctagtgccgctaacacgttcgcacggtcgcgacgaaccttcctagtcactggtttgaccccgaccgacggcgtgaacggaaaacagccggcgacggtgctcctccctctccgcgaattcggtggtttttgcacgatgctttggacaatgggaggtggtcgggtcttatagctggtcttgcgaaaatctcgg

SEQ ID NO: 101468 - DNA, 665 bp, Zea Mays
caaaacactaaatgaattcatccgacacacttgcattatgacattggccttattctagttcgtgttgtaactctagtcgtctgatgtctagcacccgcgctactagttaatcgtcaactcatcactatctgtctagcggttttactccatctcctccatagcaaggccacatctgacaggcacccgtgcccatgcctaagctccagatcggctaggttgcccactacaaggtaccatccacctaacgctagaccacaagcatcagtgttggtcgacttagtagcccctcctttgatccattcctagatctgccactgcctatacgttcttcgatgcatttaccgaggtatgtgcaatcttgccactcctttatgtccaacaaaggcatctgacaacttatttggaagattttgcaaattaataaccttttaaacttctagtttagatccactagatcatggatctaaggactacattccaattgcattacataataaacaagcacaagcaccttgaaaatctaggttgttaatggttttggcgattaatattatcatatgattattttgactattgtgtgtcttgtagaggaaaattgagttaggtcacagtaataaagtttgtttgagaaatcgattgttttcatgcccctatgtatggaattc

SEQ ID NO: 101469 - DNA, 307 bp, Zea Mays
ccagaatctcctcagaactatcctccaagatcacaccattctttacagcaaggtggtgcaactccatagggacttcttctgccacaactgggtaggaaggagcctgctgaggtggagggacacgggtgatgttcacacgagtagtctggagagtgtgcaccatctacaagagaaaagtgtcaccttagttgaatttaaagagacaagattaataaaataaatttgtaaaaacaaaataaacatattttgaacagactgggcttttcatttctaactagtcaaacgacctagagtcagcatagatttg

SEQ ID NO: 101470 - DNA, 801 bp, Zea Mays
cattgttggcccgggatggctggggggcagcaccagctcgtgggtggtgcaagtttggagatgcgccgtgggaggaaaacagaatacctcgacatcccactcaaggatagcattaaaggatggcgcttggagtggtttattgtggaaaatcatggcaagtcccgcccccctctgtcagggagacagccggatgttcatgctccaagttggattgaatcccccacagacttggagataacagaagccagggttctgctcgctgagatttgtagttgcagactttgtttttaagaatattcagccactgaaggatagagcgtacccgacttatttgtatagtggtgtcactgattcaacccgggttaccaacaagaggattcctgctgtggatttggtaagccgactggagatgatccttagaggcaaagtatcaaatattggtgctcctgttgcatattctgcctaaaatctgccaccttccaagtcttttttcgattttgtgtccaatcctcctgctagtggtagtggtttgggtcttagagtgcgaccctctcccgaagaagttgaggctttggttgcttcacttggtgatcttcccaatgatgagaggcaagttcactttgagatgcctataaacccgagcgatgcagagataagtgctatgctggacatgttggctgaagattcttctgactcgatccttgttgaaacaatagttgttgcaactatctcgaagcctagaaaaaccttgaatgctcaaaaatctgatagtactcgcccgaaacgccttcgctaggccag

SEQ ID NO: 101471 - DNA, 604 bp, Zea Mays
cggcagaacttttttgtgccttcggcactgttacttccgatgaagggcttaaaatctctagcgtttttgtttcttcaatatttggcttttcagctttatcttcttcagtcttcgactcagcatgttcaacagaagcttccttcggcattgtagctggctcttcagccttctgcgtaggaggaatgggttcttttggtttagtagctgaagaagtctccccaccaaactcaggcaccacggccggttcaatatagcgtggccggtgggtaaggaccttcaactttttgcccttcggtgcaggctcgactggagtagccgaagcagcagttttcctcttctttccttgacctcgcagtggataacggtagttggggtagacaaagccaatagcatcaaaaactctgttcaatctcttttttccccgacctccaaaggctatggataatgcattgtcttccgccttggagtatgatccaagcagttcatcactagtaacttcgatgcattttagccagtcatcgtttggttcatcgaatttatctctgtatctgaatgcgtacttcagccggaccagttcaccttcattagattcggtgatggtctc

SEQ ID NO: 101472 - DNA, 661 bp, Zea Mays
caggctgcaacactatttctgatagaagctcccaaaggttcaaatattccactataacttccacagacatagcaccctttataccagatatccattttctgttggaaagagcctcaagaacagttcttttattcgcaatccttttaggaatgatggcgaataacctaggcgccagactacacacattctggcccaagagccatttatctgtccaaaacaaagtgtgtgctccatttcccccttttgagaccaaaacaatggagaagaaagatcctgccttttttggaacttgaatagggaggtttgcccaaggttttactggattagttttatgaagccacaaccatctcatacgaagggcccagcataattccttcaaactagaaatacccaaacctcccaaatggaggggtctgcacacccttccctagacaaccagacaatgtcctcccctaacctccgtgcgacctttccatagaaaaccctttctaattttatcaactgcctccaaagcctaaggaggaaaatcaatggccatagccaaatagacaatcatactagtgagcacatgctgaaccataattttcctaccagctcttgacataagatcatctttccaactcggaagacggtcggccaccctgtctatgatagattgaat

SEQ ID NO: 101473 - DNA, 344 bp, Zea Mays
cttggagctgggggctgactctgccgcttcggacctcgatggtgacccgtcaggtaccgatctcgaagatgatattgagagttgtggtggcactagagccggtggacatgtatctgaggaacaggaagaagataatgaagaagtccccctttggttcgtaagagtcgccgtagcaaaaccagcaactctgtcagggttggttaatcttcagaggatgacgatgtctgccattgatcatgcgctggaggagattatcctagaaggtcttttattggaacttcctgaaacttggaatgatgcatccgtgctgaggtcccggatgacattccctcagctagtaatct

SEQ ID NO: 101474 - DNA, 412 bp, Zea Mays
gtacagtacgcaaagatcaaaggaagtttgatgccggattgttcaatcgtgcttcctccaaatcgggaccattaccactgcctttgcctcctggtctaggcaatcgttcagcaggctttcctgtcaaaggggaggacagcaagatggctgcgctgaaagcttacagaaaagccaagggactatgctttaagtgtggcgaacgttgggtcaactccatcgttgttcaaacacggttccgttacaggtagtggaagaaatgtgggcattagctggttctgttgaggagcacatggtggaaatggaggagtctgctctagaagccaaccaggaaagcgttgaggctatctctgtcgcagctgccacaggaagtgaaggaaataaaaccattcgactctgggcttctatacattgc

SEQ ID NO: 101475 - DNA, 484 bp, Zea Mays
tataccctacaaacggagcaatcggcttaagtcggcgacgacttaagacggtgcaacatgctcgcacttactcgacttagggtgaccactataccctactaacagagcaatcggcttaagtcggcgacgacttaagatggtgcgacatgctcacgcttactcgacttagggtgaccactataccctactaacggagcaatcggcttaagtcggcgatgacttaagacggtgcgacatgctcacgcttacttgacttagggtgaccactataccctactaatggagcaatctgcttaagtcggcgatgacttaagatggtgcgacatgctcacgcttactcgacttagggtgaccactataccctactaacggagcaattgacttaagtcagcgatgacttaagacggtgcgacatgctcacgcttactcgacttagggtgaccactataccctactaacagagcaaatggcttaattcgacgac

SEQ ID NO: 101476 - DNA, 387 bp, Zea Mays
gcgaggtctctttaagaaaaacgcacggcgaaggggtatgcttcaattctggccattcatatcagatccagaggccaggatttgatcgagccctaacagaagtcgcacgctagtaccaccatcggatccaaatccgatgactcagatctaattatccccagacccagtccttaccgaacgatgcacgatcaacgactcggatcgaaacgaggtgaaacgttatcgctattctaatccaggccgttatctcatgatttaacggtccacgacgctatctacctctaccactgtggagaagggggcaccggatgaatcacagccgttggtcccctaatcaacagacggtgagtcgtcttcttcgtccaggcgaccgtgcctgacggcgtg

SEQ ID NO: 101477 - DNA, 329 bp, Zea Mays
ctctcatcaccggacccatctgttacaccagccatgttgctctcgtcaatcttagtcaagagagtgccctcacttagcactaccttctcagcagtgtcgaaggcattcactagcgcgagatctaaagctatcttcttttcggctatccctacaaagctataaagtcacccgaaaagcttgaagcactatcactaaaagggggatcaaagcaagcttcagatgtggaaaaactaacaacggaacgttaaaggcggtgtatgttgtgcctatcgccaagagtcttgccccttataaacaaaaagttttcaaaaccaacaactcactcactg

SEQ ID NO: 101478 - DNA, 520 bp, Zea Mays
gtggggaatgccaaagaggaaagacaaagaaaataagcttgagcttgtgaggctaccatgccgttttaaattccataaaaccttcaatggcccctgtgccgaatggctagaagtgatcgaaacaatgtgcaatgagattcttaaaaactacactaagaaagaagaccaattgatgattgctgcgttcgacacccaagaaaaatgaagattaaatcgagtgatggacgccctcggcttcgaataccctgattatattaggcttgatgaagaaaccaggggagtaaagaagaagagggttgtaagtattctgaagagacaagcaatgaggtccatcaaagatgataaaaataagaagctaccaaaaagaccgaaggtttctggaggaaccaaaatttccaagtcaaaatcgaaaccttcggtgctcaagaaacaaaaaagtgaggaagaaaagtctgctccactgaagcatactgaagaagcctcttcggaaaataaaagcttcgacttacgacacctaggc

SEQ ID NO: 101479 - DNA, 517 bp, Zea Mays
agcttctcgcccacatgtgcgatgcgtgacgtcgcttccggaaggatcgcaatctcgatgccgcatcgatatcgcgcatttatctcgcgatacttcgagtcttgtgcctatttaaaagttatagattagagaatacgaattcggaagctcgacccactctgatgatttttatcccaaacaaattaattggaattcgcaaaaatagttttcagtccgaaacaaaccagaccagtgtaactagaactaaaagcgagtaatcggtaaataatttggttcactaaattcggagaatgaaaggtgtagccgtatagcgtgtcgaccatttatttactgctaaaaatcttgattcaaaatttctgcgatttccttgaaaaagagagaaaatagaaaaatctacaaaaaaaatattctcaggctctctctctctctccttatctcttcacgcgtggtacacagatttttcttctggcgtctgctttatcccctggccgccatcttcattctttgtgtagccgca

SEQ ID NO: 101480 - DNA, 271 bp, Zea Mays
ccctcaggcgacttttgcgcggagtgtcgcacgcgagggtagccagcgctgcccctcgcggtgacttttgtattggtcgaatgccaaaggtcgtcgatgcggtctttttcgacgtaatttttgcgggggatttttcgcgtgtatattacatggctccgcctcgttaaaaacctcaccccccgggaggaaaagagtgcgggccggaataaaactgttttgcgaattacaagggcgagctggccctgaggagtcaaacaaaaaatttgcgaag

SEQ ID NO: 101481 - DNA, 546 bp, Zea Mays
tctgaaattcagattaacaatggaatggcatggagttagggctcgaatttaagcatgatccagtaagaatttgttttggaatactataacaaagatgaagctggtatgttggactacaactttgctacagaaccttggattggttgccaagcgaatttaggagaaaatccagcttcaagttactctgtcaggtcaaccggagatttatgccatggtacactaactgaagaagataccgattcatcccccctcactgccgacgatctctacgccgtgattcacgccgtcgccgcgattcgtgttcactggcgggtggataactatggtaaagtaaagatctgggcgtgggatcagctcgagctcggccgcggctaagcccgccgtacccccttgctcatcggtggatcaggtaagacctcgccgccgttgatcgatcactgtcgtgcgccgcgtgtccagacactttactacgtcacgattagtcatgttaggggatccggtgatcgccggagggagcgccacggtgaaaaccactaagcgcttgca

SEQ ID NO: 101482 - DNA, 893 bp, Zea Mays
aatgaatcaatttggagcccaattgaattaaatatgaatttcacaagtttctataattatttgtgtattgaaaatcaatttctaaatttatttatctgatttttctatctcctgggctgagcacctaactccaggaaggtcaggggctaacctacaaaaattccccagacacaggcttcatcctccctggacggcgggttgattatgtaaaattctagggtctcttatgcataagtcgctcggcgaaggggtatgaagcgatacagaccgcccgatccaaccacaacggcccagattagattatcataatatccgaatcggtatcccccgctggcgatcggatcccgatccaacggtcttggtttacttcacctaaattgttataccctggataatctgcgccctccatcggccgatcgacgaccctgattcggtaggatgaaaggggaagcccaacctgatctcagccgtgcgcgaggaaatcaataacgcacgcgatgtcatcttcccagatctaatcttattcgttccctccccatccaacggctaccagcccatcctctatctcccaacatcagccgaaccccgacagcagagcaggagcgtcacagcggtgccatcgacgagcaacccagccaggagaatcctcccgcccagacccaaattgaaaggtgccacacgcagcaaagattatggtgaaacgagggagctagttcttacctgtaaccaagcaatacagagcccagatgacccgacggcgatctcacccttcaaatcgttccccgcacgattaccccacggttccgttgagcaagagcgaggtagacaagggttgaagggtccccggggtcccatttatacactgctagtaagtccgattgagccgaatttgt

SEQ ID NO: 101483 - DNA, 414 bp, Zea Mays
ctaccccaatgtcacaaccggaggtaggaagtccggcggtcaccggagttgagcgcgaagaactgggagcgaagaacaggacagaaattcagaagagaagaaaggtacgagcagtattgttttttctttcttgtcctccagaactattacaagcctagcttatatatcagccggccaccacaatcacaatacggcccaatacggcccaccagctacatttcaaaattgtgattccagaattaactcccgtgctcagtcgccaccatctccattcgtgacaatacctccccctgaagaaccagctggtccccagatggttgcttgtggaaaacgagatttgagcacagtataatcctcccaagaagccatgtcggctggaaaacccatccatttgatcaacacttgagttacagc

SEQ ID NO: 101484 - DNA, 616 bp, Zea Mays
ggccagcatcgcgacaacgatgagtgggtgagtgcactaggaaggggcaggggtggtggcattgcacattggtgagggagaggcagcaggtggtggtgggcgacatcaggaacgaggcatcaaggcaaactggcttaagcggcgtcgggaagaatggtgccaaactgatagttgagaggactagaccgaggagtacgatagttaggaggacatgtcgatccgatgaggaggctcagaacagggttattttcgccacccaaaacttcacttttttcattacataagaataaatacacattaggtataactggttataaaaatttgaggggtgacattgctcattttgcgcccccatgggtgcgcccctaggtccacctaaaactccaggagccatccacactaaaataatagtccatatcacatacaaacttttttatgttttacttatgcacataaatcttaggagataaaatttccaatggcacctattgaggacctctcgatgtttcaaaagaagcacaacagggaaacatgattactgatttacatcattctctccttcgaaggtactgaaggggagaaggaatattaagaaagaactcgtaatgaaatcaat

SEQ ID NO: 101485 - DNA, 956 bp, Zea Mays
caaaatttcagctggtatgaagggctgcaagtttactactggcgaattagcaagttcctatatagaaatttgtgttctgggtgctacaagttggactgtcaggagctctgaatcgcagttccgatggtacagtgtcccgatcaggtcgccagctctatccctcgtcgccgacgagccgcgtgtggattcatgcttttgccgccgtgattcgtgctcggatcggttggatagcgcttggggttgagtaaatatcatcgccgtggatatactccggccactaaactactccgaccaccgtaccgagctagtcacggatgcttcggatgtgttcgccggagatagccgcttcacggccttgcgccacgtgcctgggcacatttaccgcatcgccgtgactcgcttaagccatccgatcatcgccggggagcccgccacggtattctccacgaatccactgcgctagtgacctcccattcctctgaccgccgcgtgtctcagtccaaattcaccggccactgctcttgcctgctataaattgagcccgtcgtgagctccgtagggtaatcacgcatctaagccgccaagtcttgtcttcaattgtccactaacgcccgtcaattgctcagtttccccaatccgtgtttccgcaaccacgaaagagacctcaccgtggtcagcttgctccaggttagttcaagctccctggacgtttgttctagtctccttaagaccccctaatgctgttcgacccctttgattgaactagaccaccctggattaccgtgaacgcatgtgttcatcctttgtccgtgctgtctccgtggacaggatgatttagagtcgtagtcgtgaaattgagtgagggaaatgatcggcgggtcttgaatttggtttctgccaaagtagggcgccagtccgcaagtaattttgccggtataagatcgccggagtgcggc

SEQ ID NO: 101486 - DNA, 569 bp, Zea Mays
caccctgtgtgatgagttgtgcaaattgaacctagaggttgtttcctcgggtgatttaaattatatctcggtggagcccacactgcaagagcaaatagtcagggcacagattgaagacaagggtgtgcaggttatcaaagaaatgatcaagcagaaggcggagaaatacaagtgcttccatcaggacagcaaggggattttatggtttggagattgattggttgttcccaaggaccctgaactcagaaagaggatattggatgaagctcacctttccaaattctccatgcaccctggtagcaacaagatgtaccatgatctcagatccttatactggtggaccaggatgaagagggaaattgccaagtatatatccgagtgtgacacctgccaaaggattaaagccagtcatttgaaggcagcagaccctttgcaaccccttcccataccatcttggaaatgggaggacatttgcatggactttatcgtgggattgcccaatacctttaggcaccatgattcaatttgggttattgtggacagattgaccaagaccactcatttcttac

SEQ ID NO: 101487 - DNA, 439 bp, Zea Mays
ggcggttgtggagcacatcctcagggccaacttcaccaactactacaaggacgctcggggacctgcttcatcaacgattagctcgaggacaacatcttcgtcgtcgtcggggacctgcttcatcaacagctagaacctgctcggggacaacatcttcgtcgtcaacgacgtcaagtggagggagcagatgtaggagacttttacaacgtggtggtgcaaaggttgggctactacctctttgaaaattaatagatctaggtttattatcaaggaaatgcttctttaggagactttggatgtacttgcagttaaatgagaaatttgtcagtatgcttgattatctgtcatttcaaaatcatcggtgtatagcttttgagatgcttggtgaaaacctataaccttacttctcaaaaatgttctatgtaaaagcttcatcttg

SEQ ID NO: 101488 - DNA, 287 bp, Zea Mays
ccaaatcaacttaagaataaaagatccactaatttgatatctaaagaataatgtctaaaacaaataaggatttcaaaaaagggaaaaatgttgaaaccctagaccaaccctaaataagccacttaagtagaaagggagaaaaggggttaaagaaccatgaaaaacatagaatcatggcttaggccaattatagaaattgaaatacactaactaagctacaataaagattataaaagtttggccaaaatagtttgttaaaaactccaagcaagccattcaagtggagg

SEQ ID NO: 101489 - DNA, 609 bp, Zea Mays
tcacatgtaatgaataggagaggacacaaaccattgagattatctatatcctctttattacatttttgagtattacagaggaagaggaacgaggacggagagtgtcgactgcaaacctagagaggcgaaggaagcgagggtcctcccaagcaagtagacgaaacgaagaccaaatgtcagctagaagtatctagagacgggatgtgttggtacgatagaagccgtaggtggatgaacgaatgcatgcatgtaattgtgaagacatggatagcctcgttgggcccatttccatccggctttaacagtaaggaaacaccatgtgcacacattgctggttcttatggatacttatacattgctccaggtaaacaaatctttttgccgttgttattagtcatcattgttcttatttcttcgccaattagactgtattggtgtagaagaacaacaatcccaattaatgtcacaactcacatctcagtagctgtttgctagtgcactagtgttgttgttaagcgaaaatctttgacatgtggttgcttctaacaaacttaaccctgttcttcatcaattgcttgtagcttaagctggcaacgatgatcacttttg

SEQ ID NO: 101490 - DNA, 328 bp, Zea Mays
atgtatcgaagctacaagcgatgaacttcttgggccatattcaaaggcagaagataatgcgctatctgcggccttcggaggctggaagaagaagaggctgaatagagtcttcgacgctattgggtttatgtaccctgattaccgctacccgtcgcgggggcagaagaggaagagtgccactttcgggaaagatgctgctccagctgctccaagcgagcccgtgccgaagaggataaaggtgaaggtccttactcaccggccgcgatatattgaaccggccgaagtgcccgaatttggcggtgagacctcttcggctactgaagccaaa

SEQ ID NO: 101491 - DNA, 470 bp, Zea Mays
gctagatatccaagatgatgactacagatcgctacacaaacaactgagctcaacatcaaaacgctccaaaaaccaaaaaaattggagctctccaatttaattaggctattgtgagcagattgtgcatatagtctattttgcactgtagagtactccctccgtccacgtaaaagtgtcgatttagccctttcaacttgtccacgtaaaaacgacgctccaccgttctcacagccgtatctttctcgaaccattgatcttccaaggaacgcagtatttggcgccaaggaaaaagttgtagaagatgagcggtgaaggccgggacgtgtgcctggtgcaggaaacgagaagcggtgacataaattgtaattaagtctggaatgtgatcaagctttaaactaggggcacatgcgtcttttcccttgtatcttattctgtctgagaaaaactaaatcgccacttttacgtggacg

SEQ ID NO: 101492 - DNA, 465 bp, Zea Mays
gttcccgatgacattgttgtagatgtcaaggctacgcctgatgcttcgagtcgcccttcctcctcgattgctcctgcgaaagacattgccaaatagagatgttttgctgtgtttagaagatactgaatgtatttgtgaactatatgtgtgtgtgatcagtgcgcttgaatacttggtaggatattagaatgtgttcttggtgctgaaagctataacattttgtttctgttgttaaaattcaacagtcgctatgaacatttgcagaagtaagtgtggcatgctggtttttggaatcttttcttaatttatgccaattgatcagctggtagggcatagagatcgccctatgacgagtaagcgtgagcatgttgcaccatcttaagtctttgccggcttaagtcgattgctccgttagtagggtatagtggtcaccctaagtcgagtaagcgcgagcatgttgcaccg

SEQ ID NO: 101493 - DNA, 503 bp, Zea Mays
ttaggtcttacaaatcctaccccccttaacagaaatctcgtccccgagatttgtaagaaaaggatataggaagagtggtttgcaatttagctttcagtttctaattatttcaaaaatcaagagcctctattttttttattagtgagtgattaggaaagcatgggtatccatatgtatagtcattttattatgtaggacgaaagatgggttggttagggcaagaatatcctggtgtaagaaagtttagggtgagaaagaactccttgttgggtggtaatgcatctgaagatcgagtttgacttctctccttccttgacggggttgatcttgtccttttccagtcttgctctttggtgtctccatccgggtttgggacaagaagctaagatagatctgttatgtaggtcaagttgttgggtatggccaagttgatttaggtcaccagtttaagcttaagtggatttggagtatggctttatcctttgtaccagcattaagtaact

SEQ ID NO: 101494 - DNA, 402 bp, Zea Mays
gttgttgatgaaaatgacagggacgaagaagatgaggtccctctgacccggaagaacagtcgacggtatattgccagtggggagagtagtggagttccttctcctgctttgtcagccctcgttggcttacaggagttatctctggccaattttgatcagaccctagaggatatggttccagaagaccttttgttagagccagcggacgacggtgtgatggaggtttgtgccgacgtgctcgatgctgggttgaggtcatcccgcgcctcatcgaccttagagcgcggtcttgagggccaggagactgatttggatcatctcggtcccatgaaagcaactgaggggcctttagccttagaggtggccattgcagagaactcggctctcaaggatggtgttgac

SEQ ID NO: 101495 - DNA, 295 bp, Zea Mays
gaagaatacgccatttcattttcaaaactccaaatgaacgttcaatgatgtttctaagtgatgagtgagcatggttgaacacctccttcaatccaatcggttgactgctattttgaaattctagaacgtggtacctttgacctttgtacggtgctagataaccctttcgatttggataacctgaatcaacaagatagtactttccttgaggaggatgtggaaaatcatccttgtacttgttccacaaagtgtctctccatatccgtgtgtcatgagcagacccaggccatcctgc

SEQ ID NO: 101496 - DNA, 546 bp, Zea Mays
gatgatgtagtcctcttcttgcgaccagctgtcgaagatatagcaaccatagtggatattcttcacctattcgtcgtggcttccgggctgcataataatgtccagaagtctaatgtatatcccattcgttgcgacgagagtgacattgcagttgtgcaaggtttgctgccgtgtggaatttcgtccttcccttgtaaatatcttggacttccattaacggtgcggaagataaccaaggaacaggcgcagccaattatcgacaaatttgcaaatcagcttcctggatggaaggcagacttgatgacaagggttgggcgaatagttcaagtgcggtttgtgcttactgggatgttcatctacttagcaatggcaattgatctcccaacttatatcacaaaagcaatcgataaaaatccgaagaggctttctttggagaggtcgcaaagagataaatggggggcattgccttgtttcttggagcaaagtttgtcgacctcttgatttgggtggtcttggtatttcaagcattaaggagctgagttggac

SEQ ID NO: 101497 - DNA, 736 bp, Zea Mays
gccttaagtcgttgccgacataagccgattgctccgttagcagggcatagtggtcaccctgggttaagtaagaatgcagattgacaatgaacaaattgagcgctctcgaagtcttcttattgatgatatgtttcccagtttacagagtacattgtcgtcccaatagcttatggaatacagctaggggtaaaacttcatgaggtgttctatgttccatgagttcccaatttctgtgccatccatctgagtgagacgatatgatcccggccgagtgacttctgctactatgaatggtccttcccatacaggtgacaacttgtgccgcccttcccccgtcagaattcggcggatgacgagatctcccactgcgaaggatcgatgcctcatggtcttatcgtgatagcgcctcagggtttgctggtaccgtgctgattgaatcaccgtgttcagtcgttcttcttcgagtacatcaacatcctccagcctagtagcctcggcttctgctatattttcgaagatcagccttggcgccccaaacttgagatcagcaggtagcacagcctctgaaccatagaccatgaagaaaggggtatttccatgcagagctcgactgggttgggttcttaagctccaaacgatgtagggcaactcccttatccatttccctacaaatttttcctgagggcctccaatatcatcccgttagctctttcaacctgcccgttggctcttgggt

SEQ ID NO: 101498 - DNA, 345 bp, Zea Mays
ttttctgaagctcatggggataaaacagtttaggagcaatatgcttattaatattgctcttgatataacatgtttccatctaaacaacacaagctgaattatcctcatagataatagttggtgactcaattgacaaataccacaagttgtgagtatatcattcaccattctacgaagccatacacattcacgagatgcttcaaataatgcaattatttcagaatggttggtggacgtggtcactaaagtatgtttagaagacttccacgagatggcagttccaccttgtaaaaatacgaatcctgtttgcgatctgccattgtggggaccagaaaaatagccagc

SEQ ID NO: 101499 - DNA, 1249 bp, Zea Mays
cttctttcttgaggagctttgttaatggagcagcgattactccaaaatccttgatgaatttccggtaatagcctgctagtcccaaaaatcctcgcagacctcgtggtgattttgggattggccatgatgttactgcctcaatcttgctaatgtccatggccacccctttggctgatattatgtgtcccaaataagcaacaaatgtagtcccgaagttacacttggactgtttgacaaagagcttgttggtgtgtagagtttctaggactgccttgacatgtattaggtgttctgtccatgttgcattgtatatgagaatgtcatcaaagaatacgaggacaaaacgacggagaaaccctcccagtacttcattcattaaagcctgaaatgttgttggggcatttgagaggccaaatggcataaccaaaaactcaaaatgcccatggtgtgtccggaaggcagttttgtggacatcatctgggtgaacccgaacctggtgataaccagaacggaggtccaacttagtgaaatattttgccccttgaagctcatcgagtagttcatcgaccaccggtacagggaatttatccttgactgttttctcattgagtgccctgtagtcgatgcagaaacgccatgaattatctggtttctttactagaaggacaggtgctgaaaaagctgaggtgctatatctgataatgccttgctctaacatggtcgtgcaccgtgcctcaagctcatccttttgaagctgtgggtactattcctggcagaagatggatcctgtgatcacaccttctagctgggggaaggccactaggtgtggtaaacacttcctggaactgctgtagcaagaggtccatcataggttttgaatcgtcacttgctgcattgactgttcggaccgccgggtacatgtgaatgtcatctcgtgaggagcccatgcctttccacagaatccgcttgcaagtcttccagatcccaaagggttggccccagggtgcgcaaaaactggactccgaggataatatcgaaggagtccagtggaatatcatatgcgtcaattaggaagtcctcgaggccgatagtcatgctaatgctgtttgggaacctgcaacatgagaccttgtcaccgtttgccaccgtggcctggagataaagttgttagtagaacccgtgtccagtagtgctgtgagagcttgtcctttgatagatacctccagctgcattgtgccctcagatcgag

SEQ ID NO: 101500 - DNA, 375 bp, Zea Mays
tcggcttcgtataccccgattaccgctacccagtgcggggataggggaaaaagaggaaaactgttgcttcggccaccccagttgagcctgtgccgaagggcaaaaaggtgaaggttcttacccaccggccgcgttacattgaaccggctgtggtgcctgagtttggcgtagggacctcttctgctaccgaaataaaagaaactgtcccgactgcgtagagcattgaagagctagctgtaatgccgaaggtgcttacagtcaagctggttgaaacgaaggttggtaaggctgaagagccaaaaattgaagaaataatgaagatgccagagattttgagccctccaacagaggcaacagtaccgaaggtacaaatgg

SEQ ID NO: 101501 - DNA, 301 bp, Zea Mays
ggatcacaagttcataatagaaaaggattggcactctagtgttccctaggtctagggtagaggactacacaaagtgattcactatccactaatcaggtctaagttagtggtggggttaaatcattacatgattttaagtccctaaacttaggtgtttaagttcataaacttaggtgctccaacttttattaaagcctactattttctatttatctcaaatagggttccaataaccttaatcttatcctaatgatcaactattaattgggacataaaaacagcagggaaacattggttaaat

SEQ ID NO: 101502 - DNA, 1383 bp, Zea Mays
ccagctacctcggtatgtgacgccaaccacctcctcgctcgacacctgaacaatgagatgattatgtgcgtcggtgtagagacttgtgtagatggccgcaaccccaggtttgctgccaacaacgacgacgagtttctaggtctcttccccgccgagagtcaccacgtgcgctccgcctacacggccaccgataatgacaccgaccatcgacatttccacgctggccctctttgcctgctgcagcatcccttccgcatcatcgccgccgagaagctccgcggccttatcttctatgcccagtacatatgatctgtagtgcacgaagcattaattaacgctcggctgacatgcagtttgtgccaccctaaacaacatggagattctgctcgtcggtggggagatcatggtggatggccacatccccaccgctgcagccattgacgacaccaagcttcgatgtcgcgtgcgctcctttaccaggcctaccgcagggaacatcttctatctcggatctctcggtacgtaacgcccactaactcctcgctcgacatccatctgaacatggagtgatggagaaaatgtaagatgatcatgtgtgtgtcgctgcaaaggagacttggtacgtcggtggggagatcatggttggccgcagccccagcaatgagcatcgacaagacctcgccgagactcccagctacctcggtatgtgatgccaatcatctcctcgctcgacacatgaacaatgagatgattatgtgcgtcgatgcagagacttgtgtagatggccacagccccaggtttgctgccaacaacgacgacgagtttctaggtctcctccctgcctagagtcaccacgtgcgctccgtctacacggccaccaataacgacaccgaccatcgacgtttccacgctggccctatttgcctgctgcagcatcccttctgcatcatcgccgccgagaagctccccggccttttcttctatgcccggtacatatgatctgtagtgcgcgaagcattaattaacactcggctgacatgcagtttactccaccctaaacaacatggagattctgctcgttggtggggagattgtggtggatggccacagccccaccgctgctgccattgacgacaccaagcttcgatgtcgcgtgcgctcctttacctaccgcagggaacatcttctatctcggatctctcggtatgtaacgcccactaactcctcgctctacatccatctgaacatggagtgatggagaagatgtaagatgatcgtgtgtgtgtcgctgcaaaggagactcggtacgtcggtggggtgatcatggttggccgcagccccagcaatgagcatcgacaagacctcgccgagactcccagctac

SEQ ID NO: 101503 - DNA, 356 bp, Zea Mays
gcgcattacgtccatgcacaagtctacaccaagaaactatccgcgcacagaccagctacaggcgcaaccagaccaacataataaatgcgcccgaccaagcgcacaacgtccctatagacatagccggatgcgcgaaggcacacggcctcatcatacaaactatagtaacatacttacagcgagggcatcacaccttacatcggttcaaccttcggaatgattcccatctccctatagttaaataacattatcctaagctcctcaccctcaaaaagacctcgcaactccccctcacctacactcgccccagccggcgaggacaacaattcctgcttgccagccctgcccacacgaag

SEQ ID NO: 101504 - DNA, 548 bp, Zea Mays
gaactcaatgcctcgttgcctgggacaaagtgtgcaatactcgaggcaatggaagccttggggtgaaggacttagacaccctcagcgcttgtctcctccttgaagttgctccaccccctacacactacctcaactcgtcgtgggcgctctaggttcgcaagcatgtctgcttacctaccctgtccgacgatttgcatgggaccaggacatcacaacctataaagtgaaagacgggtgcgccatggccctctggttcgacgagtagtgcggtgacggtgaccttgccactcagttccgggcattgctccctcactgctccaagcgggagggtcaatgttcatgaggtcctcttgatgggcattgacaacatccaagtcacgcgcctctcccctcaagccaccgacgagctccaatgcctacgcgccatcgtctcctccatcgaactcgttggcgaccatgacatatatcattgtcttctatctagcgatgtcgacaagctccactctggccgactctatgacatcatgagaaaaaatgtgacctcaccg

SEQ ID NO: 101505 - DNA, 288 bp, Zea Mays
caatcaggtggttgtacgaccaaactcatcaaccttaggttttctgctacaaatcattggacaattcaggcccgatcactggacaatatctcttcttgaggcctaggaacaagaggcacaacacctataggcctcgcatgatgtcttcgaacaagaagatcatgaacaccataagaaaggtggttcatgttatctctactcggcacataaatccaccactcatctctcttcctcctaaagcaaaaaacagttagatgcccatccttctcacaatagtcacaatagaat

SEQ ID NO: 101506 - DNA, 566 bp, Zea Mays
gttctatatacagaattgtgattggcctgcaagttgttgttcatatggtgagggtcccagtatgaagggttgaggcttcacctagtgaattgacaatggagttgtcaaagcaatgaagcccgaaggttgtgtctttgatttgctgatggtggacatgctgtagaatgtagggagagtagtaggaagatgtgtggaaaacctccttcgactgattttgccttgcttcaacaatttccttctgcttttgtataattatttggaaactcttcgtggtgtggcccttattttctccacaaaagaggcagaacaacttccttggttgagagttgtatcttcctccaaagcttcgaactcctcttcctcctcttggagctagtgggcaaaagttgttttgagaagattgctgttgggtccctgtctcatgaggttgattcttctatcattggggctggctagttttgtcttcatgctggcttgaattatgaatctttgtgatatgctttgagtggaaccttcctccgaagcccctagtcatctccacatatctttgggcatctttccttctt

SEQ ID NO: 101507 - DNA, 631 bp, Zea Mays
attttatcatcggaaacgggttcgggtccggaatagtcgggaacggaaacgggagcgggataaacggaattgcgaaaacgaacggaaacggaaatactaacggaaactcataatttaatacaaatagaaatgttatcgatgtttgattagtgattgattgacagaacgataatataaaacaaatagatatagagaggcaacattctattgttgtttggttgctaaatgtgtacatttagctacatccaatgttgtttaagacttcagatcacttatcatttgaaaagagccgatggttacaatgaccaattgtgctataatttgtcacctaaatacacgaggatttagtttatatactaatgcatattaggctcgtcccatatttgtcaaatacggaataaatacgggttcaatccggaaaaaaatgggatcccgcaaaaacggacggaataagccctctcccgtttccgtcccgtttccatatttttccgtaaatacggaaacggtcgggtcaaatgtagaaaacggtacgggtcggtacgggattttttccgtccgttttcaaccctagaagggatcgaaggccaggcgtccgtgtcccccctcctcacgcacgtacgtgcaggtccat

SEQ ID NO: 101508 - DNA, 555 bp, Zea Mays
gcgtgaccgaaactgaaggcattcaaatccttcgcgaagtccacagcggaatttgcggctcccactcagggcccagggcccttgctgccaaggtgatccgtcaaggattttattggcccgtgataatctgtgcggccaatcgagtcacgaggccttgcgaagcttgccagaagttttctccccactcgagcaacccttcgcagttcaccaagctgatcgcccacacatggccacttcaacgctggggctggatattgtcgggccactacctacagctcaagggaacctcaagttcacaccttcgtcgccgtcgaatacttcaccaagtggattgaggccagggcagtatccacaataacgtcgaagaccacccagaagttcttctggcaaaacattgtttgccgattcggagtcccatctgagctcacagtcgacaacagcaaacagttcgatagccaggacttctgcctccccatcggcaccaagcctgccttcgcctcgatataccacccacaatccaacagcgtcgtcgagcgtgccaacggcaagattttc

SEQ ID NO: 101509 - DNA, 826 bp, Zea Mays
tatatatagatgttaaccttagaaaaataaaaccttagaggagctttgattgttgcattcatgccgatgcatagtgtttatgagtgtaaaatgttatcgaaataggttaaaatatctcgaggatgttcccaagagttgttgaaatcttcggaacgtttctttgggtgttaaatatgaacttaagttgttctaatattatttaaatacataaaaaattagtatttgcgaaaacagtaaaatttcgaaaactcgataatatacatatatcttcctctcgtcgagcttattccagatctggtgttctttttcgcgagatcaccgaactgattctcctcgcgaacgacatgtcactcgcatctgctatccccgtctaccactttgtctaccctgtctatcctcttgtctcgcctcttcgtataacgttcctcatgctgtgcttgcaaccgcctgttccccatcacttgtttttcttgctatcatcccaggccagcatgtcagtttcatcttctcagaccatcgcactggtcccatctatcattatcttcatcttttttttatcacgcaggctcatatgttgcgatggtttttctttgtcttcgtttgatttccaaacttccctcggctccgctggctgggttcgaacccaccgcaaaatctgcaaccacctcagccccacttttctcctcacgccaacaccgcggttgcccattcgcccacgaaaaagggtcacgttctatgcagtttcgcgtagcacacacgactctccctcttccccctcgttcccagaatgcagcagcactccatctccatcacatatggcgccctt

SEQ ID NO: 101510 - DNA, 539 bp, Zea Mays
gcaaagttgtcggtgttggtccttgcggcttcgaggttgtcattacaggtgaaaaacagtatgatgcttccaaacataacctaactagttaaactgaattcatggtcaactcacttaaagctgcctccattaattgccactggaatttcggaagtacaagaacataagatctagctcactagattactcaacctcctactgcaaaatggcattattgagtacacggttgcaagggtaacaatcaacatattctagtaatttataacttttcctatccagtgggcagtggttaatgatcaattcaattgaagagccaggaattgccaccagaacgatgaatcgaatggaatagaggaagtgcgtccaggcattactcaaacctactactgcagaatgctacaattgagtatatcattgcaagcaagcacagcactgaagttagcaaaccccagcgcccacagtcatctgcactagcagcgtaaataagaaaaaagagatatttgaagaaatggaggcaggggcggggcagtggacctgat

SEQ ID NO: 101511 - DNA, 384 bp, Zea Mays
atcattaattaattggattcatccataaaacatgaaacgaattgatgtgcatgaaaataaaacaaacattgcagcaataggtaccttgaggtgagacaactgtgtttctaaataatctttaaattagatcaactactacaagtccaaatcttggaattcctaagcttttcttcaaatccggtctatattacaaaattgaggcaaaaaatcgcatcaaaatgagaaagaaaacaaacggagatcatatatatgcataaactattgaaatcaatcaataaattcaaaaacaaaaccttctccctgtagatctcaaaaaacactcgccgccgcttcagtgctgcgcttgttctgggagttagggttctggaacccgtgggctagtcc

SEQ ID NO: 101512 - DNA, 480 bp, Zea Mays
tacaagggacactggatcctcaaccatcatgctcgagacagttacctcatatgacttgtggattgacatattttttgggggtcacggggtcgaacaacaacgtgaacatgctcaaccagccgttgttgctcactgataatgtgaacttcacggtgaatggtcatgagtacaaccaagggtactccctcgccgatggcatcaaccctcagtggttggtgtttatgagaaccattctcctcctatagactcctaagcagcagatgtttgttgtagggcatgagggcgcatggaaggacatagagagcatttcagggtccttaaggctcgattatatattcttgctaccccatgccattcctttttctcaccaagtattcagtgtgatcatgtgtgcatgtatcatacgttgtggacgactacaatatagtcgagtcctccattgcagcaccaaccatcacccctcaagcacctatggtcttt

SEQ ID NO: 101513 - DNA, 795 bp, Zea Mays
tctcaatcgaaaagcttgagctcctggaattaagggtatggcatgatcaatccatctctttggggggtaactcctttggctcttcgaatagatgagtaaattgattaaccaattctgtaaccacaacaggcatctccatttgctgatcagacaaagtcacctgtaactccagcaactgctcaatggcttcttgtttgataagagaatcaaactgaatacaactaagtgttggatatgactgggtgttaggcaagacaccctgtaaatgtactggttttcccttatacatgaacttcaaccacttgtgtccccaatgtatcgacatgggactatatttctccaaccaatccattcccagtattaaatcataaccacttaacgacagtattttaaaatcatggacaaaagtattgcccccacacagccattggcaatccggcattacatgtgtactccataactttcttccatcagctacctttacctgcaacggcactgataaaggctgcactcctgtcattactcctgtcaaatgagtgttcataaagcttgctgaacttccagaatccactagtactagaacttgctgacagtagatagatgcccacaacctgatagttttgtttccttcgctgcctgacactgctgctatggatattgccagcacactttcctgctcatgccccatgacggtctcctcagattccaccaccaagtcagggtcagtaatgcttaacgcccacatctcctccactagatgtaaaggcactgtgttggagcatttgtgaagttggc

SEQ ID NO: 101514 - DNA, 695 bp, Zea Mays
tactgcgtcgtgttgccagggcgcagccaatgccaaagctcagccgattattaatttagtccgatcggcatgtctaggtacccaccatacaatttaatcgctcgatgtgagttcaaaaagctcaacgcaacacagaaatttagagcgatttaaatattctgagtatatccttcacttatgttttaataattttctgctaattatttagcacatgaaataatattaatgcagaaaaaataagacaccggaattaatgtctgaacataacatatgaggtgtaaaaaagatattttctcgtatttaagcatgtatttttctactaattacgacaagaaataatttagtatcaacaatagtctcaagaagctaatgcgctgtgcacaggaattcacggcttaaaaatgcataaacatctataacgccagatattaacgatgcttcttagctgcatttttgttctaataaatgaatgagtgactaaataaataacggaaacatgcatggggccatacacatgcacgtttttttatctcaaccatgcaatcgattgcacgtcatcgcccttttcctcgctaccagccaacagccgcagtagcacgatgtgcatgcacgtactgcctttcctcttttttctctcaagaaaacgtcaaccctcgcacgtctctgactgccatgcaaagaaacgccaacagccc

SEQ ID NO: 101515 - DNA, 491 bp, Zea Mays
tgtccggactcatatcgtgtacctgataggacgcaggaggtgcaatgtgcccgtgctaaagatggggctgaaaaacaagtacaccggatgcgtatgtgtccaaaagacaagagcaccgagtacatccaataagccatgcagcttgtacgcgagaggttacgtacaagtatcggatcccgcatcgaacaacatgctcagagaggttgcacatgcaaccgagatggatataacccatccaatatattcgatgtcacaccaaaaccaacctaaggaacaacatcatcatttactaaaagacaaaccagacacaggcaaaccttaaaccgagtctcataactctaccgatgccttgggggctattgatgtgtccctataccaggggttacctaagattgtccaaaaagataattgtgccacctaacatagccttggcctagttacccctaccaagtcgaccccaaccagagctcccccccccactcttgacctag

SEQ ID NO: 101516 - DNA, 449 bp, Zea Mays
ttaaaaacgaatttctaatattatttctctatttttaatcttctccggactaggactcaatttctggaaaaatcaagggtctctgcgcaagataacctagacacagagaatagttccactggatggcgggtttattatgtctattcctggggtctcttttgtaaaacggcttcagcgaaggggtatggttatatatggccgcacgattagaatcagtggcgcggattagaccattcctatacatgaaccggtatacgctggtggccgctagatcggagatcgacggctacaacttaatgaaacacgatatgttctaatccgcaggataccgatctgacggcacggatccaatcgcctaaagcggtacaccccaaactaatctccaccgcccatccaaatcctacggccaggacccaatttctcctttcccccaaacaaacactgcgccg

SEQ ID NO: 101517 - DNA, 480 bp, Zea Mays
tgcagccggactagcacaacaagtgcgaaaaatcgaagtctttcgcaaagactatccgtgcaaaagtcgcctaagggtgcagccggactagcacaacgagtgcgaaaaatcgaagtcttttgcgaagactatcagtgcgaaagtcgcctaagggtgcagccggactagcacaacaagtgcgaaaaatcgaagtctttcgcaaagactatccatgcaaaagttgcctaagggtgcagccggactagcacaacgagtgcgaaaaatcgaagtctttcgggaagactatccgtgcaaaagtcgcctaagggtgcagccggactagcacaacaagtgcgaaaaatcgaagtctttcgcgaagactatccgtacaaaagtcacccaagaccgcagccggaccaagcttaacaagtgcgaaaaagactacaccaaactgtccgcgcaaagaccgactacacgcgcaccagaccaacataacaaaat

SEQ ID NO: 101518 - DNA, 684 bp, Zea Mays
tgagtgtcatttttgtaactaagttacatagtgaagtaaggttactaaccgattgacaatattattatgagtctaatgcaattggaatggatcaattccgagctagaatgaggtagatatgaattttgcaagttcttgggtttattttcctatacattaacccattttcgaatttaattcctaattttatcggactgctgtcacaaaattatgaaagcctagggtttatcttataaatatcagggcccaactgtaatttcttttcactggaataggaccacgggtttattttataaaaacgcagggactcttctgaaaagttgctgccgcgaaggggtatcttcacatgacagccgtccgatctgcatcccacgaactaggttagatccgcacaccagaactggtatccatttatgaccgcatgatacgagatctacgacccatattttcttaagtccgatccgatatcacccatccgatcaccatgcaacggtccggatcgactcacgcgaagggatacatgcattctgttcacacccgcatgataccggatcaacggcccaacaccatctccttcctccaccagccgggcggcggcacagagtacgacgaagctcccaccggcgcgccatgccccgaccagcgaccataacggtcgacttccgaatccggcagagcctaaac

SEQ ID NO: 101519 - DNA, 416 bp, Zea Mays
caattctgcacggggcggaagcctatcgagatcctcgcgctttagagttcgtcggtgcagttcttgctggagttgggcgaggtaggcctgctccctcatttggcaccatcggagaagatcttttctcggatgggtccgctatgcggtgcaagacgccttcctaatctgcaatgcaggagagggatcagaagtagaagatctctccatcattgaaggtgactgggatgttgaagatgatagccatggagtcgttgtagatcaacctcgcaccccctacctggcgcaccagctatcggtgtttgtggcccgactgcgcaccacagggttacccacatgatgcttttgagtaggatggcgtcgttgaatgcaactcgatggtacaagcaggagcacgtcggacttgcacagggatttat

SEQ ID NO: 101520 - DNA, 294 bp, Zea Mays
aaaagttatgcctgttttatggaaggtacctcaagttatggttttcaagggcacaaattggtaggaaccgtagcggcggttatagagcacagggcacaaacctccctggtataagcaataggtaagcgccaaatgatgaaacaaggaggggctgcaatgcaatgcggcttgcaaaataatctagggctagcgtggcgataattcacacaaggcggctagcgagggcaaatcgagtaatgtggtgtctcgacttgtaatctgggtaaggtggatgggctagcggcggaaacaaat

SEQ ID NO: 101521 - DNA, 569 bp, Zea Mays
tctcagatcacgagccaaccgggatgtaaaaaatcatcgccagtggcctggggtaataggatcattactatgccatgaacccaccttcagcatgcgcgaagaagtttcccggagctcgggcaaagacatcacttccccgggaaccgcgcatatccccattaactcctcaacaaaaatcccataggcccttggcccagtctcatcgtcccccatacctaatttcctttttcgagtggctgcaaccagagccttcccctttgaggtgccctcttcagcccgaggcttcacttgcttgccgcgatcatcaccgacgtcagtggagtccccctccgggtagggaccatatggcaaactatatattcaactcaaagacacggttcaacctcacgttggaaccgcggatatcccagctttttaacatttcagtctttggcgcatattttccgacaattttaacagcctctgactccacttcccgcacaaaagcggtcgcatcccgcccacgcaacagcgaaggttgggcttcgcaccagtttatcccccagggttggcatccgacgaggttgtca

SEQ ID NO: 101522 - DNA, 468 bp, Zea Mays
acctatcaaggttatcgcgagagactacaagggcacgtttttcttcctacagacaagaatcagttctcaaacacccagcaagcagtaaaaacacaacagagaaagtcaagtaaacttacttcattagccaccctttcagagtcaagatgagcactaagagaagaattcaatgagttggcatcatccaaagaagcagaaactcgagccaggtccatctgaccttgagaatacttctcctcgagctcagagtaccgccgaaccatatctagcaagaaatgattgaagaaagatattcagaaaaaagcagattaatcaaatatccaaggaggaaacagagacactaaccagcatttgccatctccaactcagatactcgccgctgaagcaacgtcggattccaacgcgtcaaagacagagccctttctgggatagaggcaccctgtgatatcagctgaccagccatctcgt

SEQ ID NO: 101523 - DNA, 281 bp, Zea Mays
caaccgctgaaaaacataaataaagttgggtgaatactttcatattctgcaatcccattctagcccgtaataagagagggacctatgtggtacatgcttggtatcgtggagctataagtcatttttattttactatagaaaaggcatcatcttggtattttaccaagagaagtggggagtagcacatttttctactctaccaccactgagtttcctactcccgtggcatcattctctttccaaaaacactcacacatttccccttaccttttgaaaataaa

SEQ ID NO: 101524 - DNA, 389 bp, Zea Mays
ccggagcaaaacgctcagaaaggcaaggctatgtccctttttcactaagagagcatcactttgcaagagccagcctgtctccaagcaagacccattcatctttttttttctttttcactctgatttgcttggatttgcatagtctatctacctccaaaaggcgagaacttttgagataattctccaaagtgacagcgaaaaactaccagcgaggaaagcccaaaagaatcggacaaaagtagcttttttcgttgttgaataatgcggaggaactgccttcgatcctgaaaaacgaactgaggtatgaaaccagaaaatggggaataaatctaataaccccaagaacaggtccccgcccaaagcatctagctggaaagaaacctgaattt

SEQ ID NO: 101525 - DNA, 324 bp, Zea Mays
ttaggtgaacaactttgcttaagtgggcaagccatgttctagtgagaaatttagagataatcatgctcaaactttggttgtgaggctgattaagttctgaatttcagacaagcagtgcaactgcaagcactttgggcatgaattaatgcatgatcgagcaagtatttgtctaggattgctataacaatattgtagctggatcttaggactataactttgttaaagggtgtcgaccatgttgctgcacaaaattggaagttattggctctgtaaattcccctgtcagaagcactgatggagcattccatggtacagtaacccgag

SEQ ID NO: 101526 - DNA, 856 bp, Zea Mays
ccttaggcgacttttgcgcggattgtcgcacgcgagggtagctagcgctgcccctcgcggtgactttgtattggtcgaatgtcgaagaccttcgatgcggtcttttttcgacgtagatttttgcgggggaatttttgcttgtatattacatggctccgcctcgttaaaaacctcaccccccgggaggaaaagagtgcgggccagaataaaattgttttgcgaattacaagggcgagctggccctgaggagtaaaacaaaaaatttgcggagattatcaatgttccaggagtgctccaagtcctcgccggatggcgttgcgagcctgtacgcgctgggggacgcctttgtcttgacgatgaaagggccctcccacttgggctccagcttgccccgggactctgtccgagctgtccgtacgagtacgaggtctccttcgctgaattccctcgggatgactgcatggtcacgccatgcttttgtttgggcttggtatttgtttagagcctgtagggcgaagacgcgatctccatcgatgaggtccttcgaagtgggctcgtccacgtcggggacagctgacgggactgtccgtggggacccatgttttatttcttgcggggtcatggcctccgatccatatagaaggcggaaaggggtgaacctagtcgccctgcactcagtcgtgtttaatgcccagaccgcttcaggtaacaaatcggcccacttgccttttttatcgtcaaggagcatcttcttgacagctgtgaaaattttgccatttgcacgttccacaactccgttggattgcgggtggtatactgaggcgaaggcaagcttggtgccaatggagaagcagaa

SEQ ID NO: 101527 - DNA, 693 bp, Zea Mays
gtgatggatgctgcatgccacccaagccaaaggctgctcgtgaagacaccgcccatgcgtacgccgtagagacacaaccactcgcatcggtatcacgcggcgcattgtacaaggagtgtgtgcggcgctgataagcatttgttcacattgttaatgcgtggagcgggtcattcatgcatgtgatgtttgaaaaaagcatgcacatgccctgtgtgtggcagggcacgccttcgccgcttccatttaatgtaggtggcaagcttgtttctagaataaggctacttccgcgtgtccacatgcacgtggcggttctagacactaacttgagaggagagggagaaccaagggcacctacttccccgaagacttgggtccctcctgccagtgttctaaatgtcaaacggagagatctgagacccatttgcggaggtccggacgactcgtagaggtctgggacccatccatgggggtttagattgcatacgtggggggtccatgacttgcccggacggtacacatggaggtctatgacctgcccatggggtttcggaaagcatacgcgagggtctgggcccacccgtgggagtcccaacccgttggtgtagtccctgagtattttcccttataggaaacgtgggagctcctgacctcctcttgagttgggatcaggccctgaggccagcgatcctgtca

SEQ ID NO: 101528 - DNA, 525 bp, Zea Mays
gtcgtgagattctttttcattctttttaatggcatcatcagccatctcactaccgtccttcatccagacattagaataaaacctcccgcctagcaaagaagcttcggccgaggggtcctccgtgtcatcagttgagaaaatatattctggctgggctacggccttaacatgttcacaaccggccttttctaaaattaagcgacccctcgttcatcggcgaatgcgcagaaatccccgcgatcgtcgagtatttcatcgaaagcttcggcttcttcgccaatccactggataactccttcgggatcaccgcgaataaatttttgttccgaagagtatgctcccacctttgcaaagctatctttcagtttcttcgcgcattctatggatgtttcatagcatctctccttggaatcccgaagctcttcaacattctttcgcaccttggatctctccatttcacttatttcttgcttagcctttgcaacttcaaaattttcattcatttcagcaagttttttcttcaaa

SEQ ID NO: 101529 - DNA, 323 bp, Zea Mays
tatgagcttccttgagaatcagttcctggatcgatttgatgtcgggaacgcacaacctatccttgaaccatatcactccttctgcatcttcacggaaatctggacctttcccatctatgatcagttgctggatctcgttgatcttctcgtcgtctttctgacccttccggatatcttattctaaggtgggttctagctcgactgtcactccttgagtgttgttcagaaatccaagattcagcctgtcaaaatcctttgctagcttgaacgacattgggtgagcggccaatatattgacttgactctttctgctcagagcatct

SEQ ID NO: 101530 - DNA, 394 bp, Zea Mays
ctgagtcataggagaatgaagatggttatgatgtgcagcaaccaattaaaaaatcagatgacattcttcaccattcggcaggtcagtcagttttgtggtctttacgttattgtaaacagtcatacacacattttcaatatcgttatgatgccaatattaaatagtttatttctcttgattaaatgttacgtaaagaaggatgtacgagtccggccactcaaactgtaccggatatgtctactccagcatcccagcatgagacgcagtagacagacacacaggtacatggattactgttaaggcaacaacatattcgtgtactattacaaagttgccctgatgaagttgacattgatccactggttcatacaaaaataacaaaacagaccaaaca

SEQ ID NO: 101531 - DNA, 377 bp, Zea Mays
gcttagtgctaagtaaagctttaaaacttcaacaagaaaatgaagataggaagaatgaactcgttgtcaataacctagaaaagagagtgaaagaacttgaaagttttctggcagagaaggattcgaaggttaaaaatgtcgaagcacacctggccgaagctcatcttcggatcaaggatcaggctgctcgcatttctgatcaagataaacagcttgaagaagttcattcaaaattaaaggaagctaaaaatcgttatgagcacgaagtcagaagcttgaaagataagatcaaggccaaagcagaaaaacattctaaattatctgaagctctaatgttgctttgggaggcatgctcaggcttcgcagctcgatgctcc

SEQ ID NO: 101532 - DNA, 699 bp, Zea Mays
ctaactcacagtaaaggaaggtgtgaaccatatggtcccactattcatgttcagaggagcgtcataatgagcctgtacagagacactagaccatcgaagatagagtacaatggccaccagaaaggttttatatagaaaaaggcatcaaactagtccaatgatggatatcaaactatatgtcatggagacgtgccccatcggttggtaatagtttgaactgacatagtagttgttaagagtcatcagactctaacataatggtctggacgtcgaatggttcgacaacacatagacaaccattgagggtgcaatgactataccttttcaaagggctataaattggaccccaaatgaacatttgagaagtgtgggagctgaggaacatatcaatagagttgaggttcatctttactagctctaggcactcaaattcttagagaatctctcggtgactagcataggtgctttgcaaaagtgctacctctaagtttatatctagtgtttaagtgcagttagtataaatcttatcccttggtatttgcatgtaccattttagttgtaacgaaggggcttgtagtcttgaaagatcatacaaactatgtttgtggtgtggatgtcatcgtatactagaaggaacgagccatgtgtcatttccaccacaaactcaatagtgaagataacagagagcattcagaaaag

SEQ ID NO: 101533 - DNA, 665 bp, Zea Mays
ttataattatggattgaattaaaatactatatcaatttagattagaaagttatccattggtttaaagaagtatctaatcacaaaactatgtgatatagtacaaataatgttgttactgcgtacacaacttgaacgggctaaattggagtttaaatggatgagatatggattaaacaagtttctagatactttattattacatttatacctaaacatagtttccaggggctaagctgcaattaccagaattatttttattaattttacccaaaaaaatggaccgcgggttctataatcaatacttcaggggtccttttccatttttcgcgcgggcgaaggggtatatgccatcctctgtcgtttgatctgtcttccacggatcagattacatcacgtaaataactaaaccgataagtaacttcaaccgctagatcttgatccgagggatcagatcgcgtggggcgtggccgaaccaatatgaagccctaatccgagccgtacatccacaaatcaacgggccagtgcccatctcctccccgactagagcccaacggcgaagcgatgccccacacgatgttggactcaccggagatggccttaccggcgttccagggctccaaccaccctaccgaacaatgctaaatgaagatcaaggtaaagtgaat

SEQ ID NO: 101534 - DNA, 502 bp, Zea Mays
cgcttacccgtacttctgttgcagtttcggacaattctggtttaatttatcatctcagttccgccgtctcttgtatgattgtatcgtgtgtcatgagtttctcatgccacgcgtgtgtgaaggcagtagacaagtttggtgggatgtcgaggaatgacaggtggttggtacttgatagcttgcatatggagaaggccaagaggaagtatgttttatggcacgagtgcagatttggtgcccaagggggttggtgccctccttggctaaaataccatgttgcaatgtttcaaaaatcaccacaaaaaccatgtacagttaaatatagccgcaacaattcagtttgaaattcatctgagatgtcaggaaacaaaatggacaagtaaccaaccttgcactgttcatcaagtgttgacacttgtgttttttaaatctcagcatcaaagatgaatttcaatctggctacacttaaatttagatgtactacatacatggtttttgaaac

SEQ ID NO: 101535 - DNA, 338 bp, Zea Mays
ggaggacttccctatgacttagacacacatgattagagtataatccaattgactgtcatggaaactcacatctttctcgtctccttcatttctctgtttcaactcatcgacaccaaaacacacttttcgctagaaactgagttagcgaccaagtaaaagtgctagaaacactgtaacaggtctatgcgacatgtttgaatacccaaacctctgatattttacctttttcatctttttggcctgtttgagctcggggttggattcgaaaacctcaagtcgacataacttgatctccttagtcatctatgagctccaacaccctacaatggtcaacaaaa

SEQ ID NO: 101536 - DNA, 415 bp, Zea Mays
ggttcgaatgtcaggctgaactgtgttttgaattgaatggccttcgatatggtccataccttgaggagggttctaccgatgccagggatgagcgaggaaagaagaaagtggtggttcggacagacgaaggacgcttgaaatggaaggttgtagttgcggctactagaaaaagaaaaattgaggtgaaaggtatggtgaaggcattgggggtctgaaggcctcgaggagttttgttgagaagtttgcgaagacgtgcgtttgaccaggggggtcatgacttcgctcgacctccggaaatcatctttgcgaatgctaaaggcgaccagggtgagtggcatgaaaaagaccccatcccccatcattcgacgaagattactttacgtcctgtttggctcgcaactttaaaatcgttcct

SEQ ID NO: 101537 - DNA, 1433 bp, Zea Mays
tgcatatatagtttccatacactcctatcctctctatatataatacatactctcaagtcctttcttattgactccactcatgtcaagtttgatcaaccttgtccatccctatgttgttgctacaccttacaacctctctagtgtctcttgtggtcggcgtggaatatgataaatcatcccaatcaatatcggacaagcattttgtcgtggtttcgaaaaccaaggacacaatagaatttgggttcggtgggggacgctaatgtggactcactccgaatggtgaatcgagggattctaacaggaggtttatgttggtttaggcttacgccctagtctagtgtagtgttgatcgtagtattcactaaggaacgttttacattaggtgcttatgttggaatgaggtagtggagaactctggttgaatgctcctctgccttttggccgtttgaccctccccttttatagttcaagggggttcttaaaaaaggacttgacatcctaaggagcgtgcgacctattgtctatggtggtcttactgatgtagttctcctaacatcgtcctctagttagtgcgtggtcgtacgctcggtatggcggattgcttcatctacccagtatgcgggtcactgtggcaactccggtgttgagttttcctgtagtgatgcttggcaggatccatgggtcaaagttatagcgcatcaagggtcgtacgcgagaacaccctgtcttgttgtcaaggactctcctcatcccaccagtgtgtcgtggcgttatccaaaacaatatttgtgtggcaacgtgtcatatcgtgaccagtgtgggggaacattacctgctttgtctccacgtcagtcgggtataggcgtgctccggacccatgcgtgtggtgtcggggcccacagatgtactagctctcgttcgtgggccttgtgcttctttgtctcgtagggttgcttggtggacctggtcgttccattcgcctcgcaaagttgctcggcgggacctggtcagtttagatggaccgtcaagagtcatgggcttactttggataccccattcttgggtgcccgtcagtagcccccgagcctttgtgcaacttcttggagttgctcgaaggctttcttcttaggaactagagtttcgggtgcgcgcgagcacatctgttagatgtagcccctgaacccccgagtaatccatgaggattacttgggggtttatctagtttgattgtagttttgggacgggcccttttgcgatggttggcgtagtgccttgtttgcgccaagtgtatgcccagtttgtgctggagctgggggtagtccttggaccggactcctaataaacttcaaatgttgcactttgaacaatgcttcgtgatttcataatgttgaactttttgtgttttgatcgaagactgtgtcctcatctctttt

SEQ ID NO: 101538 - DNA, 443 bp, Zea Mays
gtccactagaaggctagaaggcctcgcagaaggctttgggcccattatttcgcaaggccatcccttcgtgggccaggggaggaactgctggtggaatggattaacgcaggaatggatagacttgggctcagacggctcactggagttaagcattatccgtagcattgatctgattctcccgcgcagcaccctcagacgtcggaactaaatgaggacaagtcggcaggattataggaagataagttcagtcggttcactattactaagggatacgtcgtcatcatgtaatgccccatggtcaattatataaggcctagggggcaccccatcaaaaggcaggtcactcattagccatctactccattctctagcatccttcatactagagaatccccttgtaacccaccacgtaaaagatccacaccaggaaatagggtattacg

SEQ ID NO: 101539 - DNA, 760 bp, Zea Mays
cgatggtacaatatctgcaaaagatcacagatgcagtgaacgttgccgccggtgaactccgcgccgcgatccttgccagcgttgcgattcgtgcgatctggcatgcggataacggtcgacggtgaaaagatcttgcgtgaggatgaccttggggtactgttttgccctgtcgccatacccacttgcaccggcgacgtggctgcacgaccgtcaccgtcgtgccaccgtctagctcgattgtgacacgccttatgtcatctcaccacttgtcgcaagccgtgaagactcggtagtgaccaccgtagaccgtaaactagtgggcgccacgttagcaactccggtgactcttccccctttctcaccgcgagcacttccccatccaaattcgccctcctcgaggtcgtcctatataaattgatgcctcggcctgttccgctagattgttatgaacccagagcacccactcttgccctcgattagccaccatagccagagaatttcgttcttttcccaaatctattgtatgtgccaccgtgagaagtcgtgtcgtggccagtcacctccaggtccgccctcgccctccttgtccgtgtttcaacgcccacgcatgcttgtgatgctcgttggcttggtcaattaagctataccacgctagattgttaggaacgcgttgggaatgtctcaaacttcgcgggtgtttgggaccgagctctagaacgtctttcggaccaaattggtgattcacagtggagtgccaaag

SEQ ID NO: 101540 - DNA, 336 bp, Zea Mays
atgcaaaacatgggtccattattggtcttaattaacataagaacttctacattgactaattgtctaaggaaactacagcacctaacatcaagcatgaaccaacatgtaatgaagttcaaaccaagtcatagatgcaatcaacactacgatttcacaacatcgaatttggatgcagccatacatcaacatcaatgtcttacaacgacactcttttatgaaggggtaatacgcactaagcacaacctttaccaactttaacaattctttttaattcaatggtgaaacatccacactagatgaatatataagaagatcaaacacctcacctcacagcac

SEQ ID NO: 101541 - DNA, 612 bp, Zea Mays
cgggtgcaccggggtcgtggaggcgtcgcgcgtgggtattgaccgcatatatacttgcgtattttgactgcaatggttacataaatcgtcatagcgatgtggtctggtcagtgtggtgttgtggtttgcgatttatccttgtacaattcgatgttaacaactgcatatcaatcgggctcgcagtgtttacgatcatatacacaacaaattatgatccatatggacatgacgtacaaccaacgttttatatcacgtacttggtgtggttcttgattaatgctttttgtaaactgtttacgacactttgcatagttctttacgcttaatatgaacacggcgtaaacaaactatccaactgatcgtgcactgactagtggaccccacagtcccgcaccgctcccccacaggccgaccgagctaatatggtcaacgttcgagacccacccgaccacaatcaattaactccgctcgggtccaccgaaaccctaaaaaaatcagctcctccccatcgccatcactcgctcttacgatcgccatcgacgaccgcccccaccgcttccacccaccgtaatctccatgcttcatcgattgaccgccgtcattctcccccct

SEQ ID NO: 101542 - DNA, 349 bp, Zea Mays
gataaatgtctctttgaagaactcaaaccactacactcaccaaccttaccaaagcaagcgtcactcccagccttagtagcaaagcctaaccccggtctgccagttcccctcttgaactaactgaccatcatgcccaactcgagcttaatcccagtcacccagctcaagactgattgaaggtatgtgttttcctcctcaatcctagccttttcatgtatgtaggactcaagagcatactacaaatcctcacaaaatgcacactgcacaattgcaaatgcactcagtgagctagccttctcaagcgaggatattctagcgttcttctccgctagttcagtatgcatgccag

SEQ ID NO: 101543 - DNA, 786 bp, Zea Mays
gtagtggaagcggcctcagcccaaaactttcggctcaaacttgagttggacaacatacaccgagccttggagattattgttctgttcatacgctctgccacaccgttctgctgaggcgtatatggtatagtgtggtgcctcacaatgccctccttcccacagaaagagttaaaatcaccataacaaaactccataccattgtcagttctcagaactttcagcttcctctcagtctgcttctcaaccatagtcttccaaaccttgaaagactcaaaggcatctgatttttgcttaagaaaataaggccaaactctgtgaattatcatcaatgataatcaacatgtaacgagcaccaccatgagaagttatacgtgacggcccccacaaatcagcatgaacataatcaagaatattttcggtattatgaacagtagaactgaactttacccttttatgcttagcgaaaacacagtgctcacagaaatcaagggtatcagcatggcaaccatcaagaaggcctctcttgctcaattctgccaaaccaggtgcactcatatggccaaaacgcatatgccaaattttagtagtctcagaatcagaagcaacaacagcattagcagagccagaactacctcgaagcacatataagttttcagctttcaaatcacctttaataaccacaagagagccttttgttacctttatgacaccgtcaccggcggtatacttgtaaccttttgtgtccagagtactcagagagaagaggttcctggacatggatggaac

SEQ ID NO: 101544 - DNA, 775 bp, Zea Mays
agaaaatggactactgttgtgctgaataatgcctgatttcaacatgactccattctgtctttccacttcatctttaatggccggtggatagcgataaggatgaatctgaaaaggcaccgcactagcaaccaacggaatagtgtcatcacagtcacgggagggtggtaacccagtaggttccataaacacagactcaaatttagacaatagttggatgaaaatttcaggtaaacccaactcagtgaatttgggggactgactgttcactgcagccacttccacaactgatctggtgggaagagacgatgctaatccatgtagcagcacctgagaccctttatacggaataacaatccaattttgcccccaatgtaccttcatcggactatgagcacccaaccaatccacaccaagaataagatcataggctgaaatattcaaaactctgaaatcagtcgcaaagttacattgctgcactgaccattgagcagccaacagttgctgggagcaagccaattgacccccatcagccacctggacaattactggtttgtgcatatcagtaatacccgtcatttgtgctgcaaaattcgatgagacaaaagaatgagaactacccaagtctactaagatcagcacctccagaccctgaataattcccttcagcttcatagtatgcccaaaatctgaaccaataacagctgttgcagaaactgccagatacaattaattgtcttccggagttggctgatcgtgttcaggtggttgatgttcc

SEQ ID NO: 101545 - DNA, 502 bp, Zea Mays
ggggtatttataggcaaccggacgaggtaggtggtcctaagtatcattataaccccggttacctgctacattcccggattattcctcgcaacagggtcattaccatgcagtaaggtacaacgacctaaacatactctaaagtctaccccttgaaggggcttacaagtgggcctgagcagcaacgtggtggaagcctaggccccacagaggtctcccagagccttctcctatattccagacccttgacagcgtcggggctttgactccactgtttgagggacaagtagagccttcggggcacgtggcgagggttactgtgagccccctcttctcgcgcggcccttcgctcagtctttcttcaatggctgtggtcgaggatcctgtcgctggtacgggacaaagtccaccgtcggtgctatccctgcgctcaggcatggttaatcgtagccggataagtctgatcaaggtctggttcggcgttcgctccaatactagccccccc

SEQ ID NO: 101546 - DNA, 1196 bp, Zea Mays
ttagttcctcctcctttctttgcttcctttaattctcatgttggagaatggagagaatgatgcggcctccaatccgtgtttcccgcagctagtgcgaagaatctttttgataagcagttcttgtatggaactgaatctgaggatcgatccttgtgtggatactgatataagtacaatctgtgcagtgttcttcatcgcccgtttcatttggaacagcaaacaaattcagccataacgttcgctgatgatcccatacatacagcatgctatttatcatgatatcgaccttgtccgtagtgctttctgatgtcaagaacaagtggcatgagacgggggccagccttcatttgacaagctttgttcctctgctttccatcatcctcctgcatgtccaaagaaatacttatcagcgtctcatcgtcgccgttcgtgcaagggaaaggtaaaaagtgctgcttttctacactgtgataagaccctttcgcggggtagtggaagcacctagtcctgttcattcgctcgacaagaccctaaatctggggggcaccaactcccgatgcccaaccaaagcaggcagcattaccgacgtctcaagtagactgcatccatcattagcacaggaaagcaaaaaagaaccaaagctgcgatcgatttttagtccaggaaatggcatgcatacaagtaagaggagcatatgacaagtatacgtgagagtagaagtgagtgtacatcatcatccgtacatagtgctgccttgccaaattcaaatgataacctcgcataggcacttactagccagcaatgtattatttagggaacactaaaacactgtccttatcactagctagctaggccaagaaaatcttgaaattttacatacctcgactcgttgcatctcccagctttccacgaggttacgtcttgatttacatgaaaagttcaccgacttgtccttgtttgcttcgactgaaaatcaccatcatcgtcagcttctcatttgagacagcaaaatgaagcaatcatgcagcgtgcaagcagaggaaggctgcacatacaaaattactggaccttgtcacataaataaacccacaattcaacattcacgaatacagcctttgttcaaatgcacaaagtgatgaaaacaagacatttcggaagaatcggaagctgcctacagatacgctggaatacaagtt

SEQ ID NO: 101547 - DNA, 597 bp, Zea Mays
ctcgcgcacactggcacgtgggcccagcccatcgacgtccgcgcctggacgtcaaccgccagcaacgacgattcgcttctgcaaagatgtcaaacgctaagtaattgactccatataaaaacccaaggaactcggtgatgatgtacgcggtgtcgtaagcacttacgctctgaggatgcccaatcatgcgcaacgacagagagagagagagagagagagacagggcaggaaggaagaaagcaggaagcgtcgcgagctggtgacgaacggaaacgtgctgcaatcgctggactggactgctgtctaagctacgggtgacagcgtgaagcaacctagtaaactaagggaatgacgatcatgtttaggtgcagtaagaatggtgaccggacgaaattgtctagaactttacaagggacgaactgctagcgttcatgtgttcaaaagaagaagtgaaatttccagctgccatgttcgaccctaggagatctgcaggctgcagatgcgttcggtccgtgtgacctgattaatccagggagaaaaagagaagggacctttttcttagtagctgtctatttaggccccactcacatctagccg

SEQ ID NO: 101548 - DNA, 584 bp, Zea Mays
cgactatcaattgatcggttggttcggtacaaaccacgttggaccatttgttagttggtatccaccgtcgatatcagccaatgcattatgcggtcgaatcgatacaaaccgactggtttgacatatttggctcggattggtcagttcggtcagtatcgactccctagcctagtcgcctataaatagatcactcactcttcatttcgctcatctccatcatatattatagtcttccactgtctattcgtagatggagtctggacttttaaccttcattgacttgttcaacaactaatctcgacaacttcctgacactcgtgccgatgtgggggagtccttcgataacctttcttttgtacatcatcgttattaggaggatgtttttgtccgttccccgttccctcactcaacaacctttgttttcatactcatattttactcttctgtttccctaaagatattccatggatgctcctctccccctcaatgttgatcatatcaccaacgttgctcctcctactatcgaagctctaaccaacaatgctacttctcctccaccattcactccaccatttacttataca

SEQ ID NO: 101549 - DNA, 353 bp, Zea Mays
cagacttggtgagtcgacttgaaatgatcctcaggggcaaggtgtcaaatgttggtgctccagtggcgtactcggcctggaacttgcctcctcccaaagccttcacccttttcgtgtcgaatccgcccattactgatggcggtttgggccttagagtgcgaccctctactgaagaagtcagtgctttggttgcttcgcttggggagattcctgatgacgaacgacaggttcattttgaggtgcctctgaaccctagtgatgcagatataagcgctatgcttgatttgctagctgaagattcttctgatgctgctcctgttggggcgttggcagtggtgcccctcctagaggtt

SEQ ID NO: 101550 - DNA, 2085 bp, Zea Mays
aacttcctgaggtgctctatatttcatgaattctccacttccgtgccatccatttgagtaagtcgatatggtcctgtccgagtgacttcaaataccatgaatggcccttcccatagcggtgacaacttgtgccgcccttctcccgttagaattcggtgaaggaccaagtctcccactacgaaggatcgatgtcgtatagccttatcatgatagcgcctctgggtctgctggtatctcgctgactgaattactgtattcaatcgctcttcctccagcacgtcaatatcttctagcctggtagcttctgcctcagctatgctttcgaagaccagccttggtgccccaaacctgaggtcgggaggtagcactgcctccgaaccatagaccatgaagaagggggtgttttcatgcagagctcgactgggttgagttcttaggttctagaccacataaggtaactctctgaaccatttccctgcaaacttttcattcttgttgaagaccttctttctgagtgcttccagtatcattccattagccctttccacctgaccattagctttggggtgtgctactgatgcatatttgatctgaatgctccattgttcgcagaaatcaaagaatttagagctagtgaagttggatcctaggttggttatgatgctatttggtatcctaaacctgaatattatatcttgtatgaattccactaccttggctaaagttagagaagcaatgggtttgtaatctatccatttggtgaatttatcgatggcgaccaacacgtgagtatagcctcctcgagctttcttgaagggttcaatcatgtctagtccccagcacgcaaatggccatgttacaggtatggtctgcagttgttgcgctagtaaatgctattgctttgacaagaattggcaagcttcacatctctggactaactcggctgcatcactctttgctgtcggccagtagaaaccagacctgaagaccttcccaactagagttctggatgttgcgtgtattccacactgtccggcgtgaatttcatctagtacctgtctcccagtgatcgaggaaatgcatttcatgaggactcctgttgcaccccttctgtataatgcctcccctatgagggtgtagtgggttgactgtcttgcgatacgctctgctgcggcattgtcatccggttcttctttattttttatatacttgatgataggctcactccagtcatcagagtctgattctggctggctcaaagcattgcactcttccgcctgatccgagggaatgcttgggcgtgacacttcctagacgaaaactccgggtgggacctgagctcaactggatcttagtttcgacaacgcgtctgctactgcattgtgatctctttccacgtgatgaaattctagcccttcaaatttgtcttccagtttttggacggctgtatagtacttgcccatagaatcattcgagcaatcccagtctttatttatctgacttatgaccaccagtgaatctccgtataccatcaacctcttaatgcccagtgatatggcaatgttcaatccatggatcagagcttcatattctgctgcattatttgatgctgagaacgacaactgaagagcatatttgagttgttcacctctaggggcaatgaagaggattcctgcgcctgctccctgtagtttcagcgagccatcgaaatacattcgtcatacttctgcagcctccgggttgtctggtacttgttgctcggtccattctgatatgaagtcaactagtgcttgagtctttattgcagtgcgaggccaaaactcaatatcgtaagctcctagctcgcaggcccacttggctattcttccaatggcttctttgttgtgaagaatatcccctattggaaacccggtgactactatgactttgtggtcgtcaaagtagtgacggagcttacgagcagttaaaagtaccgcgtacaatagtttttgcacttgaggatacttctttttggagggtcccagaacttcactgatgaagtataccagatgttgtgctggatatgtgtgcccttcctctgcccgc

SEQ ID NO: 101551 - DNA, 509 bp, Zea Mays
gttatctctaaaacgccgacgtcgtcttcagtcgcttggcagttatctctgaaacgctgacgtcgtcttcagtcgctcggcagttatctttaaaacgctgacgtcgtcttcagtcgctcggcagttatctctaaaacaccgacgtcattttcagtcgcttggtagttacctctaaaacaccaacgtcgtcataaatcactcggctgctacctctaagagcgccgacgtggtcatcaatcattccgacgctggcgtggtttcgtcatcactcggacgctatttcaaaagcgtagatgttgacaataatagctcggccatcacccctaagagtgatgatatgacgcccaagttactcagttactgctccagaggaatcaatttcacaaataaggcaaacggaggaatgattcaagaactctaagttatgccacgaacataacagatagagaacatcacgggcaataaatatcacgacagagatcaattgactacgaagcaaaataatcgac

SEQ ID NO: 101552 - DNA, 643 bp, Zea Mays
ctaaatgttgacgacccttatttcatgattttggtcctcacctaccctaatgatgagagaaacttcatgacaaaatgaatttaagttactactaatgaattccacaagttgtgatgagatatttggatgtggctgacaaaatgtggcaaaaatagatgactaggaacaacttttggccaacaccatggacaatggaggtcggttgacctaggtcatggacgcctaaccacccccatggtcggccggtctatgccttggtcgaccgaccacctagttgccccttgcctctccttcggtcctgcacatatgtcattactcaaagcaacacaatttgtacctattcacacgtattcaagctagaagtcgacatgtcatcaatccttgtgcttgcaatccaagcgttgtgaacaaaacacacttttgatcaaatgatgaagagttccaatggccaaccgacctttaactgacttggaggagcaattggcaccatttgttgggagatggacgacagagggaggccaatcgaccaccccttggtcgaccgggcacatggacagccacccagcctaccacgtcatgcccatgaaaccatcttaacttctcaatcgaccttacaacattataagtaccccatgaccttagg

SEQ ID NO: 101553 - DNA, 374 bp, Zea Mays
tgaaggtgtttgtaggaagggggagtgccgaacaaggcaccgtgggagcaaaaggcgttgatggtctttgtgggggagacaattcaacaagtatgtcacaatgtcaatgccttcaacccagtatcgtgctggagcagaagcttgaaaacgcagagtgaaaatgactagaacaaataaaaatatggccgactttaccattctactaagagttgtagaggcacaacattcgaagcgaagtgccatgggaaaggacaaaggagaaaggaccgaatggaagcattatcaaactaatgcccattgtcacactagaaacatatgagaaaaagtgggacaaagtagtgaatgtgtcaaattttaaatgcagaggaaaggtc

SEQ ID NO: 101554 - DNA, 330 bp, Zea Mays
cgagtcgacttggcccaaacctctgcttctttggatgtcacgcattctttgaattcctccctcaattcccagcttgactctgaaaggacggcacatgaggtaaacttccttggttgactttgccatgcttattgttgactggatgctgaatgttgcttcttgctcgtaggacgagaaacgagcactcgcgacctctcatgacaatctggacaagttataccgtgacgccagtaactccttgactattttggaaaggagccaccgcttcactatgtcagacctggatcatcatcgtcgtgagctgcaagtatcccaagatgaagttttgtg

SEQ ID NO: 101555 - DNA, 600 bp, Zea Mays
gcaaatgggtgaggcaactagactcattcaagctgattgatggggtgacacaagaacagatcaaggtgtggctgggttctaacaaaagtatttaacagaaggtggtcagtgccttacatgatcgggcacttggatgtcaaatctatcggtgtgtcaaatctactttcagctggcctggaagggaagaacagatcaaagcatatgtgcagtcctgctaccatactgtattgggcaaatctccatttgaagtgctagatgttgcagcaagtcaaaatgcactcgcagcatgctcaaactccgatgaaacaccagctgatagacaaaagggcgcacagatcgtacatccgatgtgggtgatcgggtgtgtacttgaaattcaccctttactgtcagtcctcagtggctgaacgccagaaccacaagctagcgttccggttcttcgagccttacaatatgcaggcggctcagttcatccggtgtttcacgtttcacagctaaaactgtttgttaacgctagtcttgttgtcagttcttcggtgttagacttgtcccaggtttaccacaactacttatccgctggactggatacggagctgggag

SEQ ID NO: 101556 - DNA, 640 bp, Zea Mays
gaaaatataaaggcagaaaaatttaagatacatcagatcaggatattctttagtcgcaccagtgtagcctctttagtaaatgtgctttgattcaggcacagtgctaatgactgtgcaagcttcggactcctcccgaaggtcgcgttgctgctgagcatggcgttgcccttctggctgctgactgtgacccaagacaggtgctagcgatggtggtggtggcaactaggcccaggaagcttgagaatggcttgccgaagcgacagaagccgtaggctgttggttacccacatactccgggacataaggagaatagcacgaagcagtgtggaggacttgcttcggctgactctgccacgctttagctttagcaatttccttcttcttctgaatggtaacatggcatgtccttgttgtgtggcccttgtcctcgccacaaaaaggcagtataacttttgaggctgattgccaaaccttccaccactaaaacttcttcctcctctacctctcagagttgatggtttgaaggaagtctattgcacgctcgaagtctgagaactatgatggttgtgttgagcattgctggccctgtcatcgttagtgttggagttgtggattgatcgaacatgcatggggtgaagtt

SEQ ID NO: 101557 - DNA, 715 bp, Zea Mays
attccggcgagtcgagctgtgcagcgctggcttccaccgccatctcgccattgattagatgtttcatgtggcctccggtggcaagtgcgctgtaccagcacccagcaggctattattttgtcggcgcagtttctttcgagtcatagtggtgacgcacggcacaagggtcaatgcgggtgcgctgataatggaggcattctcatcagttgcaaacacgaagcgcggccatatcttacactcggttcgtgcttctcctgctatattgcatcttcatctcatttattccgtgctgatttggtggctcgtgtaacttttggttccacctcctattctcctttactgcgtgacacaaagagtaaactagacaatactactacgggctgctagcatgtgccaattcaagaaaagggggaacccacgaccacagaatgggctttaggttagacagaggttgagttccatacgaacatccaaccttctgatgatttttttgtgtgtctgcttgatagcttggtaatggacatggatggtgacctcagattacatcctatgatgagaagagcgccctgctggattatgttatctgtgatcctggttcagtaaaaattcatgctgacccagcaagaatcttgggcagtgaatcaacaatggtggggcccgttcaaagatttagtgggtttcaaagcaatgcctaccgatgcttgctgagtaggtg

SEQ ID NO: 101558 - DNA, 459 bp, Zea Mays
agcgacatttgaaaacattccaaagcaggttagctttgagatcatgctctgaaaagattgagccactgtcatccgagagcaacgcaattgtattgcggccttgttttaccgttgcatgagcatgaaagaatctggagcagatatctccatcagtaacccatttgatggaagcctgttgcttccaataaattttttgaaactgaagcaactcagcagccttgtgttgtaataactcacggaaattccattcttcaatcaaaaggtcacgatgctcttcaataatatcaatgaattcaataatcaacttaatttgtctcacagttttgtcaatttttggcagtgaccgctgccactcttttagaatctttctggtgaacttgaattttgctgttaaattcttcgctttgtccagaaggcttggcagaccagtccatgaattttgaaaagctgccataaact

SEQ ID NO: 101559 - DNA, 344 bp, Zea Mays
gaccgtagatgtgttgatcgatggtccagatcgatcgcgcgtctgaaccgcgcgatgtggatccaaggggcccgcgctgctttccgtttgagaattaggatttaatcctgtgcgtatgccttagatcaggcggctagtatttgttcataccccttcggctggggataattgcttatgtgcccctcggcttattccgaattaacccgccgtccacctcgggtcacactgtgtctagggaattcttgtagaacagtccctgcactttccagaatttggtgcgcaatccaggaaatagagaaataacatttaaaaatgattcttagtacaaaaacaattccataaac

SEQ ID NO: 101560 - DNA, 445 bp, Zea Mays
accttcttgaggtcctgcatcatttggggtttggaaatagatggaaagcttgggtgtccatcctgctcagatcagctagctctgcagtaatgattaatggagtcagagggaatttcttcaaccatggaaggggcttgaggcagggggacccgttgtctcccttgctgttcattcttgccatcgaccctgttcagaggctgtttgacattgcttctcgggagggtctgctcagccctattcttcaccgctctgctagattgagagtcagcctctatgctgatgatgccgccatattcatcaacccgatcagagaagaagttcaagtcactaatcagatcctagcagcttttagtgaagcctcaggtttatctgtcaatctgagtaaatgtgctgtctatcctatccgctgcgactcgctgcagctagagcatataatgcagccttt

SEQ ID NO: 101561 - DNA, 466 bp, Zea Mays
cttgatgatggcttcaggagtaagttgatggaggtaaatttcgaaggttttcagaacttcgaccagcaatttatcgagagggaaccgaagccccactttcatgaagcttctataaaccaccacttcgtcagctttggggagaggaacattattctcccctccgtccctcacgattgagatatcacgaaaatacctacccctcattgcatcgatctatccttgtttaatagttgattttccaaagacaacatggcttggtctctagggccgatcttcggcgtcttcatttctgctttctacatcgaaactttcactatcactggagttttcagatattccagccagcatctcagttgcaattttctccgcattggttttctccatagctttgtaaaacccggccagtgctggatcaacaaccttcttttcatcagccatttcgtcgatgtttgctagaatgccgaag

SEQ ID NO: 101562 - DNA, 862 bp, Zea Mays
catgaacaaccaaaatcgaacgaatccccactacagtgctctggcttcctgagtcatctgcagttagtggtgaggcagcataccctgaccccgaggaagacaaaccgtctgtgaccaatggcgatggcaccaccacattgccggagttagacgaagaggtgataacaagacaacgtaccgggaacatgaacaagcagcgttcttgatgcacgccaatccaagaacaagatacgatgatgcacgtcggcgattaacggtgtcgaacacgagaaaaagtagacgacaatgaccatgaatagtgtggagaagagagagctttagtagtaaaaaccctaaacacaaacgacgcccctttttataggccatgacaccatgaatataaaataaagagaaagtaacatcaatcacatcaccactgcaatgatcacttttcacacccccaaaaccgaggatagctttcggaccatccactggacttcgggatcgacacatcagattgagtctcaccctttggcaagtactatagggagacgacttaaggcatacctcaatcatgcttcaagttaacaataacttatcactgatccatggttgtgagcgtagggcatgaataccttgatcataacctgaaggggatttgtggaggcaacctcctccaaacaggtcaatgtccctcactcgtttttgtcctccctttgagggtgaggacggttatggagactggccctagccccatcgaacgccaaatagggctaagggagcgaccctgataggcttggatggaggcgaaagacttcgaaggtcgagatcgtgaccgagacttcatctaccaagagctacaaccgttcacaccagcatggat

SEQ ID NO: 101563 - DNA, 481 bp, Zea Mays
aaagaaggaagcccacactgtagcttcatgacatcagataatcaacacccatttcttgggtggcctcctaggccccttaccaccctccatgctatcagaaggattgccactagcttcatcgttgtcatccttttgtggcctctgaattgtagaagaagcctttgttagtgccctcggcgtactttatgaaagatcatatgtgccaccttacagaattcatgtcccaactttttggtaatttttgaagagatagaaggtggtgtagaggatgtacaactagaacaacactagtcttatgcgaaactttgcttgaaacccttaaatttttctttaggacgcaggtatcttctgacctcagtgtccaccatacaactttccttaagcttacgcttgttgggagaggtaattgtttccttctctcttaggcaatctatttttgctaggacttgtagtggtaccacctccacctcaggctcaaaag

SEQ ID NO: 101564 - DNA, 442 bp, Zea Mays
gttggcatcaccggcgttcgccgttatccggcctggctacatgcctcaacatttcaccacgtcgtagtgaatcgctgtaagccactggttcgtcaccagtgaggccgccacggtgaaggccacgaatcaccacaccagtgactcattccttctccgaccgccaccgtgcccaatccaaattcactggccaccgctcatgcctgctataaattgagcatgccgtgagctccgtaggataattatgcatccaaagcaccagcaattgcctccgatcgttcaccagagaccgtgaattgctcatctcccccatttctgtttccgccaccgtggtagaaccctcaccgtggtcagcaaatcctaggtctgttcatcctccctgctgtcttgtttcaacatccatgggtcctcctgatgttccccgacctggccaattggactagga

SEQ ID NO: 101565 - DNA, 319 bp, Zea Mays
ataggcacaattgtggctcgaggcagacagacaatgcctacagggcatgcgaaaaatacgcgactcagcgatggcggtctgactcaacaggagcgatccgattaatggagagcatgacatagcaatcacatgacgcagccaagttcgaacggcacaaatattgtgtcgtgttgccagggcgcagtcaatattcagctaataccataactcagccgattaccaacgcagcctgatcggcgtatctgagtacccattatacactttaatcgctcgacgtgagtccgaaagatcaaaccaacacaaatatttagagcgattt

SEQ ID NO: 101566 - DNA, 714 bp, Zea Mays
aaacaacacatcaatagcagaatggctgctaatctgctaatcagcctaatctgctgcctggtgaagtactgaagtggagtgctggtggctgctggtttctgcagttctgctaatcagcctaatcagtgagctgggcggtttctggctttctgctggtggccggtttctgctggagtgctgctgtgctggtggctggtggcctggtgcaggcgtgcagccgtgcaagtgcaatggtgctgggcgactgggcgtgttgcgtgtatctgtttgtgcatcttatattcttatctggtgtagtgtgttatgtgtatgtgtgatgccgtgatctactgaactactgagctgggcgtcagggcgtgtgcatctgtttcactgtttgtggctttgtgtcgtccgtgtctgtctgtactctggagtagtggagtgtatgcatgtgtgctgtactgtcatgtgctactgagcatgtatgttctgtttgctgtttttaaaattcggggaacacttgaatcttgagaacttgattgttttgtttgtgcgtctgctctggtggctgtgtttaaaatttaatttggttgtttcgggagtacccgatacccgaacccgaagtgtcgggtacccgaactttcgggtactatattacccagcgcaaattcgggtaacactttctaaaacccgaacttttaattacccgaataactcgacccgaaattttcg

SEQ ID NO: 101567 - DNA, 288 bp, Zea Mays
aagctcatgtagaggcgctgcaatggagctaaaatcacgaacaaatctgcggtagaaaccgacaagtccaagaaagctccgaatttgtgtgaccatcgtcggtgtaggccactcccgaatggcagcaatcttgctgctatccacctcaatgccctgcggagtaaccacataaccaagaaacgagacacgttgcgtgcaaaatgtgcacttttccatgttaccaaacaagcgagcagcgaagcatcaaaaacagcacgcaaatgttctaaatgctcctctatagacttg

SEQ ID NO: 101568 - DNA, 445 bp, Zea Mays
gtcagtttcctcattcctcttgcagactagtagctagtgttcttctcgaatttgggacgtctcccaaatcccaatgatttccgctttttttccctacagcgaattctcgatgtaggcatgtatcggggaagaggaaggtgtgaatccttgttgcccagtttctctttcccacatctcgatttctttgttgttcctgctgcgctcgtgtttttatatgtatctatctacaaagaagaatcgaagagattcagtacgtagatcttgattgatttctgaaagaagccacaagagaaaggaggcgccaaaaaacaagtggaagcgaattggaatctgccagaatataattacattagatttgagggtatggggaagacaccgaagaagaagaaactaagtgaatcgggatcgagaggcagcccgagaaccagcaggtgcaactcgagga

SEQ ID NO: 101569 - DNA, 1046 bp, Zea Mays
taatagttgttctttagcttgacctgttatgtatgatgtgctaattcattttgttaaatgccctgttgattctctgcacgtgatatggatcatgggagtcataaccttgcatgggtgctcaaatgaggatcgggggagagtactgactctttgatacctcgggaaaaaaactaaaggagtctagaaaactttagctttactttctgttattgtatatgttcaatttattttgagtatttatattcttagaaatgttatgttagcatagggttgaaattatggtgcaaaatgtttatatacacattaggcactcaggtgaggttgggctaattattaggatttaattattgcaagaattcttagagaagccaattcaccctcgtttgcgtactgttgatctgtcagtgtccttgtttgtgttctgttcactggttcgctgcaagaattctgttcactccaaagattgacaccgtaaatttaacccccacaagattgacacattgatttgcttgacattttatccttttaataattttatttctcttttttccactccctgaaatatccttctcgctcactccgctagctctcaaacgcagcacaagtgtgcgtgttcggctgctgctcgagcccctgttgcttccatagctgctcatggaggaaaaggtggctggacgttatggctcactgtttttctttagatgtcctatttggctctggtggacagaccaagaagaaaattattaatccttctagttttctgtttcatccggttcatattttagacagctttatgtttaataaaatcatagcttgaagcgttgatgtatgcaacttcatttgtagaaacactcagatggcttgttctggtgattgtagtagtagcagctatggttgggattcagactatatactatcggcctaaaggtttagaaaaggtgaaatgaacaacttgaggtgagttactaatagcactaaaataactctcttgttctagatagttaaatgaactatgggttacattcgaactgcataaggtaacaata

SEQ ID NO: 101570 - DNA, 492 bp, Zea Mays
cccgtgcgaggcgagcccccaagcctctgctcgatgcataatctgtcttggggtcatcctatctttttgttttactctaccccgtgcatcccttccgcagcgatgaggggaggtgagctgaaccatgctttccttgatggtcgagcaatggcgcctcgtgagctgcaaacaagtaatccgagtgaggccccagctcctttcgcaggatccaagcgtggggtctgctaggggactgtactcatactcctaggcactgactcatatagttgccgacttcattcgaccagactcgatggctcgttgcctctctttgtgataaaccatgagtcagtcattcccaagactcgaacacaaactagtgatgcccttcatgcttcacgcatcagggtccttgccgctagtgtgcccaacacttgcttgcccctcgctctagattttgttgaggtggtcgtgagcccttgtggaccggactttcgggacccggaatttgcg

SEQ ID NO: 101571 - DNA, 370 bp, Zea Mays
tcatgaaggctctagtttttatttttagtgcagatatagatggattgagggtggaaatatgatctaacatctctagacatgtggtacttaataggcgttagcaccttcatcacgactatcaaagcttatgctaaattaggaatggcatgtatttttcccatggaaggtgtcatctcgagggcgtcgtcgaagtcaacaaaattagagagctagagagtggagaggtcacacctagagaaaataaggaaggaactagtgctaatagcacacatttcttttgtttgatggattgtattggaatacacctgtttgatggatacatactgaactcaattgaaatatgaaccttaattacttatttgagttcttt

SEQ ID NO: 101572 - DNA, 703 bp, Zea Mays
gcagaacaaattggctatggagtcaaagagtcagcgcctctcggataaggtcagccgacttgaaaaggaaaaagatgatcttggccaccagctagacgatttgaaggcagccaaggttgagtagtggtcggaggcacatgctacctacgagcatgttgccacactggagtctaaattatcaatagcgaaggccaaccgggaaagggtggaggttgtgatgtgtgtcagcgtggagagggctcatgcattattatacgaagtcgatcacgactttttctgccgactaactctgcgaggcggactggatgaccaactctccgatgatgacaactccccaatgatgaccaaatctcatatgatggctaactctccgatgatgaccaactctccgatgaccaacaccgatgaccaactccaaaatcatctctttgccaatcagctctagctgaccaattctccgttgagcaacccggcaaggcagagatctaagtccatttctactaatccaccttagttatgaaaggacgcatcaccatcgagccatgtctagatgtgcgcaaagcacactaaatgggcaccgagatctctacaatgaccgatacatcagaaggacaggatactgcgccataccgagcgtgcgcctgcgcacgctggaaggtgacaaagggcccatgatgacaggagaagccacttcacgtatgac

SEQ ID NO: 101573 - DNA, 273 bp, Zea Mays
tgtatctcaatatgctattgaccaagtaaacactgacctgaagaagaagaattgcttcatgagaggactcaacgaccagcttcaacgaaaaatggccacctctctggatcttacttacagtagagctgtcagcacaagcgctggtagtagaagccaagaacacaggtcagggtaaatcaaagggatttggaggtgacaggtctaatcagggacctgagaagcgaaccaggttggtaatccgaccttttaatcagaaccgttcttcgccttgtc

SEQ ID NO: 101574 - DNA, 314 bp, Zea Mays
aagaaccttcatgcaaccttgtgtaaaggagccaaaggtatgtttgtaaacttgtttgatagaaaggaagatggaataaaaatgctatggcatatgagatgagtttcatactccattgtacattgtcatctcatttcttattgtttcattcacatctccttttaaatacctttgtccttagtactaacacttcaaagaagtgttaaatcaaggacgaaggttcatatatttaacttgtgttgccttgattcttaatgccttcaagggattgaaatcaagtgaccaacattggcacccacctccagtgattccac

SEQ ID NO: 101575 - DNA, 453 bp, Zea Mays
ttggtcattttataattaaatcgagcactagggacttatttgcaattctcagggactgctaggtaatcatcttacctcacaggtggacggcaggttgattaatatagagcacagattctcttttgcaaaactaggcgatcgaaggggtacggtgcagattagatcaaagtctcagtcattggatcggagatcgacgacatagattttatgatagcagatcgaatttccctgccagattgaatcggacagcccacggcctcggccgaatcggtatgcgaccgatcccatcacagtcgtcggatctaaaatcaacgctcgagattaaaggatcccgtgatctgatctcgaccaatagatccgagatcaacggttacgattttcgataacgatggggtatttgagattaaatcgtgagcgctcatcaccggatcgacggccagggctgtttctccc

SEQ ID NO: 101576 - DNA, 384 bp, Zea Mays
gcaaaaggtgcatttctcaaggttagcaaataagcgtgcgacgcgtagagcatcaaaaacagcacgtagatggtcaagatgttcagataaacaagtgatgtagatcaagatatcatcaaaataaaccaccacaaattttctaataaatgggcgcaaaacctcgttcatcaaacgcataaaagtactaggggcattagttaatccaaaaggcatcactaaccattcatacaagccgatcttggttttaaaatagttttccattcatcgcctaatttcattctaatttggtggtatccactgcgcaaatcaatcttagaaaatattttagaaccacttaactcatcaagcatatcatctaatcgagggataggatgacggtaccgg

SEQ ID NO: 101577 - DNA, 466 bp, Zea Mays
gtttaaacaactaccgtaactaatgttttgatgtttactagtataatatctctgcgttgaaacggtacacaaattatttattaaaatgttaatgcacagcgattacgtgacataacaatttattggtgttgcaaactagctgccgatgtacttaaaagggaagatggagacatacttccataaggaccatgaccaagaagtcgtggaactcattccagctctgcgcaaagtgagctcgtctccaccatccaaaggtcgcatatgactgaagcagtagagtcatgaaataggcaccacaaatccactatcaataaaccagagaatggatggatattcatatccaatcacatgaatccaattgaaatctaattaaaaccacattcctattcctatccaaccttatccttacaatttactacatacattcaatctaatccagtttagctttaccaaaatcgaaatccat

SEQ ID NO: 101578 - DNA, 453 bp, Zea Mays
gtccaccgttcagcgaacgcagacgatctggcaatttgccttttgagtaccaagtggtccaccattcagcgagttcagacggtttgacgattcatcttctcacctgtggcactatataaacagacgggttggtgcagagttaccacaacattcatttccattgcacagtgtgctgttaaaaaatttaaccatagccgaagcttttttcactgtgctctcaagcgagcacttcgtcatttagagctaacttcgtcaaaagagtgagcttcgtcaaaactgcaaaaagaaacgtcaacttcgtaagaaccacaaaaaatgcaccagatggccagagtacgttcgactacaagggtgactcgtgagggagaagaaactaaggtcgctgagacagtgccaatttctgaagttatgaaacaatcaggtctagttgtgacagagggagctactgacgaa

SEQ ID NO: 101579 - DNA, 559 bp, Zea Mays
cgaatcaccatcaaaggtgactaggaggatgttcctgttgtccacaatggtagaggaaagagtggacaagagaggaagatgggaagaatagagtataccagtgtctagagtagtgtggtcgaaggcatctgaatcagccacctagtcggtgacagtaagaggggtcaaggtcatcgtactagagaagctagcaagagaccgctgatccgacccatcagacaatagggtccatgacaaagcggactagggtggagaggtagaagtggtaggcgctggtggcatagagggtagatggacgaggggataccctagaccgagtagcgtcaagtgagctagatgtggtggagggagacactaggaaggtccatccagagctaggttgggccacaaggaaatgcagttgaaccatgagttgtagatggagggtcaaggagagtagcctctgtgccatctccatcaccatgatctcctggtcgccgccgctaaccaccacccctaggacgcgccccctgtcctaggcgggtgggcggacgcggagggcaaagatggaagggactag

SEQ ID NO: 101580 - DNA, 661 bp, Zea Mays
agattacatagatatcagattcatccagaatatcaatacatacatctactcatatattcatcaattcacattcgcattcacaacacacatttatatttacaaagcgacattcacaaccacaaaccacattagcatatagttcaacatcatcatatcacattcacatagtctaaggtatatacaaattcacatagtcccatatcattcaaatgtcgacatacaactactaaagttctatagtccaatacaaggaaagtaaataaccttaccaatcgtcacttggttggttagagttatgcccactacctcctactggactctagttggtgaagaggttgtttgcccatgaagccactacgtcgtcttgggcagatccatctccaggtgctgtaaccgttggaggacgtgtttgtaaaccctgtaaaacaaatttatatattatactaagtatcgctatattgatatacaacaatttgctaagttccccatttttacacacatgaatgtacatataaatgaaaattgttgtggacgaagccaagaaaattgttgcagaggtggaggcggcgatgcaaatgctagaggcaacatcccaaatgttggcagatagacgtctgtttgttgtgccacttgctataaattagatgcaagtcactattta

SEQ ID NO: 101581 - DNA, 705 bp, Zea Mays
gagaatggagagcagggacagtactagggcgtctggagtggtgaaaccattgaggcgcatataagtaaaacgatttctactggcgattctttataagaagcgtccgtagaaatgatttacacaggcggttcctaaagcgagccgccagtgttaattcagcgttttcactagcggttccttaagccagccgccattgttattttttcactggcgattctttaagagaaacgcagtggaaagtatttttgggttctaaaaatcattagatttcatcagaaaagtattagttaacaagaactactttattcattaaaaaggattgttttcatcctagtacaaactactacttttcctaccagaataagctaccatgcagcagtcgacgacgcttgcagggaggcatctcatcatattgtcttgccccaccatcatcgtcgccacttctatcgctgtcctcgtcacttctgtcgtagtcactgctgtcgtcgttgttctcgtcatctccgtcgtccgaggagacgatgctcatccaatatccagacatcgggtcgtcatcattgtcaaaggactccacatccgacgattctccgtcgtacgtccaaaaccagtcagtgctggtgtcggagtctagctccccatcgaggaactggaggtcgtccccatcggtgaggtcgccgtcggattccgatgtaacctcaaagtccc

SEQ ID NO: 101582 - DNA, 534 bp, Zea Mays
ggcaggaacagtcggatgactaagttggcgaagacgtttccggcgagtaccctcagcccttcgagcatccacaactttctcaggctctggaatagtcccagcagccaccgtttcagtaagggcagagtcagagaaatcccccgccaacatatccaacatagcacctatctctgcatcactcggattagtaggtatctcaaagtgaacttgtttctcgtcattggaaaggccataaagtaaagcaaccagggtttcaacttctttaggagagagtcgcactctaagacccaaaccactgtcaccggcaggaggattggacacaaaactgaaaaagggtttagaagatggcaaattccaagcagaatatgcaacaggagcaccaatattcgataccttgcccctcaatatcatctccagtcggctcaccagatcaacagtgggaatcctcttgtcagtaacccgagtcgagtcagaggcaccgctatacaaataagccgggtacgctttgtccttcagtggctgaatgttcttaaa

SEQ ID NO: 101583 - DNA, 465 bp, Zea Mays
gacaataatcttgaggtagatgtacctattaatattgattttgttactcctattacacagttagtttcagtttatgtacctcttgttagcaacaatcactccattactcaagatagacctagaagtaatattgttttgccacatcgatatcgtgacactaatagtatggctcattatgctctcattgctgctcaagaaactaatgttgcatttgaaccttcttattcgaaagctatctcatgtgatgattcatccaagtggttagttgctatgaatgatgagtttgagagccttcaaaagaatggtacatggaaattggttgagctccctgaaggtaaaaaaccattaaagtgcaagtggatttatgagaagaaggaaggtatatctggagttgaacctgcaagatttaaagctcgtttagttgtgaaaggtttcgaacaaagggaaggtattgatttcaatgag

SEQ ID NO: 101584 - DNA, 377 bp, Zea Mays
atcaagaactgtagccccactttacataaaacctgctaccaaatgtttctagagaacacgcaagagagcaaaatatgttgggctgtttcatgtagcttgtggctcacaaaagatgttggactgctgataggctgcagaaacgaggactcccacaccctgaaagttgccctctttgtgatcaagaatttaaagatattgatcacctgttggtggggtgtgttttttctagacaattctggtacagatggctcggacaggtcaacctgcagggcctcactccttagccgggcgataagagcactatgcattagtggaagaaggcctctgatcaattgcagggcattgctgcggaagggcttaattcccttctcattcta

SEQ ID NO: 101585 - DNA, 370 bp, Zea Mays
atatcagttacaaccaggcacattagtgtaaccgtgcaaccagacacattgagaacatttgtaaagttgtctgattttattattgtaaggagcgtgaggcctaaaagtccagacttcgtcaaaactttggtagctaaaagtagacttcttcatatgcctaaatggacatagattatccaatgggcaattagaaaatgatgtaaagaagagtagcctttcgcgttagtctccatccccatgtcatgcctccatggtttcgttaagtcgccgcttatcgaccaggttgggatagttgcctgctctagtccgggatgtggtcgtctaggcggcgcgcggactcggacgatgactcccaaacagaaatcactgc

SEQ ID NO: 101586 - DNA, 464 bp, Zea Mays
ctcaggcagtaagatctattttggaccattataagccagtagtaatttgtgttggtacctatattattgccatttggtcatcatatggacttctgtaaaaaaacagaaatcccactgaagaaacctaaaacatttcttgaaacttacaatagcactctgtttgaattttgtgcagaagcaaatcaaggaactggaattagagagaaattccatggtcattaaggaagcagagaactcgaaggattattatgatctcttatagcaacacaggagtttcaagaaggatgtccatgatatggtcctctctccaaaacattttctgccattcttgcaacctggaacatttaccgcctttcttgcagccaacttttccattgatgaaaatgttacatgtggaattataataaacttcgaaaaaagtgaaatcacatggtaaaagtacataagttaaaaaattattccat

SEQ ID NO: 101587 - DNA, 881 bp, Zea Mays
gcaacatggacttggatgaaggcaaaatggtgatcgagatgaccaacacctcaatgaaaatattagatgactcattaaagatttataacatcatggaagagttcaagacaaaagatagaaccaagccagacatgaagatcatgaataaaaagcaagagaagtgtttgaagagcgccagaccatagtgccggaccattctaagagaggtgtcatactatgccctagaagctaacccttatcggtcgaagaatatggcgagagagggaggagaagctcccaagtctcttgtgcggaggaggaggtggatctaagggctatagagcgagccttaactaagtcttggcttggcggtggggcttcggtctttgggtcttcgtcgatgcatctgtccctgctttcgtcggtcggtctgtccggtgctctctccgtccatccgtttggtgctctcttcacccgtctggtgcccgaccgcctccttttatcggccaaggaggggatcgaccatcagtggctttcttgagaaggatcactgggtgattgtaaaaccaagcgttttacccggtgaagtcgtgttcgtccatgagcgcccgggtcgcctggtcatctcgtgttctttatggcggatggtgcggacagtgtggggcctgggcgtcattgttcgagctatgccgatccctggcctctgtagcctaggtctcggcgcgacttttcttgttgtgccttgtagacaacatgcgcgctcaggcctagccctgataggtcatgagtgtgccgcatgccgagggcgcgcgggccataaatgtgccacaattcgagggattcataggtcatgagtgcgctgcagcccgaggggctcgtaggtcatgagtgggagacggacc

SEQ ID NO: 101588 - DNA, 522 bp, Zea Mays
ctggaactatggtggtcggatcagctgtgcgaagatgtggcagagataatgagcatttggcagctgtcgccgagcacgaagaccatccaataccgtgtcctcgatctcacaaataaggaagtcaacaacatcaaactctgaatgaaagatcagggcaccgaggagccaaagctgaatatgagtggtagcctctctataacccatccacgacagaagcgtccgtctcatgagctgatataagtacttggctactgtagtgaaatctgccggagaacgtcgcgacccatctgagaagggcggtcggaacaaagccgcgatgtgagctgtagctggagcaactccgtcgtgagggcgacgaggaggatcagaggtaccatagcacaagctatgaagacaagtcgatgactcattgaatccaaacagctggcgaatctagctagcatgaagtgtaacatcctctcgctcaaagcggaacctcatccactggtgatcggggtcgatccatactgacgcattgaacac

SEQ ID NO: 101589 - DNA, 705 bp, Zea Mays
aggactcagagcgttgaaggatgaatgtcgaggcttgactaagggattggagaagtgaaaggaccgaccgcgggggtgcctagtacctggggttattgataagtgcaagtgtatatgaaggagtagatcgtatttaccaaatcaagacaatggtcgaccaagttatgcggagggtctggaagacttggtgattggatggttgaggattggtggtaacacgtgctaatatcatggagggagcatgtcagacatgactcacgatgggtatggtggtttgggcctcaaacccaccgggtcgatgttttctcatgtttggtcctcaaaacctaggcagagtttgagtaggaactagagacgtcacatggcgtcgtcgtgaagcttgcgtcaatgcgaaataaagtcgtgaagggcacgtggctatcagatctacaaaacttgagttggaccataacacccccgaggtcaagtggttccactctaactacctaggggcaagttgagaatatgtaatagccctgtaaataatggggtgacagatcgaatcatcttcatatctctagcacttcatttgttttcatcctttttaggttttgtcttcctttagtctacttttaagatccacagatgttttagacactacataatatttaatctgtgtaaactttgatagtgaaaatgtcacattttcacatactcaacacacca

SEQ ID NO: 101590 - DNA, 499 bp, Zea Mays
acttgtggtctttaactcctctatagacgtctcagcccaaagctccttagattttccacaaatgagctccaaaaacagcacaaacactgcaattcagacttaaccttctgttcctggtctgaaaactgaaaaaaactatcagccccactttgggtaacttgtactccatgttctgggtcagatcaagcctaactcacacaacaaaatttgttcactgacatatgctcttcaactctcccatagcaaccatggtccaaaacttcctagaacaggcaacacacagccccaaaatggcactaaaaacaatgatttcagacttaggcaactattcaaagtctgaaaatcatgaagtctgacagtcccactttgaacacctttttctcctagttgcatatggttttagggctgctacatttcataaacattgttctcctatagttactctacaggtttgttataacaactgtttccaaaatactcatggattaaaagttacagg

SEQ ID NO: 101591 - DNA, 402 bp, Zea Mays
atatttttgaaggtgcttcgggggcggcagtgtcggtttcttcaaccaaaattggctctgatatttttattttctcggctgcctctgcaatgttcgtttcttcggtttcaaaaggttttaccttggttggctctgaaggcccagcttcagtttcaaattgttgcttcgaagcttcggcaccaaaggcttcagtagacacttccgaagtttcaacagttctctttggagttatgcttgaagatttaattgtctccaaaacatctaatacattaaccattctttttctttttggggttacgattggacctttcggcaccaaaacttctgatgtttttgctttttcggtccttggttcttccaatttttctgttgctggcacttcggtcagctctttgatttctg

SEQ ID NO: 101592 - DNA, 605 bp, Zea Mays
gattgctattctggataccatcagattagtctggcaaaggaagatgaagaaaaaacggcattcattactccgtttggtgctttctgttatacctccatgccgtttggcctcaaaaacgctggagcaacttaccagagagccattcaaacatgcttagccgatcactggggcaagcgtgtggaagcctatgtggatgatgtggtaatcaaaacacaggactcaaaagacttcatcgaagacttgcaactggttttcaacagtctgaggcggtatagatggaagcttaatcccgagaaatgtgttttcggggtaccagccggaaagttgctcgggtttattgtcagccaccggggaattgaggctaatccagataagattgaagctatcatgaagatggaagcacctcgatcgcagaagaaggttcagcggcttactggatgtatggcagctctaagcagatttatatccaggctgggagaaaaaggtctgccattttacaagttactcaaaaaggtggataagtttcaatggacttcagaagcgcaagaagctctagatgctctgaaaaaattcttgacaacaccaccagtactgaaaccacctcg

SEQ ID NO: 101593 - DNA, 338 bp, Zea Mays
gtgcttgttttagaagctactctattccattataggaccttattttgtaatccaagctactaaaaataaatctttaggattagaaaaggtcatagaaagaatgatttcgacggtcactggtggctctagtggagtagaggtgatggtgttctcttcactttcgagtagagagatcaaaactctctatatcggtcttgttctctatttatttatgcggtgtgaaggaagaacataatcaacatgattgttctgtccctgaccaggggccagcgataatcttaagcttttagggacatgatccttctaattaatgttaatattataatataatatatgtt

SEQ ID NO: 101594 - DNA, 2398 bp, Zea Mays
tgctacccctacattaaacagagttgtttagttaggggtggaataaccgggacaaggtagcttttagttttcctggtcattctgctacaagttgttatgtcgaaacgctgaaaattctggtttaaccaatgagacttgagatcctggctggcagccaattttcctggtcggccgtcagctgtagttggcagctaccatggctgcctccctgtgtcctctcctggctgggcagctagatgtagctgacctcggctgtcttgacgactgctccatggctgggggatgggcagcacgatggaaacggttctgaaccttggaatctgatgaagtcaggtgaaacttgattaaaatggctaatgacattgctgtttcaaaatagctgctgtgggacagttgttttttggagttgttcttttgtccaagttttatggatgctcttggagttgctcttaatttgacccaaaacagacgcaagttggccatatctttcccaacaccaccctctttgctttcagttagttatctcatccttatcgatttgaatagatatttacctgctgagactgagagtttactcttactgagtttgtcgtgtaatcgatcttgatttcttttcttggttgaattttttctctgcctatttattaatgggaggctggtcaaattcaaggagctgtggtttccagattcagtggccatggcgttcttccagtcgctcccagatcaatctagggctctaatagccgcagcccgagtaaacaatgggcttctggttacgcaccctcacacatcaatttgattgctgcagctttatgctgtaggctgtagccattttttctcttcaatcaatgtagccagttcgctgcagcttattccgaaacggcttctgctacagtattttgtctctgaattacagctgcagcagtctgaacagctgtcttaaagccgcagcgaacaggctagttgaggcctggtgatgagatctccctctgctgctattgctgcatggctgtgatgacaaaaaggttatttggttgattatgattacttaatgccatataaggatcaaaacgtgatgaccttatttgtgcgtgtctgagccgatgcaatgcagagtccatgtttactatttttcctgctgacattatcaccttcgatttttattcctgctgattactttttggcagtgatggtttctagtctgatccttgtgttcctgacactttttgtctactaagggttttgcactattgtttatttattctggtcatgggatggtaattaattcagggtacaaatatccttttatctatagctgacactttgacaggataatatccggatggcctgggacagaaacatatgtatgacctggctgggatgacaaaaacatacgttgtcgattggatttctttgtagtgtcttcgtatggcctggctgggatgacagaaacatacgtttctcgatcctgatacttgattttttttcaaggaccaaactttgatgacctttgtgcgtgtctgagccagtacaaatgagtatgttttcctttttttttaacttgaagttttccttatttattgttacaaggttatggccctttgacctttgtggctatgatgataaaatgtttgtttctcgatgctgagacttgaattattcaaggactatattttgatgagctctgtgtgtgtctgagccagcaccttcacctttgcttgaaaactatgaacctcttttgatgcccatggtatatttgaattctcttggcctgaagtgttggtattggctgtttgtctactgttatatttggagactttgcagattggaacaggttgctcgtgtccgaatcatgaaattgactgtgttgcggtgttagaaataataaccactattttctggatgagatataagcattacctattctttgtacgtaaagtatgcctttttttctgttgtccatggcttatttgagttccgtttagcacatttttgctttctttattcatttattgagttatggtgacaataatatccaaaatgatgctactggttacttgtctgttgtgatttttggcgagttctcaagttggatagattgctggcactgcttcagtcttgtgcattctaaaatgtcatcatagcttttctggatgatcatatctgtattaggggtcatgggtcctcttttatcgagtttaatacatgaacatggattctttgtggtcatcagattgtcatacatgacttgtggctacgtggctgctgttcctatccaggccatggttcgaattatcatggtttgaattatcctatatatgaatcctatatatatcctatccaggccatagtctgagaaatatataattataagggtgtatctgggatgtaaccaggg

SEQ ID NO: 101595 - DNA, 499 bp, Zea Mays
ccgccagcacagttcaagtttgcgaagcgaactgagcagagaagcattttcgaattagcacttaattttgtcaaatgccaaccaccaatgatacaatgttgggttttgttctaaaagacaaacataagattttgaagtgtgtgaatcaaactatctttgagctggagagtactcacggccaagccagtcaaggaacaattgaaagagtaaattgaagataatgatgtatccatgtaatgctctaacgccaatccagtaccagtttgggtctacacaaatgtcctgtgcctttaggatttggaaaccgggcgtgtcattgtttttgtcctacacaacagttcaagcctcgacaaaatctttagcaattccctcggaaaattaaaccctcctagaaacacaccacaatttgcaccaaaccaggaatccacatattttcagcttacaaagttagaatatcaatctgagcccatgtcaagaaaaggtgacaactataggaatg

SEQ ID NO: 101596 - DNA, 485 bp, Zea Mays
aggccactgggtgaatcagtgcccaaagaaggcaactcaactgtcgccagctctcaacacttcaacaagacaaggagcaccacaacaagcaccaggaggtcgtggccaggcctacaaccgtggaaaggtgaaccacttggaggctgaagtaatctaggatgctcaggacgtgacaataggtatgtttccagttgaatcctatgtagcaaaagtattatttgatactggtgccacacattcttttgtttctacattatgggtataagcacataacatccctgtagaaccaatgattccacctttaagagttaattcagttgggggaaagttcattctgataaaatgtgtccaaatctaaggattgaaataagggggatagacttccccgctaacctagtagtaatgggtactcaagggttagatgtcatcctagggatgaattggttgcacagcaaccaagccaccgtcagttgtgacaagaggac

SEQ ID NO: 101597 - DNA, 422 bp, Zea Mays
atatcgaagcgcttttcacccaatagtttgcattttaacttagacatcacatgagcactactaatttttacccgcgattataaccatgcgcaattgggctacaacaagcaaatcgccgtgaccacgagtttaaacaaaatcatctaacaagtctgctaaccagagcaacagtctaggccgctatacaaaatattcgtcggccagccttttattatcgaaatccgagacacatcatatacataacaatcacttaacgcaattgactcctacttaacattagttggctaatcacaccataagacttagcaacccatttagacattgcaactcaaaacatgggttgaagcaggttaattagtttttcttaaccatttctccactcgaattagttaacacacaagtcacttaaaacaccatatttt

SEQ ID NO: 101598 - DNA, 400 bp, Zea Mays
ctgggggtcttcagctttgatgggttcaacagggttggatggagcgggctcttggatccgcagggctctacgttggttatgggttaccaagtaggcctccatcaacttctggacatgctcatccttggcttgcttcagggcttcaacagcaatggcttcacgactttccaatgcagttgcacgggcttgagctgtggtgagatccacatggagctgacggttgcgcttctctgtatcttctgctcgggcaatcatctgacggtggtgccgagccaagaaatcatattgtgcatccagggtgagcaggtatgcagtgaggtgcacgactgtggagtcgtcctcaagcaactgctgcccttccaatgcacgcatcctggccatccaaactggacggtctctc

SEQ ID NO: 101599 - DNA, 363 bp, Zea Mays
ctggtatggtgactatggtcggtgaacggtgatggcctgatggggctgcagtgagctggttagaaaacaggcttgcttcccattcgtcaccccatgctcaataccactataccaggcaggaggaggtgaaaaccgaaaatattcttgttcatcatagtaccgtgacttgtgaggagtagaggactgagaagaaaccataagaggaagattccttttttgttattttgtgtctttctttatgaaacatctctgtagtttctgttgtataacaaaaaaattgccttccttgaaattctgattaagttgccacatgtttcagcattcatttccatgctttgtctccattttctttttgaaaatttc

SEQ ID NO: 101600 - DNA, 429 bp, Zea Mays
cctggaagccgatcagatgccagaagctgctaccatgggggcaagatatgaagatgtgcatgttgtcctccaactccgcaccacagtgggtacatcccccgtctggcataatgttcttcttgcatagggttgaccagtgatcttgcatatgaagatgtctggcagaatgttcttcttgcatgtgaagatgtgcatgttgtcctcctcaactccgcacctagaccttcgttgctgacatatagtggaggggcatatcacttaaaatactttggaccaagaccaatctgcccgcgcattgaggatcttagatttccgcgcattgaaggacggggcaaggatcgttttcgagaacaggatcaggatggcaaagatcatgggccacacacctctagaactaatgaggctgcgtaagacgtcagcgacaacaat

SEQ ID NO: 101601 - DNA, 348 bp, Zea Mays
gttcctttaagaccccatcgagagtgacggtgttgagcttagtgccttccggtatggtcagtactgcgtgaaagaaaccaaaaattcacagtaccctcacctctttgacccaaattggccatgcaccatgaactagtgatcccttacgattgtatagctggagtttgaccgcctatcttcgcctgagttctccaccatgttcaagcgatctcgtcggaccctgccacacgcgctcacctctaccgtggctagtgctctctgaggtaaccatggtagatcctgtgggtgttttgagttcctttacatgtcgtgatgctcatcggcttgcccggttgaactccaccgtcg

SEQ ID NO: 101602 - DNA, 361 bp, Zea Mays
cctaaaagaaaaaggatggcaagtgtactagatgtgctagagtcagtaaaggcttcaagttctatttcttcagggaagattgccgaggctttgaaaatgcaaatcgaagccaaaacaaaactgaccgaagctgggccaggctagtgccgaagctgggccttcagagcctggtaagaaaataccctcagaaattggagaggaggtggcagaggaagaggctatagaacagtctttgcctgaaaaagctgtcgttcctactcccgaagcaccttccgaagaccttgattatgttattcgacatgcttcgggaaaaagattatctgaggaagaaatttttgaagctaaacactatgcctgagaa

SEQ ID NO: 101603 - DNA, 297 bp, Zea Mays
caagccttccctcgctaatgtggagatgtttattaaacccgcgacctagctttactattcacatcaaattagcacatctagcaaaatcaatatgacattattaaatttatgtgcatagatcaatatggattagaagaaccgatgattcataattctaattgaaagaaaaacagatagtaacaaacacaccccttagggcatgtgcaaacctgagcccctacattggttttccaagtataagagacagttaaaataatgcatgatacaactgagcttttagatcataaatacagttaa

SEQ ID NO: 101604 - DNA, 526 bp, Zea Mays
gggtatagtcaaacatatggaattgattatgatgagacatttgcaccagtggcaaaaatgagtattgtaaggacattgatctcttgtgctgcaaattttggatggcccttgtatcaactagatgttaagaatgctttcttacacggtgatttgcaagaggaggtctatatggagaatcctcctggattgtcaaagcctgagacaattgggaaagtttgtcaattgaaaaaaatcattgtatggtctcaagcagtccccaagagcatggtttgatagatttagacgtgcaatatgtagcatgggatataaacaatgcaacggagatcacactgtttttatcaacactttggatgacgaatcgtaattctagctgtgtacgtggatgatattattattacaggtgacgccgagcttgagattgcatgtctaaagaagaatctaagtaaggaatttgaggttaaagatcttggtcatctcaaatactttcttggtattgagattgctcgatctccaaaaggaatagttc

SEQ ID NO: 101605 - DNA, 692 bp, Zea Mays
gatgggcataaatccaaaacagttgtagtcggcagataatcccctattcgaatttggaggtaaggccactctacccctcgaaaaaattgtggtaccattatcctttggtgacggcccaaacgtgcagatggagcagatcaccttcgatgacatctttacaatgcaatcttaggtagggggttatcaatgctttcgaggcagcaattcaaggattatacttgtgcatgaagatcctagaccccgtggagtcatcacaatttttgaagatcgacaggtggcccacatcatagaatgggactttgtccctaggaaacaaaatcttcattgcttgggcgccagtacatagacacataacctagagccgccagccaagattgacaagcaccagaaccccacctaaaatgacgaggggaccaagaaagtacccctcaatactgctttcccaaccatgcagtattgaatggagaaggcctagctccgcaggaagcagccagcttgctcgactgcctgcgtgggaacaaagacgtcttcgcctagtcgtcatatgacctggtgagagttagccaaagtatcattgaacacatactgtctatcaactcctccgctcaccccaggaaagagtgactctacaagatgttagatgagaagaaagaggtagccaaggccaaagtccagcggctcttggatgcaaa

SEQ ID NO: 101606 - DNA, 322 bp, Zea Mays
atcaccttcatgtgacatctttagaatactccagatctcatgagcatcctcctgtccctacactttcctgtactcctctgcactcaaacttgctttaatgttgctcacgacatgagcatcccagtgaagatcttgcatcatttctagggtcatctcctaaccaaacctaggcttgcatacacctacattcacaatctcctagagacttggatgcacaccgattatatgagacttcatctttcggcccactcatcataattcaactcactaagagttggtagtttttcgagtggtgccaaagagaagtttggtacaaattatc

SEQ ID NO: 101607 - DNA, 805 bp, Zea Mays
cggtaccaagcttggtaccagggtgcgacttgttgtaagcttcaccagcagtggacatcggatgactacgccgacattgattcttccgacgatgaagacacagagtacgactagtccactagactaggaacccaagtggaggcggcacccatcttggatcaagtggtaagttttactcaattttaatactagacatgtatcaattgtatgtttgatgcaaattgtgttgtacaaggtaacacattgagacgctcggtacaggacattgatcgccagcttttgactgtgggcgacaacaacatgcgtagcttcttagaggtaaacctacctgcagcgtttatagcctttagcttgttatgattatagctttgatatgttgtaaactaatatgtttttgccatgcagcgtttatctaggcgcctacgtggagctgctgcttgctgtggctgcaggaccaatgttgcacatgacgttcatgtaccatcgtatagccacatagcagcgccgtccatagggctaggcgttggcttcgactacgatcaagacgagattggagcttcacagcttcagggggctccttcgacacaactgttacaaccagaacatcgtaggctacaccgctctccacaacgttacactccaggcatcgacgctttaagcaagggtaagactaggagacgttgacttggtttgcgctggtatggactctatggagttgttatgtagcgtatgcactggacaagaattgtaatggacttgtttggcctctacggacttgtatggccttttatggacttgtatgaac

SEQ ID NO: 101608 - DNA, 421 bp, Zea Mays
gtaaagtgggtctgccacagttggcacttgggcatgaggatatgatattccaagactggtggagtagaacagaaagtcttgtgccaaaaattcagagaaaaggttttaatacgatggtaatcttagtggcatggtggctttggaaacatcgaaacgcatgtgtctttgatggaatagccccaagcaatggcaccattcttcagcacattcatgaggatgcaactttgtggggaatggctggagctagagctcttagaagcctttggccttagcttgtggctcgtgcctcctctctaaatgctaggttgttgttatcgtgttttgggccatagatgagtctctttatgttttttgttttcatcctgcatgaggagtgtccttgtattttggtttgttcccaggtcttcactttcttcttaat

SEQ ID NO: 101609 - DNA, 275 bp, Zea Mays
ctggaacgctgctctctggttaatgaatacacgcctatggctattaggctatatatctatctatccgttgtgtttaagaaaatagactacaaattagatatagagccattgcaaaacaattagttgtataattgaacttgttagttttgaggctacgccttttcacttctgctcatgtcttactttttccttcttgtgtcgagtttgtttgttgtactgtgcgtcatgtatgtgtgtgtgcagcgactattttggtaatcacctgtgctataaat

SEQ ID NO: 101610 - DNA, 494 bp, Zea Mays
cttatcccaattcttcccatagtgcagcacacatgccctcaacatgtcttccaaaatctgatttaccctttctgtctgaccatctgtctgaggatggtacactgagctttttatcacatgggttccaagtgactcttgcaactgctcctagaaacgtgctacgaatggtgctcctctgtctgacacgataatccttggtattccatgcaaacgcattatctggtcaatatagatttctgcatacttctctgccctgtgagtggtatgtactgacaagaaatgagttgtcttggtcaaactatccacaatgacccagatagaatcgtggtgtcgggatgtgttgggtaaacccacaataaaatccatgcaaatatcctcccatgatggtatgggaaggggctgtaaggtacctgctaccttcaaatgactagctttgactctctggcaagtgtcacactcagatatatacttagcgatttccctcttcatcctgg

SEQ ID NO: 101611 - DNA, 392 bp, Zea Mays
cttgacaacatcatgcaagagtccaaggcacaaaacaaaaaaaagcccaagtgaagtaacatgaagaataaaagactaagctataacagggtaaccggacggtccagaggtacaccggacctagacaccagactaaacacgtagagatgtataatatgcacctgagcctgctggcacaccagaccgcacaggctcaatggttggtaacgactagcttgaactttcacatgatgtggtaggcacctgaccaatccgatttaaactgttggcacaccgaacctctggtgtgcagcaaaaaagctgacaaccatccaacgacaagatgacgtgaaatggttccagattaggtccgatatacacagttggtgcattagatcggtacgcaaaaaatc

SEQ ID NO: 101612 - DNA, 672 bp, Zea Mays
gtgatgagtccgattccccaggagcacgcgagactccccccttccatgcggcggctgtggtccaagccggaggtgaaccgaccaccgcctgtcagggaaccgtccggacgccaagaatgaggatccgccgatcccgctcgtcgtgatcatcaaagtccctaggaagatgaccgtccgccggaaggaaaggaggccaggacctcaaggcagcgtccgtattatccgcgagaattacattgacactgataccatatgatagagatctcctctcttcaacctgcaaccctttttccaatatgtgaagcgccaatttccgttgtaatattgctggatcaaagcaccacgctcgcaccacgtaggatgaaagatctttcttcatcagggtatctggatgaacttcttcaatgcaatatgagtccattaggatgacctccgccgaggaacgaaaccaggcatgttctgggatccctcagatcaccacatccactaaatgcgacatgcaagacgaggaagcatgcaaaaatctagaccatcttttgaacagcaagcagaaacgaggttctgtgaacaacttgctaatcttgaccatcttttgaacagcaagcagaaatgaggttctgtgaacaacttgccaacacgttgcaattccaatttcactttgctagattatcc

SEQ ID NO: 101613 - DNA, 383 bp, Zea Mays
gtgaggagaccacgcctaagcctcaggataatgatgtagtcatattttgaagcttcttgaatgtcgggcttcggttcccattgcacaagatggtgataggggtgttgaaaaatttgacatcttattgcatcaactgatcccaaatgctattataaggatggggtttcttatctgggctatgcgaagccaaggtgcaaagccaagcgtggaatgcttctatcaaattcatgaattacactaccaaacgaaggcagttggtagagagcaccttcataacaacttcggctgctataactttgtgtgtcgcaaggaagctcaatttccacccttgcataccatagcaaatggtcgaactagtgggcgagagagtggttctacatgaa

SEQ ID NO: 101614 - DNA, 746 bp, Zea Mays
tagagatcaacattctgtcttttggggttaatgacctgagctttgagtggattactgaaaataatccactcaaagatctccatctcgtgcttttagaaatcatcattttatcttcgtctcatgccttagaactcaacattatatcatcagcttatgctttagagatcaacaagttgtctttatttcatgctttagaaaccagcagcgtgatctgcccatgtcttgttaggtttgaaatttatttgatcggtgacagattggacgtctagtagatggctcttggctggtcttcatttcgctttgtgcttcaatgcttctgttgattagacttgtacttcagcagctatatttggctttcctctgatctccatcgatatctttcttctgtcttgatacattcattgcgtatactgtacggatgtgactacttgggaaaatctattgaaaattcttggccgtcccccccaatgggtgtgaccgagggacgtcttggtatgccgagcgtttagcaaactgtccttgagtagtaacttgacgtgaccgcagggtgtaatcattccgtccaagaagttgaccttagtccaaatggtgtcgtgttacgtgaagagggaaataatgcctgacttgcttccagacgatttgaattgctttatgaatacttgcgactgttcggtgatcgtggtaggagatgagcagttgcctccgacctctataaatagactacctgccttgttggtgtcttcaca

SEQ ID NO: 101615 - DNA, 475 bp, Zea Mays
caatcactaactaaataatgatagtgtacagttaataaaagatgaaaaagtaagccaacgtaatgaaacattaactaaacaactgtgtattaattaattggtagtacacatgtttggacttaatatgagttttgcgactaacacggttgctgccatatgaattatatgtccacatgtttggacttaatatgagttttgcgactaaaacggttgctgccctatgagttatatgtccactggatatttggaaggcgtaaacaacaaatgtaaagctgaaccatatcgattaataactccgtaaaacatctaacgaaaatagacatcctggagacgtaaacagcaaatgaaaagctgaacggctgaatcacacggtcatattactcctaaacccaacgagcttaaaaccaacccagctcctaatcacaagaacaaacacaagccaactccaaaccaaaccaaaccaggctaaaccaac

SEQ ID NO: 101616 - DNA, 525 bp, Zea Mays
tcagggaactttcaggggaaaaggcgtcccttcaagagagccttgcaatagctgaaggcgaggaaaccaatacccgtgaggcttaccgcaccctgaagatggactatgacaagaaactgaagaagctcgcccccgcaagaagaatacgcaagaagaccaaaaaccaaggatgtcagactgagcagaaggaagaaacccctccaaccctaccccctgtcgggttaaggaactcgtccgacaccgaggagatgtccctagccagccttgatgatcttctcaaggaatttggggacactttagaaaaggagttcgggagtaccctagatagcactcgtgtgtgatgagcttatggtagcggtgtgttgtattatgtaatggcttgatgtaatgaataaaataactagttaagaaaaaaatggcatgtgcatgatagtgactctcttcccatggcagatggcttcggataaaaccacgcctaccgcctccgggattggagcaggatttcctcggagagctgaaggagag

SEQ ID NO: 101617 - DNA, 334 bp, Zea Mays
cacttatgtatctaagcaaattacatatatgtatatatgtacttcgaataagtgctcaattacataggattgataacgatgttatacatgaataaatatatgcatagagatcctacaatataaatgcacatgtatacacatatgttattgagtactcggatggtatttgatcttttcaaaaacaaaaacgggtgaaggttgttgtgctttaatagtctagatgtgcttttaaccctctttttatacaattgtggcattgctgatctaagtttgttacttcatccttatggcttagattctaattatccaacaatatcaatttatatgatctgaa

SEQ ID NO: 101618 - DNA, 733 bp, Zea Mays
tatgcgactccttgtggcgtggcttacgatcatagttgttagagcaattgtcacaagcaactgctctagatggcgagcgtgttgatgacaaatccaaaagaaaaggcacaacaaatctaagagaaaaatatcgcccctatctagagtgccaaatgttatcatggtatgacaccaaggtatgaaaagtaccaaaaagataagagagattagggagagcttggatgtaggcgagtggtgtgttaaacctggtcatcactgtgtactagcatatgggtattagagaggtttaggatatagtgtgcgtaataccctacgtccacttgtgattgatgtaatgatgaacataaaggttaagaagatttcaagctcaagaaccatctaagtgccatgaccttatagctctgccttccaacttaatttcggtgagagttctagactatcagtcctagttcacctttatgtctgcccttagatgttgcattcttttatatcatatgaaatgatatgtcctttactcaaagtcctgaccgagggtcacatagagagagcctaagaaggtgtgtttctatgagagaccaagcgagtcctagaatgtatgtcctccttattgttacactgctcccccttccatagacaaagagggagataggtttacataccaattggaccacgggtctggttagagacccaacaactctaaaccttatcttggtcatgtagtcacagtcatatg

SEQ ID NO: 101619 - DNA, 272 bp, Zea Mays
ataagctggtggagttcgcattgcaaggcaacgacgcgtgctccattgcttcagccaaatggtacgtgagtgcgcgggctgatttagcactacactagggcatgggccggcatgggtgaggtgcctaactttttgacgtttcggtggcgattttggactgggttcttagttctcacccacggtctaatgatattagtgcatctccactgcttttggtgtagtgccatatatccagtgatcagctcctcgctagtcaaccatgttgttttgac

SEQ ID NO: 101620 - DNA, 424 bp, Zea Mays
ggtaattcctgaatagagtggagaattctgccgaagtgatggtgttggcagcagcgtgagcagcgcaatatgcatcccaccaatccacagcggggccggtaaggcgacccgatgcatagagtactttctccctgtcaatacattgagctatgttgagcatcttgtccacggacttccaccagtcatcagcttgtagtggatccgaagagttagagaatgtcaatggcttatggctcataaactctcggtgcttatccatgggcagagctggtggtggtggaggtggtagttgttgttgttcctgccgtacttggcgcatttctttgcattcttgcctcatttttgccgctcctggcgcatctcctgacgttcttgtcgcatttttgcttgcatttctgtcatggtgtttgccatttgctatagc

SEQ ID NO: 101621 - DNA, 638 bp, Zea Mays
tagttttctaacaaataccttacaattcaaaattgcataataaaggattttgaccccttaatcccctccattagacttggtcccaaataagccctggatgtctcgacggggttcctcctggatgtgtggcagtgtgtgcgttcccgggaaggttcccccaacgacgtgtcttacataacacgtttatcatcactgaaggtacaaggttcatgtgcgaacaaatcttagatgctgaccaacttacaaacaactagaccctatatcgagctagatctgatcatgggccatccgacccgaccaaccagaccccaccgatcaatgcaacgggcgggtctaggccgtaatttttgacccgcaataattcacggtccaggtacgggccatgattcttgactcaaaatccgacccaaccagaaaaaaccctacccaaagccaaaaaactcgaaccaatccgaaaaaatccgacccgacacgtcaagctgggaggcacgggccaacctgacccgacaatagacacgagtcagatacgggtcgtgctaaatgacccacgacccgaatttgacccggcccaaactcgacctgatgtttgaataggtctatatcgagcctaccatgcatctgtggtgactcaactcggc

SEQ ID NO: 101622 - DNA, 361 bp, Zea Mays
tcataatcaataccctatttctggctatacccttgggcaaccaacctcgctttgtttctcactaccaacccatcctcaccctgtttgtttttgaaaacccatttaatacctatgggatggtagttgaaggaggtggcacctattggcacggagatacacaaccaagcactcgggaatgggggaatgagtaacacaatcaagcagtagaatgcaggcacgattgtattaccaagcgtgacccaaaggttataggactcgggatatttataggggtagccggggattggtaaactaagtacagtaatacccacgactaccaactatattcccgccatgcacaacacaagagggtaattatagg

SEQ ID NO: 101623 - DNA, 463 bp, Zea Mays
gcggcactaaaaatcgctagtgtaaatatctctaagactgccaatatagagcttctatgtactagtgcaatgtgaccaccaaatatttacaacaagactaatgtaagcacctactagcaaaaagtacgtgcctacctacaaataagaaagtagtagcaggtatatgtatctctaagtatatataaacacgtcgactatttggtttacattgcataatctttgtgataataatatacgtattattatacacacggtgacaaatattgatagtcgtcaatgatattgttgcatagtcgttatctaattaatactggtttcgatataataaatcaatgtgttttgatataatccactatgtggcgttgctatacatgtgattctcatctgatttcatgtatagtggaacatctggttttgtccttaaaaccgggtgtgactgtttagcgatggtacttacaaccac

SEQ ID NO: 101624 - DNA, 419 bp, Zea Mays
tcggtcaacagctgtaggtcctttacttcacgaatggcctcgtgcttatgtacgtcgagacggaagaagatgctggtaaagacttgcaccaggtcaggtttccggccaaccgaaacaaacgcttcatagtcatatcgcggtttgagctcgtcgtagacggccttggcaagagtggtctttcccaggccaccagctccgaccacagaaactatcttcatcttgtcaccgccactggcagagacgtcgatgtcgtcctcggggcagcgggacgacggcagcggcagaagcatggccatgacctcagccttggacctgtccatgccgaccagctgtgccgcttccctgtgcatgtatgcgaggcgaggatccagcgtcctcgccggcgcaggcgctgccaccggaacggcgtacctgtcgcg

SEQ ID NO: 101625 - DNA, 475 bp, Zea Mays
taagtaatggaaaaggaaacgtgtcacatctttatttccttacttgtcttacagagcagggtgtggtatggggtttattccacctttacgatcaaatgtgcacatcttacagattacatgaagctaaaaacctaggaaaattcttttccaaaaagtcttgagtctcccaggtagcttcttcttcagtatgctggtcccattgtaccttatagaatttaagagtccgttttcgggtgaccctgaccttctgatccaaaactcgaatgggatgttctgaataagttaattctggttctaaggcaacatctaccacatcgatggttcgattaggaacccgaaggcacttcttcaattgagatacatggaacacgttatgcactgcagataatgtttctggcagttgaagtcggtatgccactggtccgcattgttcaagaatgggaaacgggccaatgtatcggggtgctagcttccc

SEQ ID NO: 101626 - DNA, 402 bp, Zea Mays
gaaagtccttacaactttccttatctcaatttctttattgaagggagctggtataaggtgagttaaatgaggtttgctcacatcctgagatttactgatggagatatttcaggagacaaaatcaagattcatgactttcgtcctcccaccaaggatgaagccaaggatcttcatatctctgagtctgataaatattgggagtctaccaatctgcacaagtactacagatacataaattctctctgcagaatgactctcatccccaaaggggtaatcatatgaatatcctgagagagagcaaagtcttgctctcattcatgaagccaaacagttctaaaaagcctaaatgtatttgatatgatttggcaagaaatcatacatgctgccttcttccctctcaag

SEQ ID NO: 101627 - DNA, 552 bp, Zea Mays
ttattggccaccgagagcgcatgcttttactttttgtttgctcctccagtcacggtcagccagcccctagtgagtagtgacccatctggatttccatgtcgatgcgtcttccttgtgcaccattctttgcttgcatgtcgctgtccttgggggggtagcattgccgatctgataaacaacttttttgtgtggctggggcctgcctttcgaggttggcaacttccacagaattgcgctgtttgggaaccagcttctctggttggtcttggtgtccgttcccctgcaccctgccttgaccttaggaagctagctaaccattatcttttacttgcccctcacttcaattcccatacttaccacctgacatagacctaaatctaattttatgcccccccccccccccccccccattttaggtggctttctggcttcttacagcctattgctcgaacatcattatcctcttagatttttgctgggcgtctgttagcttttttttgttggtctctaatttttttttggtctgctctctttgtagcccatttttttttc

SEQ ID NO: 101628 - DNA, 349 bp, Zea Mays
ctgataatggctttaggggtaatctgatgaaggaaaatttcgaaggtcttcagcacttcaaccaggaatttgcttaacgggaaccgaagccctgcattcatgaagctcctttaaacaaccactttatcttcttcgggagcaggggcggcactatcccctccagctctcacaatggacatatctcgaaaatatcttcccttcatggcatcaatctgactctgtttgatggacgactttccgaagatagtatgacttggccgccagggccgatcttcggcatcttcgttcccactatccacataaaagttctcgctatcatcagaatcctcggacaacgcagctaatattt

SEQ ID NO: 101629 - DNA, 321 bp, Zea Mays
gcctcattttgtcactccacatagcataatcatctccatcaaattgaggtggtctgcctaatgggacccaaagtaattgcgcacatttagaaatgcgaggttaaacgaaaggaatatggttactccttttgtgctattggcgcttggaggatgttgattcgatgtccgaggtcgaagtcgtagaggagtcgatgtcgtagtaaacaactttcttcatcatcttcttcttgtagcctttcttgttgtgcaacttggtggagccggaggattcttccttgtgttccttttgcttgtgcttgttgccggaaagcttcatccctc

SEQ ID NO: 101630 - DNA, 505 bp, Zea Mays
gtcgtgcccgtgccgggtggcctgtttgaacatctatagtgccaattgaccatctatgcaacgaacaggcaaagtcctagcacaattagatcgtctatgcaacgaacaggtaaaatcacttcgcggatctagctagtagctggagtaaaagctacaggtgtttcatgaagctcccctgtggtgtggtgtggtgtggtgtggtgtggtgtggtgtggtgcggttggtttcgcgtgattcccagcgcgatcgtcgaggtagcagtcccttttgttatgtctattaatttattaaatttcactaaaaataaagcagattatgggggagttgctgctgagacagagcgaaatccaatccacgctaatggatggcgacgaccgctacgctaccgccagtgcgtctgcgtggtggcgtcactactgttgcgtcatcgtgggtagcgtcagcggcgtgacgtaatcaaccttccattgttttctctcccactgcctcaccctcatggcggtc

SEQ ID NO: 101631 - DNA, 496 bp, Zea Mays
cttgtgtggattcactccgaatggtgaaccaccgggggttcgaatagggggttgagacatagaatcatactgattcaggcttttcacactagtccagtatagtgttgatcgtagtattgcttgaggactgtttggtgtgtgtgtgtgagaagatggagcgagtcctgcccttttatagctcagggggtaggacttcacaaaggagacttgtttcctactagtaggagcatgatatgtttccccagttgaagtagtgcctttgacatcatccgtggggtcgtgcgtagccatacacccgatatggcatcctgcttcgctcgtccgatatttgggtccttgtagcgagctcggtgctgccgtcctcgtagtggtgcttggtgggtcccacgaagtagtctcatggtgtggttgtgtgcggcgcaacctcgccctttgtcatggatcctgtggcaccctccatcatgcgtaggcatacaatcactatggtgtattgtta

SEQ ID NO: 101632 - DNA, 713 bp, Zea Mays
acgagtttgacggactcacggtctcctcttcaccggcggtcaagctaagcctagtgctattctgtggatgtaacggtgctgtaaaagggtttataaaccccataggaggtcagccagctgagtatccagtttaaagttcagagttgaaactcacagcaccaagcaaaaaggaagcagatcaagggtagccgagcgagcagaggtaccccggtctctctttctccttccgtacataattatccaattcagtttgttacttgttaagagaattcgatagtaagtttgtagtaagcttggtcactccttgaactcaacgtagtactttctccgtaatacgccgccaagagatcattctttattttttgcaggttgtcaattacgtgccttaatatgagtcattggaagcagccgtcgaaactcgccatgcttgtagtactgctgctgctgctatgtcatgcagtggacaaagtccattgctcgacgcaccataacaacagccaagattttcattccctgcttgagtttcacaagggcatcaccagtgatccgaacgaagccttgagcaattggaaccccagcatccacttctgccattggcatggtgtgaactgcagtttcactcgaccatatcgagtcacggagctcaatctcaccggccaaaacttggctggccaaatcagctcctctcttggaaacctgaccttccttcatac

SEQ ID NO: 101633 - DNA, 361 bp, Zea Mays
gttaggccgattggaccaccacaccaatcggaaagaacgggaggtcataatgttcaattaagacctaacgtgcctgcatggacacctccacaccatatccacctatgtcatatccgtacgcatacatacctgcaccatatgtcccaaatcaaatgtggggcatgccaccatacccatttgggatgccacagtaccccgcttggggggcacctcaaacatttgtattcaataggttgacacctccagtacaaccgattgagagcccctcaatctggtccacgagcacaggcccagcaagattgccgaacaactcggcccaaaggctgactaatccggcaggggggcatacagctacaacccc

SEQ ID NO: 101634 - DNA, 291 bp, Zea Mays
aattcctgaaaatatgcatcaacactgcgattaccttgcacaagacatttcagcttcaaatgtagatcacgagaataatattcaagaacaaaacgacgtctcatttccctcttcatgccttcccaggttatacggtcatgtccatattcagtacggatctgattccaccaagttatggcatagcctttgaactcaatggctgcaagctttgccttcttttcagaagggtattcatacaaatcaaatatttgttccactttggtttcccattcaaaataatcatcaacattc

SEQ ID NO: 101635 - DNA, 852 bp, Zea Mays
caaggtgcatgggggttctaggattcgtacctccaaatgacgagaacagacgtgatccttccatgttcgccccggcttctgatgggaatgtcccactgaatgtagggagccttagggcaacgaaatctcaagaggtggaatctcctgcagcaccgctccaccaagccctccttgctcctccacgggttggttgatcatcgacctcttgctgagatactccacctgaccctgaatccttcagctcccccgcaatcaggttcatcttcgcttccacctccggcttccacttctgaatttccccttgctcaacaatcacacccttcatcgttgactccatactcctgatcaaactctgcaccaactccatacgcctgtgagtctctcgattcccttcctcaatcttcactaataaccgtgccatcggatcatccgctcgcgtcggcgccatccctctgatcttcgtctggagcctcgttcggtactcatagggaggatccaggttaggtctgataccaactattagacacaagtgattccccagtaagaggagaacttctccctcacctttctgtattggctactaccaattccaccgtattcagttcatgcttattttattacaagggtttatatttatacccctttgaaccaatgcttctgctacaagaaaggattgctactaaacctcttaatgggtccacatcttgatgtcgtacttggtattgggtttcgatacccgattgctcctttgcgaacctgaacgcctgcatctggctcctcttcactagtagacaacttagccccagtagtggtgttgttgacatcattgtaacgcacccctaggccagtccc

SEQ ID NO: 101636 - DNA, 593 bp, Zea Mays
gttaccaagtaggcctccatcaacttctggacgtgctcatccttggcttgcttcagagcttccacagcaatgacttcacgactttccaaggcagctacacgggcttgagctgtggtgagatccacatggagctgacggttgcgcttctctgcatcttctgctcgggcaatcatctgacggtggtgccgagccaagaaatcatattgtgcatccagggtgagcaggtatgcagtgaggtacacgactgtggggtcatcctcaagcagctgctgctcttccaatgcacgcatcctggccatccaaacgggacggtctctctgaaagggcggaaagaatctgagcggtgtgtcggccacttcttcttcatagatctgacacagggtcatcaatgccttgcgggcgacgacttgacaggtgtctctgaatctgtgcccagcagcagtgacactccattccacatggtgtggactggatccaatgtacacaatcacgacacacttctctgtgccatgctcgacgaattcacgaccatcatactctggctggctcctgattccgaggcgaactgtgcatgctctcagcaacttggggaa

SEQ ID NO: 101637 - DNA, 797 bp, Zea Mays
aaagttttacagaaaaagaaaagagaaaagtgtgaacagtgctggaccctattcagcccggtcggtccaaaccgaacaggaaacggggacgcgccccgtgtgtgcgcgcgcccgcgctggcaatatttcacagaggcccctgatgacctaactaatacgctaagaatccctagccactgtttatgctctctctgacagttacgcaaaggtccctggggttttgtttcttctccaaacaactccctgatcgcagcgtgctcgtcgttcgcccccgacgccgcacagactggccctggccggcggcggatgctcagttgagcgatagggggagcataacctacccaaggcgacctaggaacgagcttcactttggcttgaacactttgggaatggtctggccatgtgcacggtggagaccgtgatcacgagctcgcgttcccgcttaaccatggccgaattcggtttccacgacaagcttcacaagcatgcagagctactaaaacaatgcttgaatgtgacagagtcttaccagagcgggatggccacaaacgaactattctcggcggcgcggctgaccgatttgggggaaaatggcatcgtggcgtgctcgggtgaaattgagggcggagcttggggttatacggccgcaagggactctagttttacagtgcacaatcaatttgagaggaggggtagaggcagcacgaatttggcttcgagtcaactcactgtgtgcgtgatgttcatacctcgccgtggatcacgagctatttatagccgcggcggtccggcgatca

SEQ ID NO: 101638 - DNA, 1371 bp, Zea Mays
gtcatgtagctatttgagaaaaccatcgtgaacgcccttaaaaccgagaggagggtagctatctgactttttcggttttctctcataaagcagagcagagcagagaacagaagcaacgaattggttggagggggtggtcaagattcggtcaaaagtgaagcgaagcaaagcaaaggcacggaggacagtggcgactgactggccatggccagtgaaatgatgagtgactgagagatggctgctcatgcagggctagggcgaaaacgaccgggtgagccactgtggcgtgggcccgtcaggcatcaggacctggggttttgttctgatgatgtcctccatggtcctcttgtttcctgtaccaccgaccggcatcccaaccattgtaatgtaattggcttgccgcctttctactagtgtttcacttcagttacttcgctgctgcacatattctttctttggttgctgcatcgaagtgacccaggatgatgacactggcaaagaaaagagagctggcacccgacccgagtgacgaaaattacagtgaccgtgagtttcccaaatcgacgagcgcagtgcttcggaggcttgtaaagtaggccaggggcagtgggtcacaagtaaaatcatttaaattcagtaaaaaaaaatagtcacatactcattcgtatcagagtactctcccctcctctagtcctctgacggtctgaccaccccccacacacgcccaaaagaaagacgtcgagggtgtgccaacgtaagcatcggacgtagcatcactatggagaaagatgacgccgtcgtggcatcgcacgtctcgaatcatcagcttttggtgtgggtgtgccaactgccaacgtagaaagacgtcgcaaccatctgtgcgtacgcatccactatacggcgcatgagcaaactataggagcagtgacagaaccatgtgcaggcagtgcagccaccccaactccactccccatccccacacccacacccctgttgcacctctcaagtctcaactagctgtgttaccaatcaaaagcggcatatcaaaagcggcatcattttcctaagaaagaagagaaatggcatgtggcctgagaaaggcgtactctacgagtgacgacatctatacacagctagtatactatacggtctctcctttccgtggctctctattccaatccaattgcatttctgccatcatctctacgcaaaagcatgcatgtcacttgcatcgaacttcgctcgcatttcctccctaggaattttccaattgcattgtacaaaacaggtggaccaaattttcctgaactttggtagtttatggttggatcgaccattgacacaagccgaatatgacaaatgcacagtacc

SEQ ID NO: 101639 - DNA, 427 bp, Zea Mays
tgtgaaggcaaataggcagttatactgtctgatattcttgatgaacttctttgatgtgtgatcgccatcaaaccttgcaagagtggatagaggttcgggtcttggtttgtacggaggaatatcaattttgccacctttgcaacagttgttgtaaacaattgttccatcacgttgtttggctctaactctctccccataccagaaaatagctttacagtgacgacattcatagtcaggggttccataatatgatcgatttggataagaagctatatccaatgcaaaaaaatcatttataagagaaaagttaaagaatgttaggagtgttagatatatcccttaatttagtcttaaaatgattattattgatgtttaatttttagtaatttacctttgagtgcttgtatgtattctttagtaaaatgac

SEQ ID NO: 101640 - DNA, 587 bp, Zea Mays
gaccgcacacccggggataccctcgtggtgcttttgggtaggacggagtcgtagattgtaactcgatggttcatgccggggcacaagaaagagagagagtcgggcgattttcagcaggtttaggccgcttgaggagcgtaataccctacttcattgggtgacttggtatgagggaggtgtttacaagtggtgttttctttagtggtgaggtgctattgagatgaaaatgatggggatcccccttggccttatatacaggaccatgaggcatttccctatgttgatgacactcttccagcttatctcctagctaatagcgaacagacttcgcttatccttaggagaacccgctgactccgttccgagctatccccggcgctcgaggacgtcgggcgtgggaaaagcgaacagcttcaacgggatcacgcctaagccacgagtagtctgggcgtgagcccatcgccttcctgggttggcccatttccatcgttatctttgtccggcccacgacgcagcgtccctacagggcaactggcatttggccctatgcagagttttagccttctaatggacccaggggatatctg

SEQ ID NO: 101641 - DNA, 703 bp, Zea Mays
cgcggtttcactacctcttggtaagtatcacgaaccagcctccgattgtatcatcctttgcttgtttttcgacagacacttgtaagatcttggtaagatacattagagcgtgttcatgtgttccacctgagaggagcgtgtagtgagattattagggataaccttcaccgtttgtttgctgtttttgtgtttcgatggcaggcgacgacgaagaagcaaggatccctacaaactttgatgaatgtgttagctgccaagatcttgaggcaaacaacaagcttctgaaggagcaaatggaggagacggtccacaagtcagtgcatgacgccttcattgacatgaaccttggcaagacatacgagaggctggatcgacaattgtccgagattgtcgacagacttgctgtgtcggagacgcaacaacaagcactgccaccaccacctcctcgtccacgtcttcccgatgatgcgatgtttggtgaagaaggtaattatgatgcagcggccactagagatttgcgcctacgtcaccgtcttcatcaaaacacagaaggtatgccacactgtcagcaaggtaataacaatcgtgctcctgacgacccttatgctaagattaaattttctataccatctttttcgggtcattatgatgctgagggatatcttgattgggagatgacgatagaacagaaatttgttgccca

SEQ ID NO: 101642 - DNA, 297 bp, Zea Mays
accctttagatggggatgcttagaaggctctcgacacgtttgatccagactttgcagctgatctgaggaatgttcgaatcggcctcgtgaccgatgacatcacaccgtttggtcaaatggcatcatcatactcatgttggcccgtctctgttattccattcaaccttccaccttctctttgtatgaaatatgaatttatatttctttgcttaatctttcctggcccagactatcctagaaagaaactcaatgtcatgttaaaacccttgattgaagagttgaaggagctttggaaag

SEQ ID NO: 101643 - DNA, 522 bp, Zea Mays
aacatttgcaccatggctaggtaaaatgtggtagatacctattcaacagtaaaccccaacaaaaatactatgcacctagttcacccaattaagtgaggtgtataaatagatttatgatcttgcctttttctttagaaatttgacgcaagacctaaaatataaaatagtagacaagtctattttttctagagtacttaagtggcatattttcaaggaaaaatataaaaagggtatagttccacggtagaatatggtttcccctgcccatgggagatttagataaaactttagaaaatcgtagaaaccccttcctgatggagaaaattttcaactttaggaagaaaagtttctgaaacgtactaaatttcttgtttgacatttttaaaaagaaagttagttataagcaccctctagccccaaaactttagaaaatcaccacttaatatccactaggtatccttgggtaaaatttggcatagagacatgttattgcacctaaataccagtaaaaataagccttag

SEQ ID NO: 101644 - DNA, 765 bp, Zea Mays
gcttgatgaagggacatcctttggtgctgccgaagcagagcaacctgctcccaccatggctggggaaaacctaaccaagttgccgaaggttcctgaagccagcccaaccgaaacaacagaacatgatgtcgaagccaaagagaaggcagtcagagaaccagagccaaagctgccaaaaatcttgagcccaccagcagaggaggaattgccgaaggttgcaaaggctcccgcaacaactcccaagaggtgaagaatggctagcgtactagacactgttatggagatgacaagggtattaactcctacctctataaagaaggttgccgaggctgctacagcccgtgctaaaactgaagctgagccctcagcgctcgccaaggctgatcctgctacaactgaatagaaggctgtgcaagaatctccagatactggcataaccctggagaagaaggatgcacttgaaaaagctaaatctcctgctcctgaagcatcgtctgaagatcttaattttgtcattctacatgcttcgggaaaaaaattatctgaagaagaaatcgcggaagccaaacactatgcccgggaactaaaatacccaaagggggccttggtgtataatggcatggatgaagatgatttcttatactatcttcctgacaacaaggagatatccgtctgccgagagatggccaagaatatgggatttccgaagcttgaagctggcctctccgcgatgtcaaaagatgacctcgcagacagccttgcata

SEQ ID NO: 101645 - DNA, 339 bp, Zea Mays
tgccaaagacctccgtcacgacggcctcgtcggggaccgcatgccacaacaaacggttgaaggcagcggtggataggttgacctgcgagaaggtggcggcggcgcaaacagtgcccaggaggagttgaaggcagcggcgcagacagtctattatcgacgaggccgtggagtgactcggaccaccgctgcgcgatcttctggatgagcagcgataagagcgcgtggagtcggagtccgaaaaagaatgtggcaccgtcggatgttagatggaatctatttccattatagaaaaccgttggatcttagatggaatctatttccgttataaaaaaccgtcgg

SEQ ID NO: 101646 - DNA, 1243 bp, Zea Mays
cttaattgctgcactgcaagcaagaccttgtctctgtcatccgcatgaactacttcaagcttcatctctatttcacgcagccaatcatctgcctcaattggattgtctgatcctccaaacttgggtggctgcatgcggttgaaatctgcaatcttgctcccattgccattgtgatgcactgcaggtctattgttgccaaggtttccttgagcttgagctgtgagggttgtgacaagggcttgaaggagttggttctgctgctgcaacatggctgccagatcaatgggtgctggggcacggggaggcagtggcggtaggtgtccaattgctggtgcttcgacggctgcgttctgagcgcctaggtttccctggttgacctcttccccatcttcgagagcattgagtccatggactcggctcgaacgacgagacatcttcgctctatgcgaaaaagacaagattaggcgattctcctagtagcctactggggtatatttttataatatataataccacacaatgcacacaagcaattcattcaagcaccatacaagcatttattcgaacgaacagggatacatggtacaacggattacaataacgtggctcgacttttaagagtcggccgaaacgacttgactactggttcctacggcacggtcttcggggtctttgtctttagcctcatggggtgacacggaaggtgtgggtggtaccgattcgccaattctcctgcgtggttgggacaaggagtacaatggaattccctctaggatatgcggctcagtaccaatcctgggatggtgttccttgcgcttggcacggtccacaaggtagacacccctaaggagctgactatggcggtctgcctgctccctaaggttctcttcagctgcagcaaagcggctttcagcttccgctgctcgggcttctgcctgagctaaggccagcttagccctacgccaatgggactccgctttctcggcgcgctggatgaggtctctcacacgctgatgcagttggtcgcacaaatcgtcaaggctaagcaaatagccagacatagcgacaattgtggggtccttctcagttcctgcgttgttatccaggttgcggatccttgccgcccaagcaggacggttacgatccagcggaggaaagtacttcatgggagtggaacccaggtgccattcaaacatatggcaaaggtaccgcaacgctttgcgagctgcaagctggatggtgt

SEQ ID NO: 101647 - DNA, 548 bp, Zea Mays
aagttacttaaccttaaagccatatggaattaggagtaaaactagtccaaagtggggatgacaggtttggattttcagacttagtgtggcagattgaaaactgaatttcagtgcttttggttcaactttgggacttctttgtgcctaattcatgtggttttggaccgaggttgttgtagcaagtttgaagaccatataatagtgaacacattttctcaagcaagttttgtttggtgctacaccaaatttggagtaaactgttctcaaactctctctgtcaggcgaatggtgtgttaaacacagtttcagtaacagaagaagttcagattttagtgaatgtcgatgttattgtttgatctttggagctccttaactctctatttgttacgttttgatcaaagatacctgtgtagaagtaataaagctatgattaaggaacgattcttgttcatggagatcgatgcactgctacatgattttgggaataaaatcaacttgaattctcgggtgcaggtactgaatactgctcagcatgtcgttcaagtctg

SEQ ID NO: 101648 - DNA, 775 bp, Zea Mays
ctcgcaacatgtcttccaaaatctgatttaccctttctgtctggccatcggtttggggatggtatgctgagcttcggatgacatgggtcccaagtgattcttgcaattgctcccaaaatcgtgccacaaatggtgctcctctgtccgagactatagtcctcggtatcccatgcagacgaactatttggtcaatgtagatctctgaatacttctctgtcctgtgggtggtgtgcactggtaagaaatgagcggtcttggtcaatctgtccacaataacccaaacagaatcatggtgcttggatgtattgggcaatcccactataaagtccatgcaaatgtcttcccatttccaagatggtatgggaaggggttgcaaagggtcggctgctttcaaataactagccttaattctctggcaagtgtcacattcggatatgtacttggcaatttcccttttcattctggtccaccaatataaagatctgagatcatggtacatcttgttgctaccagggtgcatggagaatttggaaaggtgagcttcatctaggatcttctttctgagttcagggtccttgggaacaaccaatcggtctccaaaccataaaattcccttgctgtcctgatggaagcacttgtacttctctgccttttgcttgatcatttccttaatcatttgaacacccttatcctcaatctgtgccctgactatttgctcttgcaatgtgggttccaccgagatataacttaatttaccggaaggaacaacttccag

SEQ ID NO: 101649 - DNA, 455 bp, Zea Mays
tgaagatgtactttagactcttgtgatcagtgaagatgtggcatttgttcccgatcagataatgcctccatatttttagggcgtgcactatggctgccaattccagatcgtgggtagggtagttctgctcgtgcggcttgagtaagcgggatgcataagcaatgactttctctttttgcattaagacacaccctaagccttgcctggaagcatcacaaaagatgacaaaatcctggtgtatatctggtagagtcagaactggtgcggttgtaagcttctccttgatgatttggaaactttcttcacatttgggagtccacacaaacttattgtcctttttgagaagttcggtcatgggttttgctatgctggagaatcccttgataaagcggcggtaataccctgccattcccagaaagcttcgtacttcactgacgttggatggttgcttccaa

SEQ ID NO: 101650 - DNA, 460 bp, Zea Mays
gcgtgaagatgatctgatggctaaatatcctaaactcttttctagccaaccctcaatctcgagggcgagattcttttaagggggattggtttgtaacgccccgaatttgagagttaaatttttctttctccagcactcaccaaattcgggcgttacctttcctatttttattttcttctcgctatgccttgttctttttcaaagttctagcgagaattagctcgacatcttgtgtaagtaaaaccctagggttaaatcttttggttgttgcaccatgccggaccatgcatctattttgtttgttgggtgaatttgtgaaatcatgcatttagaaaatagattaaaaaggaaaagaaacctcttttttccccttccctcttctcccccttctccttgcggcctagccaggcacgactctcccccacggcgccccgcggcctagccgcctttctcccctgac

SEQ ID NO: 101651 - DNA, 480 bp, Zea Mays
gtcttcttgttgacggatcatggtgttgtaggacctctctatcatgtatgagggtgctgagagtggtgcaacttcacttaacatcccttcggcagtctcgggcttgatagttaggtgatgtctactttgacgaggccttccctaggtgagtcttctctaggcttctttggtatataaggattttctctcgcattgaagagttgacagcaggctctaagccattattacgcaaggatctttgttctaatgtgtcatggccctgatgtggtcctagcgaaagagttgtcagcatgtcttgttgttgtggaaccaaaacaacattgagctagcttaatgtcttggctcgatacatcagttggccctaagacaaggatgggacattcatgtggctagtatctcagactgagctccccttaggtcaggaatcctcatgtcatggctaagcccctaaaccatgagcgctagcttgatcaatcttgg

SEQ ID NO: 101652 - DNA, 451 bp, Zea Mays
taggaattgttgggcattattggtgccattaagaaatggattgagcagggaaatggctagggaagttgcgtgttatcctggatatccattgacagtggcagtgagatcagtcaagcgctgcaaatgaggaattggtgacgggatgttcgctggtgaatagaaaggaaggtacatgaggttagggatgacatcccagtcccacacgctagagatagagagagaacacatgagcgcgagcgaggaggcattaacaccataggcccgtctatcagcgatcgagcaagagaaggacgcgagcacacgcaactgttaggccaaaagccactaggctagctcgggacactattttaccattgttattttttagaaagaaatttaagttaaaatttcagattcaaatccaaatgaagtccaaattatttcaaaaaaatccaaaaaattataatcaaag

SEQ ID NO: 101653 - DNA, 1315 bp, Zea Mays
attttaagtaattgcatgcacccaactagtgatgcaatgagcatattctacaaaattgaatatattggtagcataccatgttgcctagctgagaagtgactcgacttaaagtaaagttttgtgtgagaagtatcatgacctgcaccggattcaaaagaaaatgtagcttgtgcttgagaagatctccgcgctgagccccacttttcttgttgataaaaattagaaggggtctggaatcagcaggcaattcagacaatgcgtacttaagtttaacttcaccggtctcatcattaccgagccttctggactccgatatgagttctctaccatcactctcactgctatcatgctcattctcaggactcctttgagcactgtcgccaattgtttttaattctccagccctctggtttgagttcaacgtggtatcacttgatgaatcatcgttgctgtcagatgaaaatctgttctgatgcttctcctttttagttcggtttaaacgcccccgcacagtggttgcaaactcatttgctccatgagttatagaactcaagatgctaccaggtttgctaatggcccggacaaaaagtggcgacagaataaggcgcttgaagggaccaaggtcgcaaatttcaccggtttcagtagccatggcagactggcaatcagcatgcaccaatcgttggcaccacatgcagcagtatatgggaggacctcccagaaaagactcactgcataactcctcacagtaactacagtactggccttcttcggattggtcagctatgtctgtccagagtacagtccattgatggaccacatgtttgaacccaaacattgagatgcatttgcagtctttctgagaatttgaagagcatattatgtgcgcagctgcaccgcaaacattgcagcggtgaaccatattttctgatgtcatcatctgcccaaggggctgagcaggtgagatagattccaagcatacacagcacatcattccttttgcacgaatcaatgattctgtgttccaaacatgttcagcagtaggaacctcatggtttctttcaaaattcttcctcttcgatctggcaattattttcatccagcttaaactgatctttcgccgccacactgaaaagaaatgaaaaaatgtccaaagaccgactaggccaacagtgaaccaagcagcaagtggtatccagaactctgatggagtaggggctctactgtaccagtggaacttgtgcatttccagctggtcttgcaaccagaccattatcacaatggatgggccaaacaatattttattcttgaatcg

SEQ ID NO: 101654 - DNA, 624 bp, Zea Mays
caaatctgcaggccttggtgaggaggggagagcaaatgaagtgctgctgactgaggcctagctacctcgccgtcgatatgattcgtcgcgtttccctgtcaggccgttggacggggctcaaaaaatatctcaacttgcctgcaccacccccacccgccaccgcgatgaagcgaacgcgcgccatgatctcaccaacaagaagtggcagcagacgcagatgggacgacacatagctgggctgtgggcatacccagcagctagcctagctgcgaattgaagaaagcatttgccatcttctctgctctatctctgatcctactcgccacaagtggcaccacagcgacgtgtttgtttcttttctccattatattgcaacgttgttgcgtgattagatcagcagcgccactggacaatctcgacctgggtttgtttgttaatcggcgaatggccttatgtgtcgctagcacagtgagcgcttcttcctttttcttttctttctttcagtgtttgtgtttgttaacgcagcaggaggagccccaccccaaccgaaggattttaaaacttctgttacggtgcatgcacttggctgacatcttagagctcgctcgctcgctttcagatttg

SEQ ID NO: 101655 - DNA, 598 bp, Zea Mays
ctgaatcgttgcagcttcgacttctgcctgtatcgtttcagttctgggttgtgccttggaagcttcggcaatttttcttgtaggggcaggactcaagatttttgttgtttctaatacaacatctagcacattcgccatccttctccttttaggagttgcggtggagcttttttgtaccttcgacattgtcgcctctatcgaagggctcaaaatctctggcattttttatatttcttcaatttttgacccttcagttttatcagctgtcgtctcaactagtttaactgaaggtaactttggcattatagccggctcttcagtcctctgggcaggaggagcggtctcttctgtgttgacagctgaagaagccccttcgtcaaatccaggtatcacagccggttcgatgtaacgcgaccggtgagtcagaactttcaacttttttcccttcggcacaggctcgtctggggtggccgaagtagtagctttcctctttttcccttggccccgtagcgggtagcggtagtcggggtaaacaaagccaatggcgtcaaaactctgttcagtttcttctttcctcgacctccaaaggctgcagaca

SEQ ID NO: 101656 - DNA, 350 bp, Zea Mays
aaaatatttaaaagcattacaaaactacaagagatctaagcactctactagcacaaccaagcttttcaaccataccaggaatcttgtctccacaaccaaacactccactcatcacttaagtaaggattaaactctctttctttgaaccctacaagctacctctacaagcttgaccaccacatgagtcagtcatccctagatctcatccaaaaacctaaaactcccgaagtaatttcttcgaaagactagaattcacttgatatccttgtctctaatcctaaagctctaatccattcttggattagggtttaccttttccattttgggctttttcttattctattttgaac

SEQ ID NO: 101657 - DNA, 434 bp, Zea Mays
atcaaatgcccagccctgctttgtataaaccaactctgtgttttttagagttaattttgcaagatcacctattcactccccctctaggtgctctcagtcacttcctcgctcctgccacctaagagtgacgaagtctgagtggaggatgtagcgggccgggggtcaacgaagaggtggtcgcattcatggggacctggtgcacgaggagcaggtggtgcgggaggtgggcaacgaccgttacctccgcgtccgcctccaaccacgccgctcccacatccagcaagcctcggaggaagccatggggtggatggttgtgcgacaccaggattgaaacaagggcacaaaggtaagcacatctattagtattgaatatgtaacactgtcttagatgactggctttggcaaggctgggaaagaatagggcagtatggggg

SEQ ID NO: 101658 - DNA, 633 bp, Zea Mays
caacaagtgaactttgacacagaaagtaccttctccagtgaggatgcatgcatgtttatgagattgagatcttttttttggctctattattgatccataagattgagattttttttgcttgtatacgagggtgattcaacattacagtgattacgccgttacagtatttgcctgcccggccggacgcgtaccctgcattgcttttgtactcgtgtcctcgatccgagctatttgcttttgccagcaagattttacgattttacagcgagagctgtgaaaaggaaacactgtaggcagatacatactcctatgttgcactgcatgtgcgccatgcatgcatgagtgtgcgtatcgtaccgactgcagctccgatactcctgatgattccgcaatccattgctttatgattgaactttttctgtgcacacacgcatgggcctagtagtagctagtagtatataggagtacgactactagtagctagcactaaccaaaatacggttcctgctgctgctgtgtgggcgccgcgctgcgccttgcagttctcctcttttgacgctgacaaaaaagatcggcaggcatgatggcctcatgatatggcggcatgcagtgcattgcatgcatgcatgctgc

SEQ ID NO: 101659 - DNA, 297 bp, Zea Mays
aagagaacctccatcagaagacaaagaagtataaatgtttctgccaagatggaaagggtatattgtggtttgaaagcagattggtagttcctaaaaataagggtctcaagaagaaaatcttggatgaggcccatctctccaaattctccatgcatccagaaagcaccaaaatgtaccatgatctgaagcccttgtattggtggaccagaatgaagagggaggtagcccaatatgtagcagaatgtgacacatgtcagaggataaaggcaagccacttgaaatcagctggagccttgc

SEQ ID NO: 101660 - DNA, 393 bp, Zea Mays
tgaaaaccttggtttgaagaaaagcatgctctggcaagtttggtttcagaacatccaacagaaaagttgttgcctcccgtatcatatttctatgttaacaaatgcataaagcaaaaatccataaggactcatgaaaccaaggaatgtaaatagacaacaagacatttagctatgattatgaatataagcatacctgaaggatttagccacccacacttggtttccaaagaactcaacaatatttattctatcttttcatataatttcgccctcaatatattacattaaaaattggaaatgtatttttatttcaattcccaagagtgcaaatccccaaattcccttctgttggcgtcgttcgtagaagcatctgtgcactatcgtgacgcattg

SEQ ID NO: 101661 - DNA, 356 bp, Zea Mays
atttacatgagatttggttttgtgaacattgaacatgatgagtattttatgttgtacacacaagattagattgattgattgccatgtacatgatacatgtgtatatactataggttttgtcaaagctagaggccgtagtaaccctagggtcatccggtcatgggccttaggccaaccatgctgtaaacctaaccagcccactaacagcctgtcacatgcatgatgcacaaatacaaaaaatgtgcgtatttatctatttttttactattatatgatccctattgtactttgttctattatgcattttttgttacactgatatcatagtttttaaggcgataagacgaggtaaggcg

SEQ ID NO: 101662 - DNA, 669 bp, Zea Mays
cttcgaaggccgagggtaacaattgaaaatgatgccgaagcatgtcagaaggctttcagcaatgtctatgcttttattggcacaagagatattcttcaagagcacatagcctacagagtgtggccacttgttgatagttgagaaatgtcgaaggagactgttgctgggtccagcgaaggtggattagttctattgaaataaacattgagattcagagaaaggttcgacaaaccgaatgacgactggttgaaatgcattgaggctactagcgacgagttgcttggggcatataccagagccaaagatgatgctttatcctcagcctttgggggtcggggcaagaaaaggttgaacagggtttttgatgcaattgggttcatatatcctgattactgctaccccttgcgaaggcaaagaaaaagagaaaaactgccacttcagccaccactgctatgccgaagggcaagaaaataaaggttttgacccaccggccatgatatattgaaacgaccgtagtgcctgaatttggtgaagggaccttctccgctgccgaagcgaaacaagctgctcccgtcgctcggagcgctgagggatcgattgtagtgccgaaggtgcatatagtcgggtcagccaaagccaagagatgatgcggccagagagccagagcta

SEQ ID NO: 101663 - DNA, 516 bp, Zea Mays
gcccgatattgatcgccgtaatgtatgcatgataggagcctgggctccttgaaaattatgaagaaacgactgaacagttgctgacatcatgtgcatctcctacattccacatgtttcgaggataggcaatgaagccaggctttcagttccataatagttccgtacataaaaaacacagatgattgcttgaaactaccatataccatttttttacgaaggggcagagcccctatttcattaggaaataggataagtgtcattacgaaccacaacgatgggatataacccatcaccaaaaggagcgcctagtggaactaacctctacattctatcatactagataagcaaagatcagtccccactagcaacagttcaggtgaaaccaccgtttttaagcagagcttatatacaatggcaacatgccaaaagcagctacacagctaacatcccagatgcatataaaccaccaaaatgacaacccatcacttgagctgtagccaactaccaacaagcgcc

SEQ ID NO: 101664 - DNA, 396 bp, Zea Mays
tacaaagtcacagcgaggctcagcgatagccaccctcgcgtgcgacaactccgcgcaaaagtcgcctaagggtgcagccggactagcacaacaagtgcgaaaaatcgatgtcttccgcaaagactatcggtgcaaaagtcgcctaagggtgcagccggaccagcacaacaagtgcgaaaaatcgtagtcttccgtgaagactatctgcgcaaaagtcgcctaagggtgcagccggactagcacaacaagtgcgtaaaatcgaagtcttccgcgaagactatccgcgcaaaagtcgcctaagggtgcagccggactagcacaacaattgcggcaaatcgatgtcttccgcgaagactatccgcgcaaaagtcgcctaagggtgcagccggactagca

SEQ ID NO: 101665 - DNA, 581 bp, Zea Mays
actagcaaatgagaattagaaactttgaaggatggatgaaaaaattacaagttcagtgtgaagaggcagacttgctgggatagctctagtgttgccttgacagcgctgcactgctagggacgcattagtagggttgccttgagatagctgcactactggggttgtattggtcgtcttgctagagggctgcattgttggggtaccattgatagggttgcctttagatttttgtactgcaggggtaacactaacatgattgctgccaagcaagttttcaccctcatcagagatttcatcctccacataagcttcatcttcatgaaactgagcaatattatgtgtttgatcaatatgttgtccagacctcgtgtgctaaaataaatatgagggtaataagtaataaatattccatagattttaaaatgactctaagatgttcagctactttaccgtatggtgtcgtgtattagaaccatcatgcgagatgatttccacatctctcatttcatgagccatcctttgctcctgcattttctcctccatttctgctatgcgttgttctagagcagctttctcatgtt

SEQ ID NO: 101666 - DNA, 657 bp, Zea Mays
gagctaacggtagggctgggcaatcggtttaaaccgaccattcggttcggttatctcggtgcaggtgaagttcggtttacggaaggctgataaccgatcggtgtttgagaaataaagaaaccgatgacttcggtttcggtttatttgatttggagttcggtttccgccgaggttggtgagcagcagcggtagcttctttggttgcagccttgcagcctttggctcttatgcccgatgctccatagtgctaatgcatgatgggtcgatggctacacgattttgaaatgagcctcgttggatggtgatttattgggccaagactcaagagcgaacaacagaccagagaaaaggatcgaagtagcagagttcggtgggcgtttggttgttcggtttgtacgaaggaaaaaccgataccggaaccgatccccgaactacgggaaaacaacaaccgaaaccgaaccgaataaccgaataaaccgaaacttcggctcggttcggctcggttcggtttacggttcggttttcggttgcaaagtgcccagccctagctaacgggatgatattggaggcactcaggaaaaaggtctttgataaaaatgaaaagttcgcaggaaagtggataagggaattgccctatgtcgtttggagcctaagaac

SEQ ID NO: 101667 - DNA, 396 bp, Zea Mays
gtgtgaggcatcgaggtagagctggtggtgctagatcttctggagcgtatcttcccttggttgtcgtgtgggatccttccatcctactctcttgccccatctaatcggaatgtaggtgtaggccttggcgttggttgcggtgtagtctggtacgttatcgtgcataggggtgtataggtggtgtcgtcctatcctctccgtctgttccaccccattttggtaacatgtagggaacaataggagtcataatgagggccacccatgcagcacattgagtcgatggtcttgccttggtaacacgagagtaacagtgtagcccatgcgttgcggactaggcgtgccattgtgaatcatctggccctaagcgatgttttggtaattaatggcaaccatatg

SEQ ID NO: 101668 - DNA, 395 bp, Zea Mays
catgagcttctctcaaaataagttagcgcaagtgctcgatttcgggtacacagattctcttcttaaaccatactgtgccttgttcatcttccgtgaaatctggggctttacccaaaccaatcaaagctttaatttccttaattttctcatcagactcttgtcctttacgaatctcttcttccaaagtagattcaacttccataatcgttgcttctacactataaagcataccaagggtgagttgttccatttcccaacacaattcttgtgacatcaaatgagtagtgatgttgttcacttgacccttacggctcaaagcatcagctactacatttgcttttccggggtgatattgtatttccaaatcatagtccttaatcaactcaagccatctt

SEQ ID NO: 101669 - DNA, 365 bp, Zea Mays
atcttgaggatgtccttaaaaaggatggaacgtctgatattgatgccaaagaactatatatggagttgaagtttctacgagaatttattccaaaagaaagaatgaggcctattgaaattctacggtttttaagggagcatggttgttttcctaatgcaaatattgcatatagagttctattgactattcctgtgacagttgcaacagcagagcgaagcttttctaaattgaaactattaaagacttatttgcgttctacaatgacacaagaaagacttaatgatttggctataatagcacttgaaggcaaaatgttggagaaaattgattatgagcatatcattgaagacttcatttcaaaaaat

SEQ ID NO: 101670 - DNA, 582 bp, Zea Mays
gcttacccacattgattttattttcataactttcctcgaatttgtctcccttgagtttcctgatttccaatcccactcagtttaatccaacatagtttggattccagttcttcccccgaaatcccactttcattcgtgtttcatatgtaatatgtaaaggttttcttagatttgttcctctagccactgcacaatacagtcaacatgcatgttgtttgctgatacacaaaggtaagattttttttacgccatcaagttattcatgctttgccactttgaatttgtattgatgtgtaaaagaattgattatatgatgttctacataaattgccagaatcctttgtggctaccaaaaactgaatgtagccacatcgaccggtaactctcacgctaggagatttcattgacgaggtaaactaaaattagttttaagctgcttccattcgcattggttgtccactacatgacgtgtgatgattttacagttacattgattttatagttaccattcttgaactaagtttagatgctccatgtcttataggtactgtttaattttgctctttgatctaagcacgtgga

SEQ ID NO: 101671 - DNA, 1135 bp, Zea Mays
gaattttgcagagttcatgaacttcactaccagaccaaggcgagagcatatggtctacaaaaaaattttggatgctataattttgcatatcaaaaagatacaaaggcccctgtgattgggtatcgcaccaaatggcctacttgctggacaaacgagtggttttatgtaaaggctgacgagaagaggagagagaagcatatgagcatggtgatgagtcattagaagttaagcttcggcatgacgagaccactatgaacatgcaactcggttccccgtgctagttagccgaagtagaattcagagttttggtcgagcacatcagtactcgggacttagtgcaagaatacatggcctacaaaacttttcccacatcaggtgggtggggaatgccgaagaaaaaagatgaaggaaagaaatttaaacttgtgagactgccataccacttcaagtttcaaaaaaccttcaacagcccttgtgccgaatagttggaggtcattgaaacaatgtgcaatgaaatcattgggaattacactaaaaaggaagaccagctaatgactgctgccttcggcacatgggagaaacgaaggctaaaccaagtgatggatgccctcggcttcgagtatcctgattatgatatacttgacaaagaggccgggggagtgaaaaagaaaagagttgtaagcatcctaaaaagacaagattagagatctatcgagaaggataaaaagaaaaggctatcaaaaagaccgaagacgtcgccggaaccttcaatgtctaagaaacggaagattgcagaatcgagccatgatgaagaggaaaagccttctccggcgaagcactctatcgaaaccccttcgataacttctattggcataacagaaatattgggggtaatgaccgaacccttacctttcgccatgctaagccctctaggatcagagctaacaagcttattacagccaaagaagaaagatgctagggaaactaccgaagcagagacagaaaaagacccttcggcacccggtgggggaaatgcccaaaagaagcgtcatatgatgactgtgatgagggccgttcttgatatgccaccaccggcaattcaaaagaggattgcgccctctgctgctgacgaagc

SEQ ID NO: 101672 - DNA, 500 bp, Zea Mays
gcgtgcggcagaggatcgattcgacgacaaggtcaaacacctcgtcgataaggcaggtcgtctccttctagcggaggaagaatggctggagaagcacaaacaccgtctgcgtggtagccaccacgacggcggcggtaactccggtgcttcttttcccaagaccaagatgtcgtcgcggcatgaagggagcagctctggacaggtaaaattaacctctgaaggaactccgagacgaaaagggcgatgccgaaattgtggcatctatggtcactaggcggaggattgcaaacgcccgaagaaagggaagaaaaaggaagtgctgatgctggcaacctgtgatgtggttcacagacacagccagcatgttcatctctctcaaggcacaacacccgtgtcgatgtctgattatatgtgggtgctagtgctagacacaggtgcaaacaatcatatgacaggttcaagatcaatgctgacacagatcgattcaaatgttcagggaa

SEQ ID NO: 101673 - DNA, 305 bp, Zea Mays
tctaaaacgctgatgtggcttcgtcatcatttggacgctactttagaatcgtaaatgttgacaataaataactcggccatcacccctaaaagcgacgatatgatacccgagttactcagctactattccagaggaattgacttcacagataaggcaaacagaggaatgattcgaaaactccaagttaagacacaagcataacataaagagagcattatggacaataaatatcgcgacaatcatcaactgaccatgaggcaaaataatcaacataggaggagacaaaatcattcttcattaaggga

SEQ ID NO: 101674 - DNA, 287 bp, Zea Mays
gtaaggatgatatccaacaaaggctcaacaaaggatgaagttaaggtgagacaagattgcaaagcgacaaagggaaagtaaacgaacaagagcgggatagggaaaacaacactctcggattgaaatggaataagcgaggctaagaaaaataggtaaacatcatggtaaatatggagagaggtcaagggtcaaaggtgataataggcaaggatataaaggaaggtgtaaatgtacataaaaaccaggaatctaggtacaaccaagaatagagttaagataagtcttgc

SEQ ID NO: 101675 - DNA, 572 bp, Zea Mays
cttatgctcttgcttccaggaactttaattgatcaacaaagatgatgaccattgcctatggtgcagttaacaattgcttcacattctgagctaatgataattgccagttgctttagaactgatgccaattattaatttgggaggctaataaatgaagaacaatgatctgttgtgttttgtattttacttttgattgtattctgaaacgatatggtattgcttgacattggatagtatcctgatatgttgtggtaactggtaagctcatcactgccgtgcaggggtgtccacagcaccatgtatgattcatctgtttgaatttgtccatgcaaactagcaaccaaaacgtgccctccttgcatgatgacagcttaggtctaatcaaatccatagctgttcataatgtgtgcattgacgcctccggcaagcccgcttccgcttccaccagcatcgcctgcatcgagttccatggcaacaatgcaaggtgggtgtggatgctacctccgttcaacttacctccattacaaacccaccttttcgccaagcccgccttcggagaggaaggagagaag

SEQ ID NO: 101676 - DNA, 1003 bp, Zea Mays
ctttatttgacacaacccctactggaaattatccgtccatgattatggcagaaaccgagctcaggaacacgcgttcccgccaactcatggccgaactaggtaaacgagtgccaccgtgagcttcacaagcatacagagacatgaaaacaatgtttgatttggacggtgtcttaccagaatggattggccacggttgagctgctcttcgtgatggcggagaccagtttgggggaagtttgaaattcaagagttcaggtgaatgattaagggtgggagcgggtgctatggcttcacaaagaactctagttttacttcgcacacttaaattgagagaagggggcagaggtagcgtgaattcttggttcggttcaactcactgtgtgcgggatgttcatacctcgcagtggatcacgggctatttatagccgcgacggtccggcgatcacttcccagccatggataacttctttagtgcatgcctagcacgtagaggagaggtacaatgaggtaaatcgaagcatgtgtgacagcgcggcgagagctcactgagtcacggtggccaccggtgaataactccagctggactcggggtatggtgccacgtacgcgttatctaactccggtgttatccgttccttaccgagcccaaattggaacagcgtcggcacgaatcgcggcggtgagatttttttggcgctggcggtctgatccatttcgggacactgtaccatggcgagctccatttcagttaacctgacagagcgacttcagggcatattttctctcagatttctatagcaacgtgaccaacactctacagcaaaattatagcttaatagaccagatccaactttgatacatcgtgcatccacaaacagtcacaggatcatgctcagaattgagcttgaagttcatgcaattccactgttagtctgatttcagactttaagtagtctgatttcagaattgagctttaagtagtctcaagttttggattgcaaat

SEQ ID NO: 101677 - DNA, 581 bp, Zea Mays
tcatgctgtgcatttttatgtcactctaaatatttgtgttttgttgagctttagactcacgccgagcgattaaattgtatagtgggtactcgagtatttgtgtcgtacgaacttggctgcgtcatgtgattgctatgtagcactctcgtttaatcggacagctcccgttgagtggaaccgccatcggtgagtcgcgtatttttcgcatgccctgcaggcactctttgtctgtcgtgatcatcgaaccacaattgcgcatgttgcgcacgttgcgtggacttatcgtgtaccccgattaccgagccataattgtgcctgttgcacttattacgaaggcttgttgtgttgtcgtggccctgatggccgcatacgcgttgacgccagatacgctagagcttgtactcgcgtggattgtggtgggttgttcaagcccctaaagtcacattatgcgcaaccttcgtaaacaattttatttggctttatattttatttgactgtgttgtgtggcatcatatttatatatcgccaagtggccataacaactatatcaagctctatagtgtttggaaatctgggaaatt

SEQ ID NO: 101678 - DNA, 539 bp, Zea Mays
ctcgaacaggaggagtggagacaaaatcagagaagggactatgcagaggcaggttccatgcagagtaagataagggagcaccagcattcaaaaccctgcccctcagtatcatatcaagtcggcttagcaggtcctcattgggaatttgcctattagtgacccgggtagaatcgttgacgccagtgtacaagtaagcagggtaaactctgtccttcagaggttgaatgttcttgaagacaaagtcagcaaccacgacttcgtaagtcagacctctgtcctttaacgagcaaatttcagcaagcagaaccttggcttcggctacctctgaataagtgggggattctacccagctgggcgtgcaaacgtctggttgcctccctgatcgagggggagggatttgttgtgattttccatggtgaaccactcgaggcgccatcccttgatgctgtccttgagggggatatcgaggtattccgctttcctcccccaacgaagctccaaactggcaccaccaacaagctgatgatgccctacagcca

SEQ ID NO: 101679 - DNA, 577 bp, Zea Mays
gcagacgaggaggagccgagctcggcaccctagggagctgggtcgtcctcagcagcaccctcggaggctgggttatcctcagtggcaccctcggaagctgaagcaccctcgatcgtacccacagaagctgggtaaccctggcctgcaatgtcaggagccgatgtgttcccatgaactaggccgcccttaaaggtcgaagaagcgtgagaaactgtctggattattacttgcctgactggattactagctgaggggatgtcatctgggacctctatacggatggtagcaccttcagctttaggaagctccaataaaagatctttacggataatctcctccagtgcatggtcaatggcagacattgtcaacctctggagactaaccagtcctgatagagcttgaattgggacgtcgtcgctatttttgctacgactgttcttacgaatcaaagggggaacttcctcttcatcctcttcatcctcatcaaacacacgcccaccgactctggcaccatcacaattctcaatatcatccttgaggttggcgctcgttgagccaccaccaaggactaggatag

SEQ ID NO: 101680 - DNA, 298 bp, Zea Mays
ctagcaaggaaatggtctgaaaggtgtaggtcctatgctattattaaaagatcaaaggaattatcgtttactatttagtatttacttattcagcaattaaaatacatacacgaaacatgaccggcttgtagaacctaatagcagaatctaacgttgaaggaataacccacatgaaactaatcaaccaatcacaataaataaaccatgttaaattttgcaataaatgtgtgaacacagtgatatgtccactgagcaatattcctgatacagatccacttagttaaacaagaaaataatc

SEQ ID NO: 101681 - DNA, 385 bp, Zea Mays
cgacgatccagtgctcgaccgagatgcagcagcaagatatggttgggtatagctagagcgtagttggccggctaggacaatgctaggcgagagagggaagtggtggtgataggaatgtgagaggagagggattgttatctgttaggtcttatgaatatggaggaccggcaggcagcaaacaaaaaagtgaacactcatcatagctgttgttgggcagggattcttttccatctcgcgtcctctagttgagagatatatatgtctgctgttctcgctatatagagggctggcttgccctgctagctagctagctagttcaagttctaggcacagatcggttcggatcgatcaacattaatttaattacttaattattagttcctga

SEQ ID NO: 101682 - DNA, 464 bp, Zea Mays
cattatcttcatatcgattgcatctaatccaattcatctatccgctccccgtcctcagcgaatccgcaccccgcacgacgcgcaagcacctcagtcacccacacaatgacacaaacccatgcactctatgtcttccgttcatagcaacgaccggcatgtcaagtgggcctgcgccaaatgtatcgcgacaggagcccaacaacccatgcacgtcgctccgtaggggatgggaaagcggtgtcagcagacccgcacacgtcgcatcttccatgcatagaaacacgaggaaaatggtttcagtagctgcggggtggagccgttttactcatcctaatccacccaccaacctagctacataaactcgtattgtggccccttgagcaatagcgatggtggatctgctcaccgccggtggcctaacgctctccagttactccgactcgcctacgtcctccaaggtacgc

SEQ ID NO: 101683 - DNA, 507 bp, Zea Mays
accaaacatgcattttgaagttcttgtttgttgcttgatcgtatgtccataccccttcctcccaagcacgaaccaattcatcaatcccaggctctatgtacacacacattttattcctcgggtgtctaggaattatcaacatcaagaacatgttctatcgttgaaagcatacaccgtgggacattgagggggataacgaacacaagccaacatatgtatggggcatccatcagtccataaggattgaacccatatgtggccatcgcaacatgtacattacgagcctcttcaactttcacatggtgaatgacatcaaattgggtccatgattcaccatcggatgcatgtaccatgttgttaggattgtatcgtttgccatttttgtgccatgtcatctatttcgcggattcctcgatcatgtaaagccgctggatcctcggtatgaacggaaggtggcataggattgtcatgggaatctcaagctatctcttctgtccatcaccaaag

SEQ ID NO: 101684 - DNA, 2502 bp, Zea Mays
ctttttcaggatgcactttctacccttttctctctgtacattcgtgatcttggccctgctgttgaatttggagatgcacactggcttggaagacagggtattgcattagcgctccactctaccgctgatgttttggccgctaaagatcttcctgttgtcatgacatttctcatctcacgtgccttggtaagtaatttgtttttatggatcttatcattgcagatttgcagtgccacttacatagttacatttaacttttaatgcttctcatgacgaatctacaggctgatccaaatgttgatgttcgtggtagaatgattaatgctgggatccttattattgataggcatggaaaggaaaatgttcctttgctatttcctatttttgagagctacttgaataaaagggcaagtactactttcctattaataattgtactagcattattcaatatactacgttcctattagtaactttactaatatattattattgctccttgttttttatttgctatgcaatccatatgtaacaggcatcagacgaggaaacatatgatcttgtgagggaaggtgttgttattttcactggtgctctggccaaacatctatcaaaggtgtagatggatactgaactatcttttgtttacaagatacattcacagtactaaatatagcatttgtaacaggatgatcccaaagttcatagtgtcattgagaagttgttagatgtccttaacaccccatcggaggcagttcaacgtgctgtctcagattgtttgtccccacttatggtatccaaacaggtgtgttttgttttgtatcattggattttgggtttgaatgatgactatccattttcaacccattttttaagctttcctttttctgatttatttgattaaaatgctttattctcaatataaccaggaagagggtcaaactcttgtttctagactcttggatcggatgatgaaatgtgaaaaatatggtgagcgacgtggtgcagcttttggccttgctggtgtggttaaaggatttggaatttcttccttgaaaaaatatggcattgctgcaacattgcagaaaaatttggaagacaggttgtctactttgttacctcgtccactagtgctgtatataatgactttgtaaataaaatgagtatgcattcacctgtcacaaattttcactaaattatgttctgcagcctttgtatcttttcatgttttgttgttctctaggcatttgaatacaatttatctagagtattcaatgggaatttttgattgacaaacatcatagcgctaaatttttccatttgtgtgcagaatgtctgcgaaatctcgtgaaggagctttacttgggtttgagtgcctgtgtgagaagctcggcaaactatttgagccgtaagtgaggcacctcttcacttagaactgttgctctgattccaagtggttcattatgtttgctttcttgtaggtatgtcattcaaatgcttccattcctacttgtgtctttctctgatcaagtcctagcagtgcgtgaagctgccgagtgtgctgctcgggcaatgatgtctcagctcactggtcctggtgtgaagcttgtccttccttcacttcttaaggtatcaatatatatgttctatgctatcaaattgtaacatttgttgcatccaaatgttctggagagtacaagtggccagttcatcttgttgttatacattgaaatctgacaataacttaactttccgccgaatatttaggccatctgcaccagaaaccactagtttgtttccgttaatttgaaagagcagaacatattgaggtccatctggtaaactttttttttaaaaaaagtctacacattctggattttttccacttattgtcatttgcactgttcgcacctttatgttagttgttcgaatgaagataaaataggtattcagatactttacaaaatattatgccagccacactcatttgtaaaagctacatgaaacgaatttatttggcttgtctgatacattcaaaattttccttaaagcacatatttggatgatccttaatatgattttcagggtctagaagataaagcatggcgtactaagcaaagcagcgttcaacttcttggtgccatggcatattgcgctcctcaacagctatctcagtgtcttccaaagattgttccaaagttaacagaggtatatgacacaatttctttttgagcttataagctgcttatataacctaactgtgggaaaccctaaccctatgttagggatgggtgttgtatttatagacttgagttaattgggctggaccattacaaaggggtgagagaataattacacgggaagaacccaaaccctaaacgagattctaacaccccccgcagtcacaactctatcttgtacagatgtcgagactggatcgaaagtctagaaatacactcgacggtaaccccttggtgaagatgtcggcgaactgcagtgtgg

SEQ ID NO: 101685 - DNA, 571 bp, Zea Mays
tgcgaatccaacaagccactagccatcacgttctatcccccatcctctgtgatcaacggaattcgcgtgaaccggtttcttccgccgccgtgaagaactcttccgtggccagcactcctcgggttagtgcatacccaattgattcgagttcttgcttgtttttagccccctgttgctctcggagccggccaattggagtttacctgagtctcatcaccggaacacccctctgctccgtagaacgccaccgcgatgccctctctgtcgacccgcttttctactcttgcccagcccaaattctagcgtgtacgtaaactctggtgaacccgtgaagcttacccaagcttcaatttagtcagccatgctttcggttatccagaacacattgatccattcgaccatccgcactgtcgccatgaactggttgattcaaagccccgttagtaaaattgattgaggggaaatgcgcgggaggagttcaatccagtgtctgccgctcgggagcacctgtctttgcgccatccggccagtctaacctcgccggtgttcaaagctccgccgtgcgacatcg

SEQ ID NO: 101686 - DNA, 405 bp, Zea Mays
gccacgcctatggatcttcacttatctcttcgtccgactgatggggcacctttggaggatccatctcgatatagacatcttgttcacagcttaatttaccttactgtcaccaggccagatattgctcatgcggttcacattttgagtcagtttgtctctgctcctacatcagttcattatgggcacttacttcgtgtgcatagatatttacgcgggacaaaaacataatgtttattttatgcctcaaattccccacttcagcttcatgcttactctgatgctacctaggccagtgatcctacagatcgtcgctccatcactagctactgtattcttcttggatcatcccctgttgcttggaaatccaagaagcaagctgctgtatctagatctagtactgaagca

SEQ ID NO: 101687 - DNA, 527 bp, Zea Mays
ctaaaaattgatttctatattcatttttctggttttacccataatctgggttgcgcgcaccaatactgttaagtacaggggccaaatcctaattttcctaagactcaggtaacagtgcttgggacggcgggttcattcattaaaactacgggggcccatgtgaaaaatggttctggcgaaggggtacagtgagatcttgactgcccgatcgccactaatcggcccagattagatctccagtggagtgaaccggtacgcagcgtgagacgacggatcagcgatcgacggtttaaagtgaatcttgggcgacttgagcccaaagaccatacgatcagatatcttcggcccacactgattctaaccaaagcgttatcctagacctaatcgcggtcatcgtcaccaaatctaacggtccaaacttctcccccaatccaacacggcggcaccgcgcattggctgcggcagatcatcaccggcgcatgaccagatcgctccaaatgtgcccaggcccaaatccgagaggtgct

SEQ ID NO: 101688 - DNA, 630 bp, Zea Mays
cagagggctatgaatttgatctttcacgagctgttaggaaacattggggaagtctacattgatgatattgtagtcaaatcggctgagtttagttcgcatatagctgatttgcgcaaagcatttgataacatgcgccggtatggtctgaaaatgaacccacgtaaatgtgcttttagagtgtcggctagtaagtttttaggattcatcattcatgaacatggtatagaaatagaccctgtctaaattaaatccattcagaaggtgtgacctccgacctgtaagcttgagatgcagaaattcctcggcaaggtaaattatttacggaggtttatttctaacctagccgggaagattggtgccttcactcctatccttcggcttaaaacgatgccgaattcacctggggggcagaacaacaggaagcgtttgatctcatcagaaagtatttatcttcggctcccatgttaaaagcaccacaggtaggagtaccgttcaggttatacattgtagctgaagataaggttattggagttgttctgacgcaagagaccggaggaaaggatcatgtggtgacctacctaagtcggaggctggtggatgctgaaacaatgtatacttttatcgagaagt

SEQ ID NO: 101689 - DNA, 581 bp, Zea Mays
cggccgagtgacttcagttactatgaatggtccttcccataggggtgacaatttgtgtcgtccctcccccgttagaattcggcggaggacgagatctcccactgcgaaggatcgatgtcgtatggccttatcatgatagcgcctcagagtttgctgataccgtgccgattgaatcaccgtgttcactcgctcttcttcgagtacatcgacatcctccagcctagtagctttagcttctgctatgttttcaaagattaaccttggtgccccgaacttgagatcagcaggtagcactgcttctgaaccatagaccatgaagaaaggtgtgtttccatgcagagctcgactaggttgagttctcaggctccaaacaacatacgacagctctctgatccactttcctgcgaacttttcattcttgtcgaagactttctttctgagcacctccaatatcatcccgttagctctttcgacctgcccgttggctcttgggtgtgccaccgaggcatatttgatctgaatgctcttttgctcgcagaaatcgaagaactctgaacttgtgaagttggatcctaggtcgg

SEQ ID NO: 101690 - DNA, 331 bp, Zea Mays
gcccatgcccagtcacgcaaacgagaggagccgggagctaggacttgccggatgctccctcgtcctccatatctgcgggatggagccgccccctggataatacggaacgaagtaccgggtaccactgcagacgttttttattcttagatccggtattctacaggtccaggacgacatacaggccaccgctgctaccagtctaaactttggcgttgtttgtcttcggaatggatttagatacttattcatgttaaattgtctttattcgaatgcgagcaaataggatataaaatttgttatgtaaatttatatttttgttttttatattgag

SEQ ID NO: 101691 - DNA, 285 bp, Zea Mays
catctaggcagatatgacttataatgaggggtactagagtccatgttgtttggtacaacatagttagtaattgttgtagcagtctattctttataatgcttgctaatatgctggcgcgttcaagcgtggctacaggaacgacggtacatatcgaatagtcgtcttgtgtagtctactacatatatcatggcaacactacacctacttaaccgcaatgtcacacgtcacatttaatatgctgcttgagagtcatatctaggccattagtaccacgagttagtctaa

SEQ ID NO: 101692 - DNA, 620 bp, Zea Mays
ttacaatgagacatcccattttcttggggaaatcttcgacgagggcttcttgttccaccggtttggcgggctcttctggctatgaccaaaagaatgtcagaagcattcacaacccaagccaggatgaagacaaaaccatctagacccaagggcagcaaaatcaaccacaggactcagggactcaacaacaatcttctcagaacaacttccaccgacctgctccacgaggaggaagaggaggccgaagctttggaggaagatataactcccaaccatggaagttgtccggtctcttccgtggagataacaggggccatatcacaaggagtttccaggtaacaataaaaaacagaaggaaattgccgaagcacaccaaaatcaatcgaagcaagttcttcatacatcctcatactactccccctatattccagaacatgtccatcatcaatagtcaagcccacaacctttgggatccattgcttcaacaagttcaccgccaactcattaggtaatgccctagcccttcataccggcacctttgccatacgaacaacaacgtgcacaacagcacgtacagtcactttcgacggccagatttatttttggcggccaggctctgg

SEQ ID NO: 101693 - DNA, 441 bp, Zea Mays
aaaccataggatccggaaacgacgtcccagatccgaccacgtcattatgaactagtacgtgcttacagccaccagatccgcgatcgacggttcagattaagaggcgcgaacgtgtatctcaacttctaatccggaccgcccaaaaccatcggacggtcagcaacccttcttcccttccttgccgcagaagcgcggcggcgcggaacaccggcgtggcggtgccattaccggacgctcagaccacgaatttaacgcgctaagctttgaatcgatgagtgaaacatgatgccctacactagaaggacgcgagggatggatacttacccctccacgctatgcggtcagacacggcgacggcgggtggtgatttcgcaaatccgacgagcaatcagatggacgccagtgaactgctcgagtggacaaccaccaacactatccccg

SEQ ID NO: 101694 - DNA, 740 bp, Zea Mays
cgcatttagactacaacaagtaattcataataactacgagcttaacccaagtcatctaacaagtcgattaaccaaaggaatggtatagcccgccatacgacatacacgtcggcttgcctattattaacgcagtccgagacaccacatgtatatatatcacaatcacttacgccattgactcttacttaacatgagttggctaatgccgtataagacttagcaaaccattttagacatcgtaactcaaaatatgggttggagtcgattaatcagtgtttcttaaccgttgctcaacttaaattggataacacacgagtcacctaaaacgctatattttaggagaccttacatgtcgagcatcaattttataacataagtgactcaacctctatcacgcttgtccgaatctattggctaacatttccggaacaccctgtctatccttcacctttctaatcatattgcacgacataaaatatttcgatacgcattcaccccataagtaacatcatcacacttgactctgacttaaccgtagaggaagcgatgactacttcggcatgtcaccacctctctacaggccaaatcaatattaaccacatcgatcgagtcttatatcacgtaatacttataatttattatctcaaatacaaccatatcccggcatgtacttgggacacttcggttcaacttacgcaatcactactacaacgcacttcggcacacatgtttgataaccc

SEQ ID NO: 101695 - DNA, 661 bp, Zea Mays
aatgactagagagagcctatcatcaggtacataaagaatgaagaagaaacggatgataaggctgcggcagaacgcatcataagacagtcggcccactacaccctcatagggggcgcactgtacagaaggggtgcgactggagtcctcatgaagtgcatttcctcaactactgggaagcagctattggatgaaatccacgccggacagtgcagagtacacgcagcatccagaactctggttgggaaagttttcatatctggtttctattggccaacagtgaagagtgatgccgccgagttagtccagaggtgtgaagcttgtcaattcttgtcaaagcaacaacatttaccggcacagcagctgcagaccatccctataacatggccatttgcatgctgggggttggacatgatcggacccttcaagaaagcttagggaggctatactcacgtgctggttgccattgacaagttcaccaaatggatagagtacaagcctattgcttctttaacctcaaccaaggcagtggagttcatacaagacataatattcaggtttggggtaccaaatagcatcataactgaccagggatccaacttcaccagctctgaattcttcgatttctgcgaacaacggagcatccagatcaagtatgaatcag

SEQ ID NO: 101696 - DNA, 783 bp, Zea Mays
agtatgtcttgtgcttctttggagagaatgtcatgcagtacactgaatatctgaacagcaggtgccaaagctggtgcagcagaatctgttatggggccaaataaatctgacaagccagttggagaatattcatccagtgatttgtaattttcaaacagagctgcaaggagactcttaatccgatcttcacagtctatcaaaatacttcgctgtaacaaagaacaaaacacgataactgatgtgtactactgaaacctggaattgtagaaggttctcaatttgcccagtgtattttgtggacatgatttggtaaatattttgccgagcattttaatgttttgcaattttatctccgagttctccgagttttgcaataatatatagagagaacttagatgatacctcttgtcttgttaaagttctatcttctcgtgcttttgtgactggaacgataagttcatatataagttccaaacaatccttggttggtattgccacgttcatgatgtaagacaagtacctgtaaaaagtaacatatgatgtgattctatcatgtataattatattcaccaatcatcattgactatacacaagcaaaacaattgttcacctcaattttctatatgcatcagatattccatagtaatcagaaaactcgtccaacagccaaatccatggaccattgatatgaagcattttgctgttgaaattttgagccctcattgccgcttccagaaccatgtcatatatgatggtatccactgcagggccaccttgcagcat

SEQ ID NO: 101697 - DNA, 571 bp, Zea Mays
ctagatctccaatatgagggacacaagtctacaagctagggtgcggccttggttcccactcttcgctcgagcagaggtcccgtgtcgccacatggcttatagtcccgtggcggaagccttcggctagaagaaagcccaccacccacattcaatgcgagcagccgaggcatgccctatagcgcataggacatggataggcttttgtcaggttgtgcaggcaggaatgaccgctctgtgtactaccgatgaaagcagttgtgtgtcagcaccacacgtaggccttgtacgttgcgttgcgtgacaccatggcaggcggttcagttttggcgccacgcacgtggggcggcgccatcatgagcagttgtttcctcaggcagtccgagcacatccataacaataactcccgcacacttcagcgtgcctagcccctacatacgtcaacacagcaggtacactctgtggcaggcacaagccgacaattagggcagaggagacgcctcgtcagttgatctgcatgaggaccaagaagaagatctatgttcgacgttgcacttactactccatgtagtgt

SEQ ID NO: 101698 - DNA, 558 bp, Zea Mays
tgctaatcatggatgtcctcagcagtatgtttctgctagccgaagataaggggttgcttcataccttcaggaagggaatgtttgaaatagaatttctatttatgccgacgatgtagttctatttgtcaaacctatagtggaagatctaaactgtgttaaggtgatattggactgctttggttcagcctctggactggtttgtaacatgaacaagagttgcgccatcccaattagatgtagcgagcatgctgtgcagcagggatgcaaccttatcctttgcagctcagcttccttcccttgtacttatttgggtctcccaatattagatagaaaactcaggaaggcagatcttatggactgggttgagaagatagcagatcgactccccaattggaaggctcaacttcttaatcttgctggcaggacgacgttggtgcgttttgttctctccaccatccctatttatcttctcattgccatgaatattcccaagtgggtgatcaaatcgattgataagattcgcagagggttcttatggagaggcagaaagtacgtgaa

SEQ ID NO: 101699 - DNA, 346 bp, Zea Mays
gtagggtacacgtcacaaatcacaagcatcgacctacactcttgggtgggtttagggcctttacctaatagggagttcacctaagccacagacgatcgttgatgttctttgtcttttgtttagcctttgaaatggatggtgatcagagggtgatgtatgacgggtggagaaaggatggggcacattcgaatgaatggatgggtgtaacaaaggcttttcttgagcacgctttcaaagatagaacaagtcatctagtgaagtgtccttgcaatcgctgcgagaacaagtggcctcagaagatagaagaaatggagaaacacctttgcaaaagtgggtttatgccgaa

SEQ ID NO: 101700 - DNA, 539 bp, Zea Mays
gtgaatacttaggctgtaactactcttgaaagttctcccacaggggtgacacatacagaaaatctgtcaccttctggtgggacatcaaaggttctagaagtgctgatatctgtgatacatttgatatgataaaaaaaccgggggagctcattgtttctcctaaggtacctatggtataggatgctgatgtcaaaggggccgatatgatggaggttgaaacagctccagttcgcaatgcaaaaacagttccttcagaagagagtgctgtatctcctggagttgctgagggtaaggcatgtgcagttgctgatcttagctcattgatagcttctaaagaagctgggtctcaaaatgatattgacaatgacaggccgaaaacttctttgtgccatgctgattccatgaaaataaaagttagtgatgaactaccagtgaagcaatggacatactgtgatcatatgtctgatttacacagttctttcacatctgcaaataatgatatagccaaagaaatgaatgaagtgctatttaaatcattg

SEQ ID NO: 101701 - DNA, 344 bp, Zea Mays
tgataaggtaatcccaaatgttgttttttgcaatactgatgaaaccatatgatgcttgtgttttagttgccatatatgactaggttcatttggcacttttgtcattgaaccaactttgtagtgtatcaatgtgtttgatatttggctcaatagattgtctttcaagcctaaaatctgaattttagttggtgcaactgctctatgttaagctatttgattgagtagaaatgatatggcttttaatagaactacaattaattgtttcatgtaggttatttttaggaaaacgtatttgataggaagtttagctgctttttaaagaaggggagagagatgttttgaag

SEQ ID NO: 101702 - DNA, 395 bp, Zea Mays
tattggcagctgcacaatatattggataaattggtatagaaaattttcagagccttttatctcggtattgacgaacttgcgctgtggttgtgcatgtggttgtgtacattataatgatagaaaaagactagcagcaggcaagattattcctcgtcgtctttctccatctgattttgtggtgatacgagaagtgcatgaggaacagcatactaagtatattgcatttatcaaggctagcgaggaggtgataattagtccttggaaaaaaatattacatgatttcttatgcacaagggccaacacttcaactctaccagacaatgcacgatttaccttcttttctttactttatattcctggtagcatacatacatatcactgttcatgaattttat

SEQ ID NO: 101703 - DNA, 458 bp, Zea Mays
cgcggtctctgcatttattgcggagaggacgcgccgcctatccaccctgctgacaggcgatgtgccgcctcagcatttattgtgacctgtccactcagctggcaggcagcgtccaggccatcctgcagacggcgtgcctgaccagtccattgccaaacagtacgcccgtgctgcaaggtgcactgtgaccatcatcacttatgcgttgccagggaagcttcccctgcacgccaataccacacagatcgcggatgtcagggtgcaagaagattgctccaacaactccaagtattacatccattatattcctgggcccacatgtcggggctcagcacccttgtacgcacccccccttgagctataaaaggtggaggcatgcaacgttacaaggggacagacacacttagaccgaactcagacttagactctcagctctcaagctttcacatcaatccaac

SEQ ID NO: 101704 - DNA, 303 bp, Zea Mays
cggtggacctgtcgcgaccaccaagacctatagatcggtgagatctgtggcctcttgttctcttgggagccatgacccccataaatgatgttgacctccctgtcgactcaagggaactcccttcccccgccccttgctactgaggttgcaaaccttggtcctgctagggcggaggagggagcggttggaagggccagccgtcgccaattgaattcttgaagtctttgcagttacgcatctcctggtggtaaggacacgtgccatcaagaatcttgtccaacgtccatggattgtggttgcagg

SEQ ID NO: 101705 - DNA, 360 bp, Zea Mays
ccactggggtgcggcttgtaatattttctggttttgtaagatacttttgggaagtattaatctaacagtgacaaaacttatttgtatgctatttgtctttgttgtgttcgtcgttaccaacttctccttggtacttggcccccctgggatgtaggctcgacatgtcgaggctagatgccagtatactttaagaaagaattggtgacctggcccctaggaggtagtctcgactgggacctggacctgcacacagccttggctaggaagctttagtagtgcacccataggacccactaactggtatcttttattcttagattcacgaaacaggacctgcaggatttagaccgagaagccaat

SEQ ID NO: 101706 - DNA, 712 bp, Zea Mays
ctggatgggttagaactctctcccttacttgggttgggggtctcactcaattttcttttgtctgattcctctcttttcttgtgagccatatctgaagtatgtatctcctctggagataatggaacaagaaccaccttcttgtcattgtgaatgaaagtgtatttgttagaccgtccaaaatgcaccgagtccacatcaaattgccagggccgaccaagtagcaaatggcatgcttgcatggggacaatatcacaatccacctctccatgataatcaccaatggaaaatgacaaacgaatcatggctgaaaccttaactgtcccagaattattcagccattgcatatggtacggatgtggatggcgacgtggctgcaaaccaagcttctcaacaagcaaagcactaacaatattattgaagctcccaccatctatgatgaaacggcacacttggccttgcactttgcatcgggactgaaataaattatggtgttgtccttgttcagctgcaacaaactgagtggaaagaactctcctaaccaccaaacaaggagatggtgtattcattgtacaaggctcgaaatcaggaaaatcaggaagcaactcatcaaaatcagcactagtaatctcgtcagaagatggagaaataacatcttgtaacatgtcattgtgagcaaaagttggaataggttgaatcgctaaacaattcagac

SEQ ID NO: 101707 - DNA, 282 bp, Zea Mays
ggggatgagaccgaagccactgaaactgttccgatttccgaggcaatgaggcgttctgggctggtaacatcagaggacacacctgctgccgaagcaacacaagctgacgttgaagaagatgagtttgaagatgagtacggtgcaatgccatctaaacccagccacttagagtttgggaagtctactattaccgaaggtgatatggctaagttactgaagctaggctattttagcgaagacaagagggagctaattcgcttcgggggagaggaagttaccccg

SEQ ID NO: 101708 - DNA, 1015 bp, Zea Mays
cgatgacctaacagaaagaaaaatgacccatctacaaataaactaaactagggtggacggcgggttagttctttttaaagtaaagggcttatttgcaaagatacccgatgaaggggtatggacacacatcggccattagatccacgcctgatggtctagattaaatctaggtgcttcgcgaaccggtaagcgcccagaccataggaacgaaaaccaatcgccctgattttattatagttgtatctcatctcaccagcccgatctcacatccatggctcagatgcaatcaccaaaggggtactactacttctaatcacaaacgttcctagcataatcaatgactgagtgcttcccattctctccccccaaatctcacacaacatggcagtgccctttgactgacggtggaggtctcaccggcgtgcagcgttccttggctctggtgctctactcctcgatccgagacgttctacacaattctcaggccatagtgaatcatagggagtttacgatgtgcagactcccgcccacggtaagacgttggcctacgacgaccatcaattccgatgagaaatcggggctatcctaggggaatatcgtccacagtgtggccacggtaaccttccccacgccatggcgaagagcccctaggcaacctcatgcacccggctgttggcatcgacggggaacgacgtcgtcggtcatctcctcacggctctgccctcagttctttgtgtcgttggtgaagaggctctccgtgtgtgtgggggatggctctgggatgagggacattgactggactttatagtcatacacccgcggtgtcatggtggatttgttaggaattagttgggggagatccgcgagcactagaccggatcgacccaaatcctgggaaggggatgtttcttacatcatgggcccagtgacagcctcacagagcagcgtagatgtgagttcttattggctgagttgtcggtcccaccgggcagggacgtagcacacgcgtgaagga

SEQ ID NO: 101709 - DNA, 634 bp, Zea Mays
catcacattttgtggttagaatcatattacgaagagagcaccacttatattcatcgttaatgcccctaatgttgagggagagaatacactagtctctatattggtagataaatattgattccataggaatgcattagttgacaacatgtgagtgtattgcatgctgtggaagacagataaaggctataggccgtctagtgaatcggaaaggggtgtttaatatgagccaatgtattaataatatcccaagaaatgtgacatcattcatcatagctacaaaattgcgatgggccaaaagatgatggccaaattcatcccaccagtatccaccataatccattgtactaatgacaccccagaaagtatgactattcaacatagcaacaaaatagggatgggccaaaagttgcaggccaaattcatcccaccaaagtagatgtaagagtttatatctaccagattcaaaacacaaaaatgccagctcggtctcacaactattaatgttcaatgttcccatttagtaactagaaaggatagtaaaaggtcttcatgcccaactaaatgtagagaaaggaaggacaaagctctaggcattgtctttgccaccaggggctttatccttgtcacctttctt

SEQ ID NO: 101710 - DNA, 386 bp, Zea Mays
ggagaagttaaggtgattttgtgattaacccttgtttatttgtgctgcaattcaatcgattagatgtttacgtatgcgaattggtagaggtgctgtctagaaattttgtgggtgggcaaacagcagtagttctagcagtttctgggaatgtttcgtgggtatttagtgggaatcagtgggagaatcatgtagagctttgtcatacctttccaacgagtacttatgcgctcgattcggagttatattttaggagatatcgctgtttgaatccgggtatgttgctgtccaaaaaaaaacagatttgcaggtgggcgaataacagtagtattagcagtttctggatatttttcgtgggtaattagtgataatcagtaatataatcatgg

SEQ ID NO: 101711 - DNA, 451 bp, Zea Mays
gtcaggggtagtggatctctcctcatcacaccaacaagcagtctgatgacgcccatctttctataggtgtacatgtctacatcaagagtggcgccgattactgatcctagggcccaaaaacccaaataatgcctccaagcgtgaggtactcccctcacatgaacccaaacctcgtccaattgataactgggttcaacatcactagcatccttccattcagagatggtgagagtaactccatgatttttgagagtgaactccacatcagccatcctaatcagttcatcaactgagggaaataccaccaataaggaatcatcactatggggtagcgcttcccaaacccattcttttgtaatgaatcgagctagttcagcttgcaccgcctcagccgagagcttcccccactcactttgatcagagccgttggggcagggtcaggtgtttctag

SEQ ID NO: 101712 - DNA, 559 bp, Zea Mays
tttgcccattgcaatacgaaaaggagcacgtgctaaggctggagtgcctccaacaaggtatggatatgaacatgacattggcaattatgtttcttatgcgtctttgtcaccatcatatagggcatttgttgcgtcattgcattctatagcaattccaagagattggaaagaagcacaacatgattctaactggcgtgaggcaatgttggaggagcttaaggctcttgaaaagaatcaaacatgggagtttgtgaaactgcctaaaggaaaaaaaagcagtcagttgtaagcgggtattcactgtgaagcaaaacctagaaggaaaggtagaacgatataaagcaaggttggttgcaagggggtacagccaaacatatggaattgattatgatgagacatttgcccccgtggcaaaaatgagtacggtaaggacactaatctcttgtgctgcgaactttggttggcctttgtatcaactagatgttaagaatgcattcttgcatggtgatttacaagaggaggtctatatggagatcccacctggagtgtcagagcccgg

SEQ ID NO: 101713 - DNA, 653 bp, Zea Mays
cagattcggaataccaaacaacattataactgacctgggatccaatttcacaagttcggaattcttcgatttctgcgagcaaaaaggcattcagatcaagtacgcttcggtagcacacccgagggccaacgggcaggttgaacgagccaacggaatgatactggaggcactcaggaagaaggtcttcgaaaaaaatgaaaagttcgcagggaaatggataagggaattaccctacgttgtttggagcctaagaactcagccaagccgggctctacatggaaatactcctttcttcatggtctatgggtcagaggcagtattacccgctgatctcaagttaggggccccaaggttggtcttcgagagcatagcagaagctgagactactaggatggaggacatcgatgtactcgaggaagaacggctgaatgcagtaattcaatcggtgcggtatcagcagactctgagacgctatcacgacaaagccgtgcgacaacgatccttctcagtaggagatctcgtcctccaccgaattctaacgggggagggacggcacaagttgtcgcccttatgggaaggacccttcgtggtagcagaagtcactcggctaggatcatatcgtctcactcagatggatggcacagaagtcggga

SEQ ID NO: 101714 - DNA, 403 bp, Zea Mays
atctcatactcgagcatcgcaagatatgggtggggctggcgcgtagaatgggaagtactcgagcatcggaagatccaggcggggctggcgcgtagaatgggaagaatgagatggcggggtggtcctgcacttgcgatgggatgcgggccgatggtggtcctgtgcactggatggcgatgaggggtttgggttgcgattccttccatggtggcgaggcatggattgcgtttgggacgagaaggatatgggcagggcatccgcgatgcatggaaagaacgattgggcaatgggtggtcctacgcgtcaccgacaatgggattcctgcgtgctggattgctgcgaggcgtggatagcggcgaggggatgtgtttccttctgtggcagtgacgggatttttccttcc

SEQ ID NO: 101715 - DNA, 581 bp, Zea Mays
tatcttaatcctttcagactaaacctaaagtggtggactacttccctctcattccgagagttgagaggcagttgggggacacatctaggtacctctctctagctagtcggctagagctcgtgaactcctgcttctcatccctccgaacattttttatgtgttctcttaggcttccaattgcggtgtggagaggtgttgagctaatttctaagaagcatgctcttgtcgtgtaggatttgggtctctagaccaaagtgtgtcggaggacttggagtcatcaacatgcggcaccacaattaggctctccttatgaagtttcttaacaagtcctttaatagacttgatcagtcctcggtggatcttgtcttgagtaatcactaccgccgggggaggtttcccaatgtccaaaagaaatgtcccttctggtggcgtgatgcgctctaagcacttctagttttttgttccaatatcaaagttaaagtggcggatggtcgttcggtccccctttggtttgataactggagacatgatagattggttgacgcattcgtggagcttctctcatttgcggtggtggagga

SEQ ID NO: 101716 - DNA, 316 bp, Zea Mays
tggctcgaaccactctaatccttgtgttctcgtgttcatccaactaatcaggcaaatccctaggctccccctagttcacaggactaggcggctgcattctgccacttggctggtgttttctctccgacatcgaggatgactcaaaaacaagaaggagagaatgatgagaacatgacatataccaatacaactattgattataagttgaatttttagttcatcgataccccaactacaatatcatgttggcaggtgttgatacatcatcgtgggctagtcatacacctttgagatctaggtccaagttggagtatgc
